United States Patent Application Publication US 2015/0354009 A1 - sequence listing, part 21

SEQ ID NO: 631 - DNA, 135355 bp, Homo sapiens
acagtgctgttggccaagcctccagcagctgacgggacccagctgtagtgaggttgcagtgattgagtaggattggcctgcttcaaagcagaggtttctcatgggaatatgcttattaaactcccactggtgcagaaaccatgaacagaggatgaacaagtgaagttgcaatctcctccatcacagctcagttccccaacaacaggatcacaagctggagatgcctttaaggtaagcgtctattcccctggccaggctgggagtttttaaccctgaaacatactagttgggatgttcacagcagctacctgcttgtgttgcatattctcccaacatgtgttgtcttgttcttgtttcttaaatctgtttttgcttggtaatttccattgattataatgattttctgtgaggcttagcgagggaacattttaggagaggttataaatgcggctaattagtgacatgcaaatcgcttttgtggctgtttcaaaacatctaaatgacctataattaaattttgttgccaaattatttgttaattatcatcttcctatcaagtttattgcatcaggagatgtcattcactgtctaaaaggtggagtgaggaagagcatcatgcatatgtgttgcagagtgggaaagaatgcttgttttgttgggtttctgtctccattggtgtgtttttattttttgttcccacttctatgtatctcagatgacgagtttgtctatgggctgtcggaatcttctggttgagaaagatggtgggagccactttgtttaaatttcctaattttccataaacgaatcccttctgcaatatccccgacagatgcggcttttcaccctccacccaattccctcatgggaggaagggactttgagaggctgatcatttcgtggtctggcagcacttgtaagtccctggttctgttctggacactgtcccagctgtggcttctgagacaatggctaaatcctttctctcttttacagaccaccattcgagcacacttaagtgcaactcgaatgccattttccgctctgggtgaaatgttaccgattcctaagaaatcctggatgtcagatttttttttttttttttttttttgagatggagtctcgctctgtctcccaggctgcagtgcagtggcgcgatctcggctcactgcaagctccacctcccgggttcacgccattctcctgcctcagcctcccgagtagctggggctacaggagcccgccaccacgcccggctactttttttgtatttttagtagagacggggtttcacgtgttagtcaggatggtctcgatctcctgatctcgtgatccgcccgcctcggcctcccaaagtgttgggattacaggcgtgagccactgcgcctggccatcagatggtttttatacccttaagcatcctgatcactctcccttgatatgccactgaatctccatccctcttaaatcgcagggatctgcactgaaaaatattccgactctggtctgacttcgtgtaaacagctgagtggaactcatcttccttgtcccaaaagcatcttcttcttaacgtacaccaaactagtattaacttcagtcttctcagtcattcccttccccaactgacaaaacttgctttgtagttgtctaaagtcttcttcgtaggagctgcaagtaggtcacgtctgaatattggcatctttgtgtcattgattacgtttcttaaataagaagattatgtgttttccccattgcatttaattttgtgacttccatcttttgttccacttctcaaggtcttttctgaatctctgttctcttctgacgcacatgccattccccatgttggataaatattctgatagtcgattcatacaaatcattgatgtaaattatggaatagtgcagagctgtatagcacaggctcagtaacctctctggttcggtacaaagctttaatcagcacccttgtggagcgtttgtttagctagttacaacttttagatgctgtaacacatgattttctaattctaagctagatggctattcattctattgctgatattactggaaggaggaagtctggtagcattacctcaaaagacaggaggccaatgtcgttcccagagagctcaagatggcaccaaaagttcacggtttagcttcctaagtgcacaggaaccatctttaggaatatgaattcaggaatcttatgtcagacaaattttgcattgactagtctaactaaaagaaagataattaatatcttctttgtttatttaaaaataacatggttgtttataaagtgacatcaaaccatgtgcgcctctaggcagtaaatgtttatcggtggacattcacctaatatacacagcatactctctggctatattgggcatcttttgtttgcatttgcataagcactgttatagactgcttctgactccccaaaattcatatgttgaaaccccaacccccaaaatgatggtatttggcggtggggcttttgggaggtgaagaggttctgaaggtggaaactcatgaatgggactagtttcccatagtgattataaaagaggccccagagagtccccttgcttgttccaccatgtgaggacacatcaggaaggcaccatctatgaaccaggaagcaagtcctcactaaatactggatctcttggtgccttgttcttgcacttccaagaacagatgtgttgttccaggactgtgagcaatatatttctgttgtttataagccacttcgtctatcgtactttggcataacagccaaacagaccaatgcaagaaccattttaataaacaaggaattgtcattggctaattaagtagaattgtgtaatcatgttgtttgaatttggatcttgttggtttattgttgccataactgtctgtctgcaagtaacaataagcttgaagcctaagcaaacttaacatatgaaaatctgtgtcaagggcatctctgctttataaaagacagtcttcaattaggacccctccccagtgggattgagcacaaaaacagctatttgtgagaaaggatgccctcagctgcaaaaaaaaaaaaaaaaaaaaaaagatgttttcagtctttttcaaaattatgtttaaagacaactatcatcattaagttttttgctctatctagactttgcaatgttttccatctcagaacagaaactactgccctaaatattcaattaatattaaatggccctataggaatttatgtctaagagatagcattcattatctgtattttttcctattgctttttaggcatttatttatttttatatatttagggggtacaagtataattttgttacagggatatattgtgtagcagtagtctggacttttagtgtacccatcatccaaatagtgaactttgtacccattaagtaatttttcaaccctcactcctatctcactgcccaccttttatactctccaatgtctattattccaattagtatatccatgtctatccattatttagcacccacttataagtgacaatatgcagtatttgactttctgagttatttcagtaatgataatgacctttagttccctccattttgttgcaaaagacatgaattcattcttttatatgactgagaagtattccacggaatatatatataccacttttttttatccaatcctctgttgatggacacttaggttgattccatatctttggtattgtgactagtgctgagattaatgtacaagtgcaggtatctttttaatacaatgatgtctttccctttgggttcatacccggtagtgggattgctggatcaaatggtagttctatttaattctttgagaaatctccataccgttttccatagaggttatattaatttacattcccaccaacagtgtgtaagtgttccattttctctgcattcttgacaacatctgttgtttttagactttttaatatagcccttctgatggtggaagatggtacctcattgtggttttgatttgcatttctccgatgattagtggtcttgcacatttttgttttcatatgtttgttgggtgcttatatgtcttcttttggaaaatgtctgtttgtgtcatttgactcctttttaatggggttatttgtttttgtttttttttctcattgagttgtttgagttccttgtggattctagatattagcactttgtcagatgcatagtttgcaattttttttccattctgtaggttgtctatttactctgttgattgtttcttttgctgtgcagaagctttttagtttaagtcctgtttacctaattttgtttttgttgcatttgcttttgaggacttggtcatgaagtaaagccaagagtgaattagatatatttttttaagtttatggaaaccagcagaagacatagactacatagacattcatttttttttcactttcctcatcatggaaatattctgagacatgaaacatcactgtgacccaaggagaggcattggcgagagttagttgaaagagaaggagaaaggaaaagagtggaatatcattcactaaacacctcccatctgccttggaagttgggtgcacttcatctcttttaaaaatggagataatgggacatggaagcttggagtgataaagccaatatttgaaaaggggacgagttgactttatgatctgatcttttcacttaaagctctcagttcttcaatgagaaaagtaggtgtcctggacattattttatactagccaagttctgacttgagcaggaattaaaatgtaatggtttcaaagcactggataattcatcaaccagtagcactaagcacaggggtagggttagtccctcctcataccaattttatggctgtcattagagttaagcatttaacctccctggacttcagtcccttcacttgtgcaatggactgactgtttatttcccccccaaattcatatattttaattctaacccccaagatgatggtatttggatgaggggcctttggaatgtgattaatcatgaggggtttgtcctgaaaaatgggattagtacccatataaaagagaccccagagagctccctcattccttccaccatatgagaacatggggagaaggcactgtctatgaaacaggaagcaggtcctcaccagcacagaatctgcaataccttagtcttggacttccagcctgcagagctgtgacaataaatttctgttgcttataagctacccaatctgttgcattccacgatagcagcccaaatagactaagacaatctgtaaaataagggtattcaccacccatgaggtctcatagaaccttctgggtctaatcgtctgtggttctcaaagccttccccatttgaaggttgatgtttcctacttggtggaacatttctcttgcttccaactttattttgctctttctggcttccttggctgaattctctcttccctgtaattttctctgcatggcacttgcagtttcaccagtgggctatggaagatgtctttcaaagcctctggctaaggtgtaagaacagctggggtcctcattgggaagccgattaaactttaaaacagtaggctgaggtctagaactgttccaggaggtgagatgacagcaattgtccctgtgttcataccctctggttaatgtgactcccagctatgaatcaacctttatataaatgcattttggctcactggactgaatgtagctcggattcaataatagaaaatgtgtgggaggagacagtgagaaccccgaagccagaatggtctgatgttgtttcttgtgctggaggtccccaggttcagcgattcaccagaaggactaacaggctcagtgcatagtggggctcatggctaagatgtatttcagcaaaaaaattcagaacacattgaacaaagggaaacggcacatggggtaaaggctggcagaatccaggcataagcttccaggtatgtctctgaaaggagtcacacgggacatacttaactcctccagcagtgagctgtcaacacatatgaagtgttgcctacaagggaagctggttagagactcagtgcccaggttttttattgggagctgttcatataggtgccctttgcctagtactaccaaaattgcagactcccagacaggaagcaggtgttcagcataaactatgttgtttgtacaagcatttcaggcagagtgagccattcttgttaattctgggaagggtgagaaccctccccaaatctaattcccaattgccaaccaagagcacatgttacaagcaggcctttctaaggagagcaatctcaggtcctctatgttaacttctttctgcatatttctaaagtgttttatatttattatctttttaaggaaacaaactctgtcaccatgaagtcctagatgcatcccggaatgtaaaagctagaggagaatgttggatgtagcccatgacttcattttatagataagaaagccaattctcttctttttctcttttcttatttttagtatatttttatgagatataattttcctacagtaaaatgcacagatcttcaatgttccgtttaagttttgataattttatacaaacatataatcactgtcccaaacaaaatatatagagcatgtccattatcatctcagaacgttcctgttgcccctctctaatcaataccccagccagagacaaacacttttcagagttctatcaccacagacaatttttgccttttcttggactgcatatgaatggattcaagccatatagattatttggggtctcacctctttcactcaacataatgtgtgtgagattcttatgtgttgttgcatgtatcagtggttcatttattttcatggctgagtagtcttaggttagattgatgttccagagtttgtttatgcattctcctgttgatagttatttggattgtctccagtttttggttattgtgactaaggctttgggtggatagatagttttatttctcttgtttaaacatcgagtagtgtaattgcttgacagtaagatacatgtatattcaattgtataggaaatggccaaacttttctctaaaacgtttgcatgagtttacacttcaacaagtgatatataagagttctaggggccaggaacggtggctcatgcctgcaatcccagcactttgagaggctgaggtggaaggattgcttgagcccaggagtttgagaccagcctgggcaacatggtaagacctcatctctacaaaaataaaaaaattagccagggtggtggctaatttgcctctagtcctaactacttgggaggctgaggttgggaggattgcttcaacccaggaggtcaatgctgcagtgagctttgttcgtgctactgcactccagcctgggtgacagagcatgaccctgtctcaagaaaaaaacttagagttccacttgttctgcatcttcactagcatttgatattttccgtttttcgttgttttgttttgtttttattttagccaccgtaggggttgtaaaatgctatctcatggtggtaattttcacttctctgattactaatcaggctgaatacctatttatttgcttattagccttttgtatatcttcttgtataaagtgcatattcaattgttttacccatttcattgtttcattccttttttattattgatttgttctttacatattctggatataaatcctttaaaaaataattgtcttacaaataagtttccctggtctatgttgcttatctatattcctttttccttaatttttaaaaaattgaatgttactttgaattattttatctcatgtatcctctcaatagtcccactctcttcacttgatgataaattagaagcatctaaaaaaaccaatcattccccaaaaagtaaattaaaacctttctatagccattgttcagttctagttactctattagccttgttcaaatcgttgtttttttttttttttataaaagcaagctttattttgctatctgatgagacaatatgctagtttgagagtttggaataaaaaacatggatatttgtattattaaggaaagtttccaagcacatagttattaaggaaagcacatattattaggccaagtttccaagcaaaagtcttagaatagacataaagatgtgaaataatgaacggtgaccttagtatttgccattgtcattgttccatgcaatatgtttaaaaaatgtttttatttgatagtgataagaatactatcagatctaacctcttaaaattttaagtgtgcaatacagtattgtcgactgctgatacaatgtttgactgcaggtctctggacttaatccatcttgcttacctaaagttttatgcctgctgactcataaatccccattttcccttcccctatcccctggaaaccaccactttactttttggtcgtatgaatttagctactttagatacctcctgtaagtggaatcatacagaatttgtctttctgtacctggcttatttcacttaacataaggttctcaaggttcatccatgctgttgcatattgtagaatatccttccttttaaggctgcatagtattccattgtatgtatagaccatgtttttttttgtttttaatccattcatttgttgatgggcatttaggttgcttccatatcttggctatggtgaatagtactgcagtgagcagaggagtgcagatatgtctttgagatcctgatttcaatgctgttgggtatatttccaggagtggggttgctagatcacaaggtagttccattttttaatttgtcaaggaaattctgtactgtttttcgtagcaacagcacctttttgcatttccaccagccatgtgcaaagaaattctccacatccccactaacacttgtctcttgttttttgtttttttaagagcagctgttctgacaggtgtggagtgatctctcattgtgtgtgggtttgagttgcattttcctgatgattggtgatgttgagcatcttttcatgtgcttcttggcatttgtatgtgttcttcggagaaatgtctagtgaagtcctttggccattttttaattgggttatttgtagttttgttattgagtttgggagttcattatatatttgggatatatggttatcagtatatggtttggaaatactttctccccttccataggttgccttttcactccattatttcctttgctgcacagaagcttgttagtttgacgtagtcccacttgtctgtttttgcttctatggcctgaagcctattcacattcttaaaagtatcttttgatgaatagaaatagttgcttcattttaccttttactctttacattttaatttggataattttcttgacctgtcttcaaggtctctgattcttttctttgcccatgacatgaacttcttatttctgatgttacatctattttgttttatagctagcatttctgtttgtttcttcttttgtattttcatcttgccactgaaattccccatctcttaacacatgctgtttgcctttcctgctagattcttttatggatttcctatggatgtcttaaaggatatagatgaaatatctaacatttgcatacctcctgctatttcacatgtcatacgtgcaaacataaatatgcatgcataatagacattgattataaaaaatagtggagaccgagtcagtcatattttcgcctagaaaacatcacacgcttcatctgtgtggccccttggtaagctgccatttcagtgtggttgtgatttgtttggttttaattaggttccgctcacccccttggcttcagatgctttgagaggggatccacactttccctttagcagagcttaggatctgagcattggtgagactcttaagtcatgctctgtttgcagcctgactgctcacttgttgggtttttgaagggtcctctttgttttctgtcttgccctggatttggtcattccaaattcccatcctagctggggaacagggacaggtgtgtggctgcccatggggaagatttggagtgccttggaggggtgcatctgagcttccctgcactgcctcactctgagttttttttgcactgtgtggtgtacgattccccagggggcttcatgaagactgcaggagtgcattgaagggttggctgcaggtgggctgtctggctggacctcatcaggatgctgatctgccgtgccagcctacctacacccagtcgttaaaaactcctttcagggtcagctggattcttcctcttctccctactcctgctaccaggggtgaaagcaactgaaggtttcttctttgtaggaaggttcatcacatcctggattctagttcatttatgttttttctgcatcttcagccttttttttgtcggggggcggggggacagggttttgctgtgttgcccaggctgcagtgcactggtgtgatcatggttcactgcagccttgcaccccggggctcaagagatcctccgacctcagccttctgagtagctgggactacaggcatgtgccaccatgcctggctaatttatttatttatttatttatttgtagagatggggtctttctatgttgcgcaggctggtctcaaactcctggcctcaagcagtcctctcgctttggccccccaaagtgctgggattacagacatgagccaccaccaggtccatcctcagctttttgatggatcttaaaaagccatgattttaattggaagcctcataaatcactgttgggaatgtgaagtggttcaaccactctagaaaacattctggtagttccttcataatttaaacctagaatttccatatgacccagccattccactcctaggtatgtacccaaaagaattgaaaatgggtgtgaatgttcatagcggcattattcatgatttccctaaagtgaaagcaacccagacatgtgtcagctgaggaatggataaataaaatgtggcacagccatgcaatgcaatattatgtgggcattgtattggtccactctcacactgctataaagaaatacctgagactggataatttataaaggaaagaggtttaattgactcacagttccgcatggctgggaaggcctcaggaaacttacaatcatggcagaaggggaagcaggcacatcttacatggtggcagatgagagaagagcaagtgaaggaggaagagccccttacaaaaccatgagatctcatgagagctcactatcacaagaacagcatgggggaaactgcccttatgatccaatcacctcccaccaagtctctccctcaacacctggggattataattcaagatgagatatgggtggggacacaaagcctaaccatattaggcataaaaggaacaaagtacttttggtaacactgtagtatgtttatgccgatattatcaggtgggtgagcctagaaaacatcatgctaagtgacagaagccagatacaaaaggcctgattattttccatatgacccagccattccactcttaggtatgtacccaaaagaattgaaaacaggtgtgaatgctcatagtggcattattcatgattttcctaaagtgaaagcaacccagacatggtgcatgattccattcatatgaaatgtccagaataggcagatccgtagagagaaagctaattagtggttctcaggagctgggagagaggaatgaggagtgaccactgacaggcacagggatctccgtttaggggtgatgaaaatgttctggaatgagatacacctgacagttgtacaacattgttgtacaattaaattgatgtactaaatgccactgagttgtacacttaaagtgctttaaacggtgaagttgatattacgtggttttataataatttaaaaagaaactatgagttcaaggcttcatggcttctttaccttgtcaatgtgtgttcactggtccctttggctttccacgtcttaattagtgtggagtcctaattagggagagaggtcaggctagggggatggagggaaagtagaaagagaaggcaggtaagttataagtctccctttcttcatgctccagaacagatagccctcctgtgcaaataactcacagtctgcctacacccagctatctccagacccttggctgatagaaaattgcaagttatctcactgcaaccttggcattatcggtactgcacaaagccctcttcagcacacagcacaagcaccatcctataaaatccccagcaagtctttgtctctttgcagtcagctcttctctcactgacctgcctgttgcacgcttgcaacgtattttcatactctctctaataaatctgctttttttttttttttttcttaacctacaactgtcttggtaaattctttttattcctgcaccaccgaccgcagatagtcgccactcacccatgacaattagcagttaaagctgactgctcttttcatagcctataactttaaatttgtttttttctgtaaacattttcaactggccacatatgtcttgagtagacagaggctaattgtcagcttttgctttctgggttgttctattagggtgctatggcatagggtcctattaggatcctatggcaaagagcaacagtgagggtaagtggaaatttttaggaaaacttgaccacatctggggtaacaaattaaggcccaggggccaggagtttggtagaagcagcgtgaatcagaagctctgggggaaatggagtcgtccccaaaagcaggcaccagctgcaggtgcatgagtgaggagggagggatggtgcatttatacactgcattagggctagcgaaacctttatacagtgcattagcgttagcaaaaggcacttataggactttatcccctttattttttttaaccaccttgagaaatagagaatgggtttagagaaggcagagtgacatgcattttgttctgttgcaatttgggtattcttatgccttagtttgtctctgatatcttttagccaaggggaagaggctggcaaggtttccattaaaatttattttcacctttacttataccaatttggtagatatagcaggcgagcagtttcctaccttgaacaggggcatgagaagaatgtatctgcttttgctgcagacagcccaggtctggagaccctgcgattgggaaggctggttccactgggtagaagcactattgtgaatagtgatgtagtaaaaaagggagtgcaggtggtatggtttggctgtgtccccaccacaaatctcatcttgaattgtaatccaaattataatccccacatgttgggagagggacctcatgggaggtgaccggatcatgggggtggtccccccatgctgttctcatcgtagtgactgagttctcacaagatctgatggttttataaggggcttccccccacttcgttctgcacttctctctcctgtcgccatgcaaagaaggtctctccttcgccatcaccttccgccatgattgtgactttcctgagacctccccagccatgtggaactgtgagccagttaaacctctttcctttataaagtacttggtctcagatatttctttttttcttttttttttttttttttttgagatggagtctcacttcttcgcccaggctggagtgtaatggcgcgatcttggctcactgcaacctctgcctccagggttcaagcaattctcctgcctcagcctcccaagcagctgggattataggcatgtgccagcatgcctggctagtttttgtatttttagtagagatggggtttcaccatgttggccaggctggtcttgaactcctgacctcaagtgatctgcctgcctcgacctcacaaagatatttcttacagcagtaagaaaatggactaatatagcaggtcttcctttggcacattgatatatttccctttagataaatactcattagtgggcttgctggatcatatggcagttctagttttagttttttgagaagtctccatacggttttttataatggctgtactagtttacatttccacctgcgcaggtcacctgctggtcatctaattaccaaagcaatttttacaaaattcctctacatctttttatttatagataatcacagctgtatgcaccaatttatgatccctgaaaaaagagcagcaattatgagacagcttgttcaggggaaggagctcagtgtacaggttagggcctcccatcgctgtcttcctatgtcagatgcccgggctgattaccatgtctatgaaatacctctttaacacagagggttaactagcttgctgcagtgggaggtaagaataacaacagcctggccatccactgatcctggaaaatgctcatccacagagcagctgagccaagatggtttgagctatctttgtcttgtttcctcatctggttgttaaatcccagaggccctctgatattgacagcgcagatgctgatatatattaaatgtgtggaagcacttcatgccatccccaaatcccttgctttttcttctcctcaaacttgtgtgtattttattttctctccttttacatctgctgcccatggttttgttctgcctgatttcccctgtaacataacccctggttaccaaatgctggaaagtcagataagatgggaatgctctatggcgtttcatccaggggatcctggaaaatgcaaatatacaaaacctatcatgaccaaagcttcctgtgaggtccctggaaaaactctgtgcacagagatgccctcagggggcagaataacactttattattttctccactactggtcctcaaagaactctcacaggagactgaattctgcccagagctcctttcctgcatgtcccagacatccaccatcatttcctcctaagtccagactgactgactgactctgttgccgacatgcaaggaaagggacttctcttggtttaacaggaaaggaaatagagggacagagcaaataaaagggtggtggagctgtagggctgggacagagactatatgggagagtagatgttggacaaggagggaaaattgacactccagtcagaggcagctctggcctcttagctcactgtcattcttaaggcagtctctgggaaccttggcttctttagaacactctacctctgaaatctgtgacctaacccatgacttcaaacttgagcatcctttaggcacttggaggatgtaaagactatcctcatcctcatggagagtttattgttcttgaatctgatccttttacaggagaaagaagaagtcttaggctcaccctctgttaagtacaaaagtttcaatatatgtttctagacgtgttttttttcttacaaaatccttctataattcactattaccaatgaagagatcatttaaacatagccttctcaaccttttcttcaaatcccaccatcatgaaccatttgtccactgttctacagtgccaagaactctccaaatatggtggcctcttaacatgccagagaggaatgttttcagactccccagattgtttaggaccgctatgggacacagtcctctccatcaaatttggtaccttgtaaataaatgaaaatattaggtaagctgtgatgagtggttcatagcaaagcatttggatttggaggttgggtagaggtcttagatctgagcaagagagaaatggctccttccacatggtaactttatggtgagcaccatttatatcttgcctcagggagagcacacatattacacataatgggccttctggatctcattagagaggttaaaaccaaaattgcaacagaggtatcctgcctatgatggcactcaaatgtatcccaagtctgtacatttgctaaactaacagggatgaggagcttacaccaaggtaacattaattccagttgccttggtctgtggtatgcacttgtgtttgaaaccttgaaccttcttcagaaaaactgtttgaaaaatatttagttagccgggtccattggttcacgcctgtaatctcagcactttgaggggctaaagtgggagaatcatgagcccaggagttcaggaccagcctgggcaacatgacaagatcccatctttacaaaaattttttaaaaattggccagacagacacagtggcttgtgcctatggtctcagctacttgggtgggaggattgcttgagtccagaaggttgaggctgcagtgagctgtgatcatgccactgcattctagcctgggaaacactgagaccctgtctcaaataaaaattagtcttctgaaaaacatagggaaattaaaggaaattgaagtcctagcagagatatccaatgttggttattacacacttgtgtatgtgaatgtgctctttttattttctggttccttttaccttgttttatacataacctttagataagctttgaattagacaaaacatgttcactttgtttttaacaagaatgtttttctacaatatatatttattggaaaatacccaaataaagaaatacctattatttaatttaatataactttatattctaaattatgaccaatttaactacaagtatttatcctattacatttatctattttattttgtttacctagattatttatgaaaactgtgatagttatgatttaaagttataaaacccccattgcaaaattataactgagacagtgaaaaaagatttgacctaactgactccatcttgctctgaacctccaggctgtccttgttcattcctgggcataggtcaaactaactttgggaggaacttagtttatagattagctttgaaacagagatgataacagtcctttcccaaaacaaacctccttactgcctgtggactagactgcctaaagccacgagattagaagttatggtaattttactaaataattaaagatgtagctattttcattaaaccaatatcaatgtcttatttattaaaaattacacaagcaaaggtcgttctgttttgggctgggtttttagttttgtaacccctatgccaaaatttgacaccttatagtatttggcagggataagtatgacattgcttaattaataaatgcaaacaatgcatgctgacaattcttaagaaatttctaatattacttaccaataattttaaagctaacttatttattaaaggttttaagttatataaacttgaaaaagcatttgactagtccttttttcctgataaagtatttaagtgtttttatttttctttaagccaattaattagagctcttttatatatttttagtagtgaaacattgtgtacacaacgcataaatacatagatgcattaggtatgcgaatgaaagtacattttgtagatccataaagaccatcctttttttttttctatcttagactttcagattcttgataacctgttttacaaccttaggtggttgtcagctaaatagccttaaaattgcatgttaaaggaaaccactcaagtaaaaatcaaacagcaaatttacatcataaggcagagagagaaaagatctggtgttgctagagggagatccttttatttttctttgagcagatcaaacgtaaaattacacatatctattatgtgattgcataaggacaccaattttgtttagataaggactatctatcttttaactagatttctgaactctggccagaacccccccaaaaaccaaagatttgctcaaaaaaaaaaaaaaagacaagttcttaggagagaaaaacaaaacaacaaaacacgaaggccttttaaatacaaacatgcacacacacacaaacacacactttttgttgttgttgttagtagagacaggatttcaccatgttaaccaggctggtctcgaactcctggcctcaagtgatccacccacctcggcctcacaaagtgctgggattacaggtgtgaagtaccatgcctggcctcaacatagtattttaaagttcatctgtgtattgcatattgcaatatttcttcattttgtaaggttaacaatattgcaagaataatactgtaagaataatattgcattgtatgttgtgatggttaatttcatgcatcaacttgactgagctaaggaatgcccagataactagtaaagcattattactgagtgtgtctgtgagggtgtttgtggaagagattagcagttgcttatttttatttttatggatttaggagtacaagtgtggttgtgttacatgaatattttgtgtcatgaagtctgcacttttagtgtacccattgcccccatcatccaaataatatacattctacccaataagtagtattttctccttcaccccttcccacactcccatcttcaatagtcttcaatgtctgttattccactctgtctgtctgtgtgtactcattgtatatctctcccttataagtgagaacatgagattttttacttttgtttctgaatcatttcactagggaacattttctttgctgtggtaaagttcctgttatgtaagcacattgtttacatgtcttctgcagcaacatggatgaagtgtcctccagtttcatccatgttgctgcaaaagacatgagcccattcttttttatggctgagtagtattccatggtgtgtgtgtgtgtgtgtgtgtgtgtgtgtgtgtgtgtgtacacacaatgcgtggtgtagatagatagatagatagatagatagatagatagatagatagatagcacattgtttttatccagtcatcgttgatggacatttacattgattccatctccttagctccaggtagattcagagaaaaagcatcagattatagaagcataaacatcacagggttttagacatgataggagcctttttattgtacagctgtagaaacagggacctgcaaagactgggtgacatgtccaaatgttgacagctagttagcagcagcaacaggatggcagctaccatctctggatccattgctgattgtcctcccctccatctcatgatgcatcaactggagcaatgacagagaagggggaaaataaggggaaagccaggagtggtggctgacacctgtaatcccagctacataggaggccaaggtgggaggattccatgagtccaagagtttgtgataaacctggactacatagcgagaacccatctctacaaaaatttttttaaaaattagctaggtgtggtggtgcatgcccgtagtcctagctactcaggaggctaaggcaggaggattgcttgagctggggagttcaaggctgcagtgagctgtgatcgtaccactgtgctccaatctgggtgacagagtgagaccttgtctctaaaaattgtgtttttaatttaaaaaattaaaaaatcagcaggaaccaatagaatcttcacacatgcaacacttagtgtgtcttcactaagtgaagacttcagtgtaaagacttcaaatgtaaacaaacaggttaggcaaggcttacttttttaaacataatttttaattagtattttattaatactcaatgtatattataatgaattcaactatactaggtataattgattgtattgagaaatacaaagaccaatgcaccaggtactgttgtatagtcgatagaaacagattcgctaaatcaataaaacatgaacatttattttagaaaaatcacaagtgatttaaataggtatttaaatctatagaaaagtctgtttagacacaatttcagaatgggttttttctgtcctcatgtcagactatttttctttatcgatttaaaacaggacctttgttggataatagcactttgtgaatcaaatttcaccagtgtacataccttggattgaacgaagctgcttttcttctaaaaaatattgtttgtcgtgcaagtttttctctgtttttaataagccttcttccccatcgagcaaatagatcaggaacattttctttgctgtggttaaagtttctgttacgtaagcacattgttaattttcttctaatgaacaaatttaatataattacatctctagttataaaaatgttcctttgtctctctctttcctaatgatgctgttgtaggaatagctgctttctccacaaaaaaagtttttcgtgctcttttgccaaattaagtttgttcagaaaaataatttttaaagggaaaattatgcagtttttcagaagttaatgtgccatgttcttaatattttggagtggagcagctttatttaattttaagtacttttatgttaactgactctgtttcagttttttgaaacctctttatcaataccttcttgtaagccaggcttgtaggaaagaaaaagcaaagtccacttacttctgctggtaataatttatatacagtgggattctaagtggctttttttttttttttttgagaccgagtgtcactcactctgtcacccaggctggagtgttgtgtctcgatctcggctcactgcaacctccgcctcccaggctcaagcgattctcctgcctcagcctcccgagtagctgggactacaggcaagcaccaccacgcccggcagattttttgtacttttagtagagacacggtttcaccatgttgaccaggctggtctcaagtgatccacctgccttgacctcccaaattgctgagattacaggtgtgagccaccctgaccagccttaagtggctcttaacaaacttaaattttcacacattcttaattgggctagatggtatttctcatcctagtcctgataatatctacctccaggcacattttggaggtataatgaatgatatgctgagctaaccaaaatcattttgtgattcagagattaatataggcatgaaaaattattaatgggcttttatcctattgtgttcaatttcaataaaatggtctgcacctgaactaacccttttaccacaaagcatagaaaatggaaatgaatcttctccaaggagcgcgcgcgcacacacacacacacacacagatatgtatgtgtgtgtgtgtgtgtgtgtgtgtgtgtgtgtgtgtgtgtatatatatatatatatataaaatggatcccttctatgatggcatcttggtgtggaacaaattcataatcttaatcctccagtatttttaattgttccctacccagctaatgggaccagtatctttccaaggaacaaggctgaagtcatcattgactgttgcctctttctgacacttcacatccaggcaattaccagctcatgttgattgtgtctcaaatcggctcagttctctccagttctctcccacctgcccctgtgctagtctggaccagcttccttggggggttatggccattgtcgtgcgatccactccagtttctgcccaacccttctgccagggagcaaccagaatgcctgcgggagtgaaacgaaaccatgcctgtcatccctagtgtcctcaatctctgcttcatcacttctggataaagataaatgccccaaacctaaaacaacagaaaggaaaaagataaatgccctccatgtctgatcacgatgatttatcctgacctcttctccacctcacagtcagacttttgcatggaaaaaataaccaaccaaccaatgcgcacagtttgtaggaatactgcaacatcagcaacttatacaataatgataaaaaacaaagaacatggagagaaacacacatattacctgagtggctctctgagtggctggttgatgtttctcttttgtacatttataatagtaaaaatacaacaaaacatttatttaaaaaaatcaatttttgtgtacaaaaatcacaaagcataatagtccaaagtaggtctctaaatagctaggtttttttggtgagattttagttagtcctcatatagagcctgaattttgctctatttaatctcttttttagccatttccctttggtctaccctaaatgcccttttctaattcaggtgctttcaactttcagttataaaacaaaaattcatttttacatggttgctgagcagagacatgtgtccttaaattgcttatataaattctgagactcattactaatgaaacatgttcttaaaataagttcaacatgacatttcagagccgctgtcctggggagcttttttctcgtcctcattgacaaaattgaccttctcacctcaagctattggagttatctactactgtgtaacaaattaccccaaaacttagcagcttaaagcaacttgcgtttgttatctcattgtttctgtaggtcaaaaatctgggcacagcttagctggatcctccttagcttctacgtctctttcaggctacttcaggtgtcatggctgtggtctcatctgtggtccaaaagtagcaggatctctttccaagctcattcagatagttgcaggcaggacttagttccttgcaggatgttcacctgaaagcctcatttttttttgctggctgttggctggacacttctctctttttcttataacatgggtctctccacaatggccacttacttcatccacagccagcaagcgatagagtttgccagcaagatagaggtcatagtcttttacaacccaatcacagaattgacatctcatcactttttccatatcctactcattggaagtaaatcactaggtccagcccatactcaacaggaggcgattgtatcagatgtgaataccagaagggaagtcactggggccacttttagttggctgaccacatttttgttcaaaactctattagtgtacttattatactctacataacattttattattattaatagttgtaattttaataataactttataagttaataataacttaatattattaaataactataatgaacaactatggcctcttactatgattcccttgctgaatcaataagtactaagaacccagaaggagagaccctgtctctataaaaaaaaaaaattaaaaattagctggtcatggtggtgtgcccttgtaatcccggctacttgggaggctgaggtggcaggattgcttgagcccgggaggttgaggctgcagtgagccgtgatcacgccactgcactccagcctgggtgaaacagtgagaccctgtctcaaaataaataaattaattaataaaaataaaaaggtcctaagtgtgtagttttatcttcaaaataatacttgtaaggtattattattcctttcttacagaaaagaaaactaacaggctaaatatatagcttgtggtttcactgctagcaagtgggggagaaagaaagaaaacctcaacagcataaactgcagttctgactccactgcccaccttagtgggtttggtacttgtgcatttcctcatttgacctgtcagagtcttgcagggtgactgtgtgtctcatacaatcatagaaccaccataggactgctataatgtcatctttctgggttttgccctgtatttgtggaattgaaatagattcggttgaattctcagtgaattgctttccactggaaaggtgtagctagactaaaatgctcctaacaagttacatttgtctagcactttattattttggaaacctcttttggggttggatagggcagggtcttactctgtcgcccagagtggagtacagtggcgcaatcatagctcactgcagcctcaaactcctgggctcaggccatccttctgcctcagcctcctgattagctgggactacaggcatgtgccaccacacccagctaatttttacattctttgtagagatgggatcttgctatgttcctgcagctggtcttgaactcctgagctcaagcaatcctcctaccttagcctcccaaactgctgggattgcaggtgtaatctactgcatctggtcgcattttggaaaccttttatcgctagtatcctgagtaactcccccatggtcaaggtgacatcttagggtaatgtgcagaagagtgattcacaaggagaacatgccttctaaagcctcatggctggtggcctgagatgaggccagagctctgactcttatttctcctctcattctgctagttcttgacaagcagagaataaaagccagcaaaaagagaattaaggagagttaggaatgagagggtagctgtaacaaaaacaaacagagactatcacattccctgggttggttatctttcaggaagaatcgtggtgatctgcgtttgctttttatgaaaaggggagaccccgaaaagggagggaggtgagaggactattggaagtaggtcaggggagagagagagaattttatgtttcccaggctgggagctgtgtctcacgcctataatcccagcactttgggaggccgaggcaggtggatcacttgagatcaggagttcgagaccagcctggccaacatggcgaaacaccatttctactaacaacaacaaaaaaagattagccagctgaggtggcaggcacctgtaatcccagctaatcaggaggctaaggcaggataattgcttgaacccgggcggcagaggttgcagtgagtcgagatcacaccactacactccaacctgggcaacagagtgagactctgtctaagaaaaaaagaagaagagtatggctcccaatgactaatgtgtaggagtaaggattctttgactggggttcagacaggcaaggagcatgatgctgttgtgcagagtgtaactcctgataaaaatgtaaggtagcaaaagatttgccacatggacaaatgacaaaataagcaacttagaaggcatgagaagaaggaatgcttgcagcctaatgttttccttgaagagcctttttggagatggttgcctatgtgcattagaatttaagagcttccataatttgcggaagtatgttatacccgagaaacattgtctgttaacaccgaagatgtacttgtgggtgcaaatgagaaatttacacctactcaaatggtttggcatttccaaatcctttggtagatgccgatctgcctacatacaggagcagagggaatgaattgcaattctgttatgttcaggaggtgaaaattctacagatgatagggcgggtaacatgctagcactaagttggtggtttcagctggggacagttgtgttccccagaggacatttggcaatatctggaggacatttgttatttcacaactaggggagaacagagaagttggggacagcatcctgtcggggtttagtgggtagaggccagggatggtgctaagcatcttacaatgcacagaacagccccctccccaccaataaagactcatccagtccacatgtcaatagtgttgaggctgagaaacactattaacaaaatctgaggtccctaagtcaaatatcaactcatgataaaaacatgttctcatgttattttttcacacaggagaaattggttaagaagtaggtaaagcagttacagtgcttggtacatactaagcacccaaaaaactgttattttaaaataagaaaagttatgtatttatttcctgtatcaactgaaacatgaacctagtaatgaagtagagatgcagaacacagcctgctggctctggccttctctgatatgaatgctatatgttgcactcttatggggacaggaggttattaaactcactcttttgcaaattcctggtattagttatggatttgtaagccattaaatctacttagggacccctgatgctccaaccctgagcttttcgtgggcattattaatggtgttttcagttttcttaaaaacctctagtgtgtctcactcttcatatttaaagacggatgctaatttttgaatcttctctgtgccccgtaaaaccttccagccatttaaaaaaatagtgcatggccctgcttaatttcctctctggttgaactggcatgagggccttttaattaaacagaataaacatacatttttgatttaatgtggctttctttgatacttgctcaaccagcccctgctcacatggtgtctacagtctaattaggaaggggaacaatcatctgatctcagatttacaacccttctctgtcattatttattcatttgcctagtccacaaatcttgactatttaatgtgtgcgaagcatgagagaggatgctagggatatagccaggaggcatttagacttcttcctggctgcagaatgcttccagtgcagcagggaagattaaacgcaaaataactcaaactgcacttgcttgtatcatcagtgctgagaaagaaatgcacagtgataagaaaaggggaacttcctcccatgcaaggaatcttagagggtgtccctagataagtcacatgaaagctggggatgggggctgaagattggcctctccaaattatctctgccctcctctcattcttcagcctttccgcacctcactccaatatgaggtccattgttacaatcgtggtgttgaaggtaggagagttcaccttttattacacccacctagctatttaaacacaagcatgtagtacttgtatagatatatttgctcatatttgcaatttctctgtcacggatgtggggctggagcctggatttgccagccaaagagttaacagatgttgaacgcaatgaagaattgtctcaaaacagctgttccaagaaagggatagtgtttcgaataaaaagaacatttgttagagcacacatcatcttgagcctagccgtaaaaaaacccgttcacaagataagccattgttcgctctttgttaccaagtttgtgtttaaggagttaagatttgggagagactttttttttttttttttgagacagagtctcgctctgtcgctcaggctggagtgcagtgagacggagtctcgctctgtcgctcaggctggagtgcagtggcgcgatctcggctcactgcaagctctgcctcccaggttcgcgccattctcctgcctcagcctcccgagtagctgggattacaggtacccgccaccacacccggctaatttttttttttggatttttagtagagatggggtttcaccgtgttagccaggatggtctcgatctcctgacatcgtgatccgcccgcctcggcctcccaaagtgctgggattacaggcgtgagccaccgcgcccggccctgggagagactttcaacttagctgcaggtcctgcccagcacagtgttcacagtctgcaaggaaggtagcagggtattgcatgggattttatgttaatgatgttcaggggatgataattctcacccgggaaggaaatgatccattagttacactctcagtctgtgtcttaggccagcatgaagccattacatatctttagctgcaaaataataattttatgatgagataaggggtagttttatttctggcctattttaaaagagagaagatgcaaggcctacgccagggactaaatcatttcacttcagactttgtatagaattcatgtcaaataaatgtcataaattataaataagacataagtgtgtcacataaaataattctatggtaatagttaatgacagagctaagctgaataaatatagcaaatatgtgtgtgtgtgtatgtgtgtgtgtgtgttttcatgtaaacattttcctctatcatagaaagtgaatgtgaccatcgaacacatccttgaattctaggattagtcccatggatttaagtctcccaaggagataaaagtgaagagacttaaaataaaacaaacaaaaaactcttttgccctatttatttgaataaataagagtaagatagtcaatcactcaatcactttgcaaagcttaggaatctaactgaataacaaaagtaccaactcaatgtagataaggagaattgagtggatcaggagagagagaggtgattgactatgattagtagtgtcatgtgtgaaggaagtacccccggactgccagtcacatagcttcccacatttactctgtcttctttaaaaaatatcatgcttctcaaaatacttcacattctaagagtgcagctgcacgaacatagagttgatgattgcatggaacaactgtataggatgttgtaagaaaatatacttctcttggagctaagagctatgtagttgacagtgacttctctctcattactggatgtctactctctcacaccagcttcctcttttgctgtaatagagtactattcaagcaggagaaatttttgtctccctttctcccagcaatggctggtagagtctggagacatctttggatctcataactgaggggagttatacatgctactggcatgtagtgggtagaggcttgagatgtgctgaatatcctgcaatgcacaggacaggcccctacactaacaaatcatccgtccccaaatgtcaatagtgcagaggttgagaaatcctgatttaatgcaattcatgacctgtaatggaacccattatcctggctaatttgcatttgtgtgtactcctttactaaggctcaattaagtaatttagtgaatatttattcactcgcagggccatgggggagaactgcaaaagaaaattgagggattataaatacctaatgggaaggcaaggtgaacacacatgaaaacaaaccaaaaaaattctacttcaaaatgttattgattttctccagaccctaattatgtatattctatcatttgcagtgcataccctttgtctgtctttgcaaactgtcaattcagataatatagtgtcttagtgaattgttgccacaataatgtcatgtaccaattctcttccaagctcaacagattaacacaacagtgtatattttcattggtttgtctgttggctgaaacaaacaagctccaggctgtctgttgggctgtgtctgctacaatgcatttactctggggctcaggctgaaagggaggtagcacatactagagaaagagcttcttgtggtgatggcaaaagtacaacaggaccaagctaaacatgcaagcataacgtttctgtttccctcacatctgatagcatcccattggctaagacaaatcacatggttgagctccaaatcaaggctgaacaagtatactgtggtctctataaggccaatgcaggatacatggcctcactcaataccggtgggtcagagaaaggattgcgttattttaactaataagttcattttaatatttccatttcaaatttaacattataagaatttttcttgtttttttaagatttattactatttataattgtggcaaaatacacataacataaaattttccatcttaaccatttttaagtggcattaagtatgttcacactgttttgcagccatcaccactatccatctctagaattcttttcatcttgcaaaactgaaactctgtatctattaaataattattcccaattcccctgggattgagtacttatttaaaaaaaataataatctaccacccatttttaatgggagcaaggcttatttttatagagataattggcatatagcatgcatttatagttgtcagcccaacctatgcccaaggtgtattctatccaagatacagacatgtatgtcttcgggacctaaggtaggagccccacagaagtgtgttttactcagataaaaaagccttttgggaaggaattccttccaagttcaggccgagaagcagtatgggccatagccagggagcctgcattagagaaattggttgacattcagacccatgtccatcaatcactcaacagggaagtctacctaattctcaggttccaagcagtagtaggttaatccaagggggaaaaagtgaagtgtgcttttactgaaatctacatggaatattaggagcttagggcatcagcagcatatagctggcagcttcaggagcaaccagtgcaggagccagccagctggcagcagtaggggctttagcagtgttaaaccccagagcccatgagatggagctcagtatccttatcatcagccaccagtggtgggactcagactgggtaggcagtggttgtgaggtcctttagacaggacctgtttctatcagcaggaacaggaggcatcactacagagccctgggaaatgacaggcattattcagtagccaagggaactgctcgagtaattagaaaagcactgaagtctccaccatgtggaatgctgaaaagccctagaaatactgggttccagggacaatctgagagagaagagccatagggagtcctgggtgctagtctagataccacagcttgctatgagtatgactagggcaattcattgaatctctctgggtctttgttttcccttctaaaagtaagagaattgggatacatgatttgcctggtcttttctaaccgatactgtattacctgaatattatatgaatgttgttatatgatctcaagccaggctttatattcatgccacgttttggttgtagaaagtctgtattctttatttatttaattggttaattaattagagagagtctcactctgtcaactaggccagagtacagtggcgccatcagagctcactgtagtctcgaacccctgggctcaagcaattctcctgcctcagcctctcgagtagccggaactacagacgtgcaccaccatgccgagaaaatttttaaatttttttgtagagataggaacttacatatttcccaggctggtctccaactcctgagctcccccagtcctccctgctcggcctcccaaagcactgggattataggtgtgagccaccatgaccagccaatctctctgagtctttgtttctccatctgacaataagagaattgggatacatgatttgcaagacctttttgaactgaaattatattatctgaatgttgtgatttgctctcaagccagcctttaagttcatgccagattttggttgtataaagaccatagtcttaaaccatgctttaaaaaaaaaaaagaaagaaagaaagaaagaaataggcaatttctcatttctttccaagcataaatattagcttaagcattaagatagacaaggtttttgttgtgatggcattgtataactggattatttcatgcagtcttatgtgaggaattcagtaagaagttactttgcatcagctttatctgtatttagcatttagcagattaagccgaattgagggcctttagactaaatggcaaaaatggtttcacgtaataatagcagggtgctttttacattcatgatatctgtttgaacatgttaaattcaagataccagatatatgtctgtatggagaccttaattcagtatttggatatacagtctctctggacataaaacttaggtgtttctaagcattcattcagtatttaatctcaccaagacagcatatgtatttcataaaggtagggaggagatgaggaaagcagaaagtgtcttgaggctcacaacatttaaagtgcagactggacagtggacactcagaagtggcaccaggccaggaaatatgtttagtcgttgtttgattgtttctttgagtattttgcaccaagttagcctacacatttgtttaaattattaaattgatggtcatacaactgcacatgcaaatctgtgtgtctgtcttctctttaaaaattggaagctgctacaagggtgacattctttaggaggggtgcaagctcttggctggcaaagcccctccccatattgatgactaaacccaggccatttcccatcccccatccagcctctgtaattatgtggggttgtgttcctgattctgaggtccatgaatgaggaagaaccagcaaacagagactctgcagaaagagagacacaataggaaactcagagagtatgttcaaagagcagtgcattcctgagcaagggaatggctcactctgacaggtgttgctggaaagccagggaagagactctgccacaccatgtgcactggccttgatgtccagtgtccttagtgactctgggggagctgtctgcatgcaccaaggctggtgtgagtgcaaaaatagatgcagagtgaggtcaagctcacatgccagttcacacgctgaaggactgtcagtgctcccagatacacggcaatgagggtccagtgtcaggagagaacagataggtaaactaaaagcccagactccaccactacacatgcacgtaagacacctgcgctgtaccccctaaatctataaacatttttaaaaattaaaagtaaataaaattggtcctcaccatcatcccagctactcaggagactgacatgggaggatcacttgaacccaaaagttcaagaccagtttgggtaacatagtaagacccttgtctctaaaaaataaaaataaaaatattacccaggcatggcagtgtgcacctgtaattctagctgctcaggaggctgagatgggagaatcgcttgagcccaggagttggaggctgcagtgagttataatcacaccactgcactctaacctgggcaacagagccagaaccctgtctcaaatttttttaaataaaaataaaattacttaatagaacaaagaaattgttcaatttctttcactttacagttaagaaaactaagattcagagaactgatatgattaacacctacccctgactcccccacctagaataaaggtcataaaatttctccccgggccagtgagaaaaataaagtataaaaatttctccccaggcagatgagaaacagaaagagaaagtagtgagttttgtctcctgatgtcagggtcagagccacagagacttggttctggaagtatttgagagtaagaacctggctcaaggctgtgaaccagttgctgggagaggtgttgcctaccactgctggtgggaagactagaaggacatcgatattgagtaagtaagacctcaggctaccacactgcacacctacctgctaccttccggggaaccaagccaggcctctctctggctgggaaacctgttgagcaacctcctcatatttgctgccaacataagctccggttctaaatggagaacctgttgcagggtggggcagcaaaacctcaagagtgagaagagaggcaaacagcaaaatgaagtagaaagcccacgtcctcctcaacaagaaggggtctaactcaaaggaagcaggttgctggaacacgtacacagacctccatacaagaaagacatcatgtgtgtgttcaagccaccatcctccccaaagattccatcacctgttattcttacaaggaatgaaatgcagtgaggtgagagcgtgttgggatggcagacatggacgatggatgaattctcttccctctgtacattttccagcacaaagagctgccccaggctgttgaccccatacactttgagttttgaaaggtttctgtgtttcccttagaaagctactaaaccaggacaggcacagtcgttcaggcctgtaatcagcactttgcaagggtgtggcaggaggattgtttgagcccagaagttcaagaccagcctgggcaacataacaagaccttatctttacaaaatccacaaaaattagctgggtgtggtgacacatgcctatagtcccaggtacttgggaggctgagacaggaggatcgcttaaacccaggacttcaaggttgcagtgagctaagatcctaccacctcaccccagcctgggcaacagagcaaaaccttgtctcaagctgacatccttcagttcctttttgtgtccttgtcctttacaggaagatgaagatccctttcctcctactgttctttctgtgggaagccgagagccacgcagcatcaaggccgaacatcatcctggtgatggctgacgacctcggcattggagatcctgggtgctatgggaacaaaactatcaggttggtaatgcagctcctcagtaaacacatggctgtattcataggcaacagtccccgggatggttattgttgatctacagagcacagaacatgtagaaacgttcaaaaccctccaaaccatgcctggcttcatgtagatacactgagatgtaggtgtcatgaaggcaggtgtgagtttatctgtttgactatgaacagggagctggatgagctcagggagatcactaagaaggtgtgcatcacagttcttctttactaatggctacgatgctgctttccacacattcacatttccatcccttttgttcacctatttcgtcttctccttttggcatctggctttattctggttggttatgggtctgtactactctgtcctggctcatcagtgacttactctcactctcactctcactcatgcccaactctccctcttctagcccaggccctaccctgtcgtcagctatgcaggctgtcttagtctgtaaaggctgctatgacaaaatgccataggctgggtggcttctaaacaatagaaatgtattgctcatagttctggaggctggaagcccaagatcaaggcatagcagattcagcgtctggtggggacgtgcttcctggttcatagacagaaccttctcactgtgtcttcacatggtggaaggggggagggagctctctgggtcccttttataaggtcataaatcccatttacagggcttcatcctcatgacctcatcacctcccaaagaccccacctcctaataaaatcccattgagggtgagcatttcaacatctgaatctgggggggacacaaacatcgagaccatagctgacaatcaggagaggtatcatgttttaggacctcataacttgccagtaattatcaaaacagtggcaacaaggcaatcaaacgagactcgaggtcatttgacccttgggtctgaacatcctcccagaagtgggtgttttgtttctctccctctgcgtaaaatcaacctaacataagacctattttaaggacccttttgtttaaaaaggaaagtaagcccttggggagtagaatactgacattaaaatttcactttctcttcctaataatgtggagatgatggcataaaaatagttctatggagagcttcatcacatgaaagatcaatacaaactgaattaaaggagaggatgaggaaagagattatttgcttctaccagaactttcttttttctttttttcttcttcttttttttttttttttttttttgagaaggagtttcactctgtcgcccagcctggagtgtggtggcacgatctcggggatcactgcaatctctgcctactaggttgaagcaattttcctgcctcagcctcttgagtagctgggactacaggtgtgcgccaccatgcctggctaattttttgtattttttgaagagatggggtttcactatgttggccaggctggtctcaaactcctgacctcgtgatccacctgcctcggcctcccaaagtgctggggttacaggcatgagccactgcgccggcccagaactttcttgtaggatatgtgaatactaaatacctgaagccaggaatggacccattgccaagtgccatggggcgctggttattttccttccattctcttactcctcatcttctttttaacatgagaaatcttggacagtatatttaatcattgcatatcagaccaaacaaaaattaaatagattatgatattaaggaaaatctttcccacaagacatagccaaatatgtctcactttcaatctgaaactttgcatcaaatgttgctttttatttttttaagagtatattgacttatgacattgcttaaattttaaaaagcatatgcaagggtaagatctgcaattttaagagagcactttaaatgtcctcttaaaattgtaattatctttgtatgttttctgccccaccttttgcctacttttgtaaaatgtttacagatcactttatacatttgtgatatagatcttattaatttagtttttcttatcagcatcataattttattcagctttttcattttatctgtttctttaatattatgtattcctaagatatattgagatagtagataactgttcctaccaagatgtcttaattaaaaagttaaaatcaagcctttgaggttaaatctttaccaattatcaaaagaaaaaatgtctataaagccccatggaagaattcatggcaatatataccctaaatctgccttggtctctgtattagagtcccattatttctgaattacatttttcatttttatattttgtaatatcacaccccaaaatagtcacttttttttgtaggccactatagacactaggaagattaattcaaatgtaaaaacagtctctgtcttctaagcatctcaccctttaagaaaaaagcaaattagaaatattggtaattaaacacattcactaaattaataaatggtcactagtttgacattacagatgcaataaaattatttcccccttcaagctatgcatcattgcagcactactctgtgagggcactgatctagggaagccatgggaccaatgaacaagatgtatactcccaccctacaggcagccatcttgaaggggagcacaattagccatgccattgctttacagtgaagaagctgcttgtctggtggagtatggactactgttccaaatataggtcaatccccttgcataaacaaggaagggcactggaggcccatgagaattccatctgtacctggaactgaaggatggcagatgacaagccaggcagggaggaatggacctggattcctggtgaaggacgtggatatatcttgtggggtataacttggtatggtccaaaaactaaaagatattaattcctaaatgacttcccaaaatgttcagccaatccattcatagagaaaggctaaaggtatcactctacaagtgagctcataaataagtatttatgaagcataaaaaatataagccagcaaagggtatgtgggggtcgcagcatctaatttcttcactgtagtgtttgtgccttttccctggagcgtattaacccatttattgatgctcactggttgaggcacatggagtctgattattccctgtccctgggggcatgtagaaattaggcaggggctcattaaagctggttgtgggattccctttggctgtggttggaaagagaggggagtcagattgaccctggagatttctcttttggtgacacagaggtaacttaggagatgtggatcggagaagagtgaagcctcatcctcattcaccccttactttccctccctgcagtatcctatttcaaagacttggtttctctcttctaattcagggctagtgggaccaggagctcagagccctctgtaacatgaatggaccttttggggatgtcccgcctgcatcattcacacatctgcatggttttgttgtagcttgagtcttgattctgtatcacttcttccccacctcccctgcctctcatctcgcctctctttcccacataaccccagacttgcctttgctcattgagaagtttcccagtataaagagccatagacagtttcattttgaaaattatcacagagctgggcacagtggctcacgcctgtaatcccagcaatttgggaggctgaggcgggcagatcacttgaggtcaggagtttgagaccagcctggccaacatggtgaaaccctgcctctaccaaaaaatgcaaaaattagccaggcgtggtagtgtgagccgagattgcgccactgcactccagcctgggtgacagagtgagatcctgtctcaaaactaaatacatgaacaataaatgaaaatgatcacaaatgctatgattcttttgttctaggactcccaatatcgaccggttggccagtgggggagtgaaactcactcagcacctggcagcatcaccgctgtgcacaccaagcagggcagccttcatgactggccggtaccctgtccgatcaggtaacctcctatctgcatcgcaggggctgtggtcaccttcgggacagtctcccacctcgaggtatctcctggttcctaagggttgattttttcctggtccaggaatggcatcttggtcccgcactggagttttcctcttcacagcctcttcgggaggacttcccaccgatgagattacctttgctaagcttctgaaggatcaaggttattcaacagcactgataggtatggacatctatgggatgggaaccatctataggtatgggaatgggagggaggacttggacaaagttagcaaaagagtgggagaggacatcatgacagttatcttagggatgactttgctggtacactttgcataactttaaatggaaacaaaatgatttcaattgtaggttaaaacacaatgagcctatctggactactcaaatgtatagatgtgtgtgtgtgtgtgtgttgtgtgtttgtgtgtgtgtgtgcatgtgtgtatagataaatagatacttaggttatacctaatgatagatggatgaatggatagatggaagaaagcattgatgaatggatggatagatagataataggtagagaaatagctagctagctagatagacagatgcagagagagacaaaggtgagatagatgggatggatggatggatggatggatggatggatggaaggaatagatgatagctagctagctagctagctagatagatagagaaatagaaaaacagacatagatagatagatagatagatagatagatagatagatagatgcagagagggacaaagatgagatagatagatagatagatgcagagagggacaaagatgagatagatggggtagatggatggatggatgaaatagatgatgatagatatgatagatggttggatagatagatagatagatagatagatagatgttatatataaatagatgcagggagagagacaaagattacataggatggatagatagataatgaggcaattggatggatgaaatagatgatagatggaacaaatgaaagatagacatatacatagaaagaatatacaaaactattcacaccatgctattgataaagattttcattttactttccaatataaaattatgtcagaatttgtcttggttgacacacccactgattttatcatgtagatagggttgacaccttcctttttgcatgaagagcttgaatctaagcaggccataaaatgaatcctagcaaatctcagaggagcaaaatgacccttttctttcttccaacatcttgttaaaaaactatcatttttttcttttgtgaggcactcattaatttagtgatctaattaacattttataagaaattttcagaggtgcttaaaataattgctgagttactgagtgtgatttcctcatgcctcaggggtaggttctgaagtaaggattcgtttccacttttaacattcaaggaacaaaattaagttgcttctaaaactttaattttaagggcctgtctcagaaaagcatctgaccaggaaaaagaaaaaaaaaaaaacaaacttgtatttttctgtagagtgtggtttcctgcctattaaagatattagctagttttctttttggatttttatctgattggggttttttgttgttgttttgtgttgttttgttgaaatcactaaattagttcttatttcttggtagagtgagtagaggatttttatctggttgagattttgtttgtttttttgttttgttttgttggaatcgctaaattagttcttattttctggtagagtgagtaggtaataccttagcgtttgtggggaaaaaaaagtgaaaaattctagggtcctatgagcgggaaggctagcttcatgaaatagtcagaaagaacctccttttcagcatgtaggaacagaagcttggattggaatcagggtgtttattgggactgaagtgatcccccatttgtcttctcagggaaatggcaccttgggatgagctgtcacagcaagactgacttctgtcaccaccctttacatcacggcttcaattatttctatgggatctctttgaccaatctgagagactgcaagcccggagagggcagtgtcttcaccacgggcttcaagaggctggtcttcctccccctgcagatcgtcggggtcaccctccttacccttgctgcactcaattgtctggggctactccacgtgcctctaggcgtttttttcagccttctcttcctagcagccctaatcctgacccttttcttgggcttccttcattacttccggcccctgaactgcttcatgatgaggaactacgagatcattcagcagcccatgtcctatgacaatctcacccagaggctaacggtggaggcggcccagttcatacagcggtgggtattgccttgtcctctgatgctgcctgttaaaaaacattctgggttatttctcgtggaggtggaagaaccaacagggttttgttgttgttgttgtttgtggtttgttcgtttttttgagacagagtcttgctctgtcgcccaggctggagtgcagtggcgtgatctcggctcactgcaagctctgcctcccgagttcacgccattctcctgcctcagcctcctgagtagctggaactataggcgcccgccaccacacctggctaattttttgtatttttagtagagacggggtttcaccgtgttagccaggatggtctcgatctcttgacctcgtgatccgcccgcctcggcctcccaaagtgctgggattacaggcgtgagccaccacgcccagccagaactggtagggttattatgctagccacattttcccttccatgcctaacacatttcttcagccagagctcgccatagcacatgtttaatggccttagaaaggtattgcaatgcagtgtgctctccttagagtctctttgccaacattccccacatcctgggctggaaaggcccatggcaaattaatgtctgctgatgacaaaggaggtgtcagatatcccactggttttttgtttgtttgtttgtttgagagggaatctctctgtgtcgcccaggctggagtgcaagtggtgcgatcttggctcactgcaacctccacctcccaggttcaagtgattctcctgccttagccttctgagtagctgggattacaggtgcctgccaccatgcctggctaattttttttctatttttagtagagacagggtttcacaaacttggtcagtctgcattttgaactcctgacctcaggtgatccacccacctcggcctcccaaagtgctgggattacaggtgtgagccacagtacccagccccactggtctttaattttcaaatgtggccatcaagagaggcaagataatggcttatgtttagtttataggttgtccttgtgatataaacaatgtggaaagatccaaaatattttggattaatctctgagcaaacaaaacaaaacaaaaacctctgtgagtaaactgggtgaagtgaatgatgtctcttgggtctgtcaggtcccattgagtttatagttttggggattgcaatctgtaaatggaataaccatcaacagtggagcagacagcattcctgaattacataggtaggtataatatatatctatattataatacataatatagagagcataagtagatataattaagtagatattatatagaggctatgtcaaaaacacttgctattcaaaacaagcaaataaaagtattttgttccacttgtaactgtggagaacaggactctaaagagaaatggaaagttcatctgaaaatcagacgtttggtctttatggtgacttaaactctatgagagatgtaaaagagagttgggagggtgatttaaaaattataaaggagacagaggaaatataggtaatattggtttgtcatccaattaattgcatgacacaaaattgtaaaatcaatctctggattgaacaatgaatgacaatgaaaaggaagttattgtgatgaagggaaactatattagggatttaatttaaaaacaagcaaatatgctcagcctaagaagagaatacatagttaaggtatgtggaagctacataagttagggctggtgagaaaggtaaaaggtaacgtactctatgaaaattatgttgtcatttcctcacatggaagatgttgtgttcctctgtccagatcttgtgtgcctggagttgatgctttactggaggttgggaatgggcagtggttctcctcactctcttcttccagttatgaaacagcataggagcaacccattcacctggaggtacaacagtgtcctgctacccacaacatcacggattatgcaatagataaatcatagggtgtattttagtatatctctctggtatcacaaaagtgtttcatcaactctgacagaagcccacatatggtttgggtgtctgaacagactacgaagtgacttacacaaaagttgcaattgatagtatcacttcctccttctaaaaatgagacacaaatagaatgattagttcttatagttcacaccgcctctcagttttgacagattttgttaaaatctaaattgtcattgaactgtgaaatatataaactggtcattggtcattttaagtattctcagtttcagcctctgggacttggctccagagagtattctatgtactagctgcccaacggctgagggagcaccacacaatttaagtttttattttggttaacatccaacttctgctgccagtttctgtttttgtcagtgaagactgacaaaatctcagtggattaacacttgaagatttgtttcttgcccatgcaaaatctattgctggttgggtgatgctctagggaagctttgctccatgaggagactcagggatccaggttgctaatatcttgtggttctgtcatctcaatagatggccttcccagtagcgtccacaggagaaaagagttgaagggtcccttgggggctttttgttacttcactgacccaggggtcagcatgtagaccaggccccatgtctccaccctgacttgacatggggctaagaggcagtctccccatgtcttcaggaagaagaaaatgaaacggccttgctgaacatatagcagtgattttcctactgcaaacagtgattttcaaatttgttttaaagctgaggaatatttcagatgaaattttatgagaagctaagtatgtcagagggataaaagttgcagtgcttgggtgaacctggaacagaggactgcatttggaaattgctgacatttaataaagccccatggaaatctcatgaacagctggagagaaagggcagactctgcaacaaaagaataaaagaacatgtgagcaaacatctagttagtgcagactctaggcaaattaatatttaacagacatttgtaagtaaaaaaggtaggcacaccaggagaaaaatcaacaccagccttggaattttaaaaaagaattgatattacagctatgtgagtggaggttgaaggaatttgcccaaggttatagataggtgtaaactaaaggggctattttattataaaaatttggattgcagacatgtaccgcataataacattttggtcaacaatggaccacgtatatgacagaagtcccatgagattataatggagctgccttatgcagctgtacgtttgtatcttttttgtttttttgagatagagtctcgctctgttgcccaggctggggtgcagtggtgcgatctcggctcactgcaatctccccctcccgggtttcagtgattctcctgcctcagcctctgaagtagctgggattacaggtgtgtgccaccacgcccagctaatttttgtatttttaatagagacagggtttcaccatgttgaccaggctggtctcgaactcctgacctcaaatgatccacccgcctcggcctctcgaagtactgggattacaggcatgagccaccacgcccggccacgtttgtatcttttatactgtattttttcctgtaccttttctatgtgtacatatgtctagataaatacttgccattgcattgcagttgcctgcagtactcagtacagtcacatgcggtgcaggtttgtagcctaggagtaataggctttaccatatagcctgggtgtgcagtgggctataccatctaggcttgtgtaagtgcactgtacgatgtttgcagaatgatgaaattgcttaatgatacatttctcagaacatatccctgtcactatatgatgcatgtctgtacttgaagcattgatgtgaagtatactgcttattggtattttaatattttcatcagagaaaaatagagtaaagaaaatctatagtttggtgttgtgttgcgtttgtgtgtgtatatatatatgtatgtgtaaatatgtgtgtgtatatatgtgtgtgtgtttgtgtatatatatgtgtgtgtgtgctttacacacatatgtatttaatttacaaagagataaattattgaaattgatttccaagggaagctataggagatatacatgtacagcagcagcaagtattaatgtaaagaataaagaattttctgcccagggttggataatagccactaaaagtcctttaagcaactatttatagatctatcagaattcaggtaagacatgagctatttgtcatgattttcacaggtttgggctgacaggcacttgctggaggggttatgagtcgttcttgggcaatatgcctgttgtctgggtgcctgtccttggtaaacattgggatctgtgagtaaccatagctccatcatgtcatgcccatgctgacagcctgtcttacccaggtgccagagactgcagaaacctctcggattctgctcacagcaaaatggcatggtgaaggatgtcgtgcaattcctaagagaggaaggaagacttcaagctgtcagtcacactcctgaacatttatttccagtattatttgtacagagatactgcagagttagtgcccgtggtcagcccacacagccagatgcaggcattgcagggctgaccacctgcctcctgggcatggcgcttggttcagaactgtacattgtagggtggcctttgctagcctagtgtatggtggcgtataatgtaggatcactatgacttcctgcaggtagacaaagaagggaaaagggagagtccaggactacaggggtagacaagtgatacctcagactttgcataaggaaaaccccagaggtgcttattacagctgaagatggccaagatgaactctagggactgtcacagagtagttccaaatgagactttgcatcagcattttaataagcttctcaagacattctaaactgggtgtttcataggacactctaagaaacactgggtttcatatacatgtatgagctttggctactgtgcagaaacactgcagttatttgtcacctagatttttctagaaggtgatgctgacaggtgatctcatgtaaaagctttggaactttataagatacatcattcagttatatcatcatctagtaaggtgcacatagatatgtgattaaaacaaaagcttatggaaatgatctttctcttactagggtgattgccctaatattttctaccccattttattctgttttttttttttttttggtaataatctggttttggaactaattaatttcatgatgtatcaatgggtcacagtctacatgattgaccatgctcttacctagtgtgtgagctttactgtgtttgataaacaggagcacagccattccaagatggagcggcgctcttgggcctatttaaggcagaaaacaacagtgtgctgtttatcaaatttgctgggaaagctggacatccttatatcagtcttcatctaccacaaatctctcaaaacgagacaaggtggagattaatacagcgtccattatacaatggatagtcagaaatgatacttggcttccagggtgaatcaccttgtatgacatgtattttgacagaaattatttaatctattaggtatataaatattcatatgattacaagtcattttaatgggtatataattttgagaggggaccaaaacaaatttattgatcatgaggatattgaagcctgacaagttaatcttgattatctctaattattagagagctgagattttcttttagaactacagatttaagatgttctggcagcaccaaagttgaagggatggttattgaattacaacaaaaggattttttctttaaaataggtgattctagtgtagatggctattgtccacattggagcactcacagcatggttaatattagtgaaaatgctagcatcttgtacactgtgtacattcacaaacagcttcttacatactttatctgaagatacaaagatttaaagcacattgttacaatcatccttgggtagagctgtctatctgtgttagattagttatctgattcacaaaatataatatccaagggtcctgagagaatggccttgatatgttaccaaagaatcctaacattggtgacaccaccatgttcataaaacattttttcaatgtctgaagacacatttatatgtgttatttcattatccagaatatcctgagcaatttagccaggtcttaccacctttgtgagaaatggaggtagagttattcagcagccgaaaaaggaatgcctgatcaaagcaatggtagtattagtggaatttactcaaatgctttcaaatttaaaaatttccagttacaactggtgccttgtttagatattttaacatatatatatatatttgtacacagctgcttctcagttcatctgtcaaaggtggtgaggaaaatgatttaaaactcctacttctaaaatttatagcctttctctacactgtgttactgatatgatttatactcaagggtttgctcctgagatgctagcttgcaatattagggtatgaatgacaaggaggcataaggcaaagatgcttcattggtttgtgattcttgcaaatgaggtccacttagtcaaacccagtttgtggcctgggattccaagcacatattttcaagttgaggagagcgatgatttagaatgtataaccatccactccacaatccctcaccctaattgactcattcagggataaatttatctgggggagatgcttctattattagagagctggataattagctcaccatatgttatacactgtatagtaattcaggagatgggtcatcctgaatgcactttaattagccagaaatccttgctattcttgcataaaggagtgaattataaatttcttggagatacccaactctctgtatgtgccctgtagggtcatcccattatcacagctttcggttttgccatccctgtcttcattgcaatgcaaaacagatccaacttaggtgcacagcagaaatggtaacacataatgggacatgttcaagtgtaatggacaccgtggaatggttgccaattatacgtcaggtgctgtggatacacacattgttttgtgcacctcccacacccattgcttccttcacaccacataacaacctcatgaggtcggtaaatagatgtctcactgtggagaaactttgaagctgaaatcctttgaatgaacaaagctccacaggtaataaagagtagaggctgaatttaaacagaactaactcaaccttttaaattttggaatgcttcataaacagttgggggaatcttttccatctactctagtgcggtagacttattgagtgaggattagtccgagtgaggattagttggaagaagattagggcattgtatgagtgtctcaacacctttctccagatggaagagtctaggtccaatgctcaaggaaggagaatgcatctctgtaattcttatagataagtttgaagatcagtagttttatcattactatggtaatcgagaagtacctggatgctctgaagagaaaataaagcgtaaggatgatgggtgaatgtagcaagttaattttattcacaaacagcttttttctttagttcaagtcaaggctaatttttaaaaaggtgtcatgctggtgggtagaatgagattcatgttttatgtcttcaatagaaagagatggatgttggtcactctgctttgtgaaaaaacagatatgttggcctcttctctgaattcattgaaacagtgcttcattgctaggaaaaatatttaagtaaatcacttcgtgtttttctctgaagatatatacatgcccacttcgaacagtagatttccaagaatggcaatgactttatacacacctacataatctgtatagtatgttatacagttatgggatttatagatttatctggaatttgccattagtataaggttctccaggctgaagtttattaagttgtttcaatatattaaatatatgtatgtatattttgagatattttaattagaagttcaataaaagctaataagttttagtcaagctcaatgtaggataactcttgttctttatagatgaattttttcagcaaagggtttatggatagcaaatcaaaaatttggaaattatgtagagttctgtttttaatctctgacttcccggagtggtaagatctcctgttctgaaaacagtaaaccctgctccctgacaactctccacagaaaacacaccaagacatcagcatgatggaaagtatcagtaatcaaggggtgggggggaaacacctacatgaaaagattatacatttagtggagagccatggggaagaatctctcctaccatttcctatggtctgtacttttatgataaataaatactcctttctacaagcattgcttgtgtaatcataattccctaaaatctatgacagctgataaatgtattattggaagaagatatgaccttttgtcctggtctatgtactgctatcaccatttggcacagtcacaatcccgaaatgcatttattgggttcctccagcctagcctctcccacttccagctggaccccagtgtaagtggctgtgatgaatagctgtgatttggctcaaagtgtcttttgaataaagggatctttaggaggtttcattagtttcgataagagtgtaagccaggaaggaatggggtgatattgattttaattcatggtaagaaaagtaaatcagattaaacactaagagcaatatacagggacacacacagatgctcattcaaaaatggaaaaagtaaataattaaagaattatcaaagagtcacattattcaataactgcaggtaacacatgatttgtttctaacttttgtgggcctatgggatatgtatttaaaaatgagggcaacgggcacagtggctcatgcctgtaatcctagcactttgggaagcctaggtgggaggatcacttgagctcaggagttcaagaccagcctgggcaatacagcaagaccctgtgtctacaaaaaataaagaaatattagccgggcatggtggtgtgtgcctgtagtcccagctacttgggggactgagatgagaagattacttgatgccaggagttcaagaccagcctgggcaatatagtgagaccctgtctctacaaaaaatcaggaagtattagctcggcatggtcgtgcacacctgtagtcccagctactcaggaagctgaggtgggagaatctcttaagccccggagttgtaggctgcagtgagctatgattgcaccactgcactccagcctgcacaacagagcaagaccctgtctctgaaaaaaaaaaaggaggggagggcttctcttttgaatgaacctctggtttcgggctgagcatattgtaacaatacaggtactgagggatgttcgtcttttgccatactagatctagtgggtccatggcattcccaactcactggggcatagataaagaatacttacacctgaccctggaaatgcctctccagccatacatttctgtatctctgaatatcatgcctgtgaatagctcgaaagcctacatgtttatggaaatcattcacaaacactgtcatgctatgtgaaccattgaaagctacctctttctgggagcaaattctgacccctgccaggttgagataagttctcctctgaattcattctctgcagcactgagtggggcatttaagacagcttagactagctgtcaatgctcttgtctgaactgtgggttgctgatggcagggtccggtccagtctctctttatatttctggtgcctggtattgtgtgtcagcagaacatttgcttaataactgcaaaacttatagatggaagacatgaacagctgggtgtataaatccacctgctgcacgcagaggtggtcacatgaactttgtgggggttgggggtggcggttgttgataccgctatctgatttatgccatactctaattaccagcagcagaaggtagccagaaggaattcacagacatccctatttgcattcctgttattccctatgcccactgtagttggaacaatactacaataataaaggtcagacactcagatgaagattattattccgaagatcctcaaaagtatactttatggcagacagaaaaaaaatgccttagccatcttcttgtgtgaattttcactcctgcctctatagaatgtaaatcttttgattctgagattggaatgattacatgttgctggaaaggctcagggctgtcttctgtatttttaacaaatggagcgcaggcatgtagcagctgaaagttctatcttttcgcacagtgtgcaagacagtggcaataaattttcagaagagttgtttactgaagtactccagctaataaaaaaggaattaagctgttattgagaaatctttcttccaccaacttgctgatgtgtcattcagctttcaaggtcgtagagaggaagagaaacccagatctccttcctgagcctgggtttgaagcaaatggtctttcctggtctctcaaaggatatcacaaagcaagaattccttcacctgggcacaggctgtcagttacaccccaggtgtgtgcaggaaagccagtgatttatgtctgtctagccaacattcccatgcaccgttgatttcacttctgttcctgaatggtaaatcttggaacagtgtttttgcaagccaagtatgcttttctctgttttctgggtttgtttttgtatgtcaaacctaatcaactctactcgatgcacagagtatacataaagatgctggtatctctgatgtcacccctatagaataaaaaaccactgctttatagagagatgatagaaaacaagttccataaatatgtgaattttgataataaacacattaattcccttctccccttctaaggaggattcccctgcattccaagacaaaggtcatgttccgtagccttgattgaaccctgaagctcaggtctttgactcaactgttctttcagtcctcatgaaccagcttttatttcaggctttattatttgccggttgtgtcatctttatcatttatttctttatttccacctcacattttaatatgccacaattttatgatcctgccaatcatgttgatggatgtctctttcttcttcttcttcttctttttttttttttaacttttgagcaagaggactgctatccaaaattggagaatccaagtcgaaactggactggagcccagtgctgggcatttcaatccatgcaatagctcctcgttctcagcaaattctgtcactcacatcctgtatgaccatgtactatgcttgggagattgactttttaagctttcttatctattttccttaactttaaatctaaaaataaatgggagaacagatgagagtgaaattgcagtgagattgttctcatacataatgtaactctctatttaggaacacaaagactgtaatttcatgttcgttttgaggaatctaagccagtttaggggaacacaatctgcttctggggaaggaggtgcaatttgcccaggtgtgagtaaactttccccataataagtaggatggaggcttcacagtctgctctgtgtggccaagctctctaacatactgtggctccatttcagctcctccaggttcctcaagggcatcttctcttagaaggagccaaacacatggcttggtagagatgctcatatgtaagtcatcagctaggatgacaattacagtgcttccatctaagcagtagtatgtcctcttttctttctgagatctaacagtgaatgttatagaccaggtccagtgggctctcattgcatgccttcttattccagttcctgtgagaggtgagacaagccactcaggattttttttttttttaactttcttggctgtgagatattaacaacatttccttgtttcatattcttgtaaaaaaaaaaaaaggttggggggtacctaatttgccaccaagtactggaataataaaacatggtactgatgattaccaataacttgttagatttgatctgcctgttttcagagaactggggatgcctggcttagctctaacccaaagtgtgctgttttgtgctaattttctctttcaaaggagtagggggttaataaatgtaagaactgaaaagggaagtgttacagccataggtgtgagcagttcgaggagcccaaggtatattaacattagcaaaatacaaaatgcatttagaaaagcatatatccatttattgtttccagaaaaacttattagtatttgtgacacccagtccaaaatttggaatgtttttggctatcatgagaagttaaggaagccaggaatacatagaagaaaaattaatttaattacatatatatatatatatatgtagtcttctgaacttttactggctggtaaagatgtggaccataggagatgaccccttcaaagtaagaagagacttaggagagaagttctgcagagtagtccctgctctagagcaactgttacataaaccatgtcccgtcaaagtaacaaaagactgaggacagaagttctgcagaggaatctctgctctagagcaactgttacataagccacattccttcaaagtaacgagatttaggacagaagttctgcagaggaatccttgctctagagcaaccgttacataaaccacatcccttctaagtaacaagagacttaggcagaagtctaaaccatatgcaacataaaccattcacaatgcaattcacattgcattcccaaggccctgtcgttcacttgactgctgggcggggctgccaatgctcagaaagcaaatgcagtatttcatccaatagcagagatttgctgaattcatgccacctgccaatcactttgcgggtgtcaggaacaccatgatataaatgacacctcctgcctggtggtctggtgggagaagagagcacataaagagctctggtgtcgtggaacacatactttattagcatttgctaataaaaattgaatctccgggctgggtgcagtggctcatacctgtaatcccagcactttgggaggctgaggcaggaggatcacctgaggtcaggagtttcagaccagccaggccaacatggcaaaaccccatctctactaaaacaattacagaaattagctgggcatggtggtgtgcacctttaatgccagctactccagaggctgagacaagacaattgcttgaacccaggaggtagaggttgcagtgagctgagatcatgccactgcactctagcttgagcaacacagcaagactctatctcaaatataaaataataacaaaaaaataagctccagaccctacaaccatgcctggcctgtaggggatgcttaacaatattgttttagggttcccttttctgagccccaacagggaaactagagaatactgaagagaaagaggaaatgaccagcagagaatcatctcagtctcccctgaggctagccatacaaactagaatccctcttccccaaggcaagttatagagaccagaaccccttctccctcaatcaagtcataggactgaaaaataggaccaatttttcctcatcctttctatgtaaaaactggccataaagaaattccccaacctaccttgactgtgggtcctagcactcccattccagagaaggtcctaccccacacttagaaagaaggaacgctgctcagagaggccaagaacaatctagacagacaggccttgccggctttccccactcagttcattagcattagatcaggccctttttgtccaatcctatttctacatggctgtacatactttgttgaacctaagcataaaaatagtcaatttcccctttatctttgggtcttcattctcaaggctcctatgtgtacacattaaatgaatttgtatgccctttctcctattaaaaaaaaaagaaattgaattcctgcccccatccatgcattcattctctcatttgtttggcaatattattaagtatcttctacaggtcaggcatggcactagggcctggagattcagtggaaggttaatgctccatggtgctcagccctgatgggacttcctggaaaaggggaacaggctctcagaggaggtggcattggagatggcttctgaacaatgactgcttgccagggagagggggaagtaagttttaggttgagaggtgatgatgtgcagagcattgagctgtgaatgtgcaagctgtgtttgggactggttaccatattggggtagaagctgggctgtgtgagagtattggcatcaacataaggcttcgtcaggactgttcatgttttgataataaatctgaagtgtagttatttaaggaacccacccaagttcacagaagtagttaaaggaagagcttgaatcacagtaagaagaagccattggggagtgggcagtgaggcaggggctgtcattaaggtgtgtctgtcccctctaagcattgcagcttcttgcacaaatctctcagagctctcaccaaccctggggaagtggacacttgtcctgttccctgatagccttcaaaaaggcctctcacccagtattctctttcagcagaaaggaattgctaattatttcccagacgagaggtaaagattgagcctacgaggtgaaactgagacacagcactaaatgcatttctcagagggcaacccgatgtgaagaagcacccatgggacttattgatccctatcagcagactcagttgtgaaacctcataccttcgtatagcaacatcgctcacagcccattgtagcaaaggccacgcattgacagtgacttataactcttgagtatctgtgcattctaatcaattcaaatgaaggaggtttaggtgctctctgaattaaggaatatgtttgcattatcattcccctctctcgagaggtttaggccaattgaatgaatgttctatttaactttgaaaatttcagtattgaccatttagtgttcattctaggagacttgttgtattatagaagagggtagaacacaaaattgagttggagttcaaacagcattgatgaaagtaattgacaactgaaggtacacaatggaatactattcacctttaaaaagaacgtaatgctgtcatttttgacaacatggatgaacctggaggacattctgctaagttgtataagccagacacagaaagacaaatactgcaagatctcacttctatgtggaatctaagaagaaagttgaactcctagaagcagagagtagaatggcagttaccagggactggggttaggggagtggatggggaatggggacatgttggtcaaaggataaaaagttttagttagacaggaggaatagtttggggatgtattgcattacatggtgactgtagtgacttacaatgtattatatatttcaaaattgctgagagagtagattttaaatgttctcacctcaaagaaatgacaactatatgagaaaatgaatattttgattagctttatttaatcattccacatggtaaacatatattattgcactgtccccaacaagtctatacaagaattatttgtatatatcaaatgatacctatatatacaaaatttgtatatatatttgtataattgtttgcatatatcaattaaaaattttaaaaggtagtcttctctagcagtgtgtgtatgtgtatttgtgtataaatttttttcccaaagaaatactattttcaaggtgcttgaattcatattaatcaccatatagagaaggaagaacagaattaaacaacaacaacaaaaaacaaatataggcaattttctattaaatctcttcctgagttgggtctttgggggatgtctcaataacataattcttcacttactgatccatagagggtaacaataagtcacttcatagagacacaacagagacttacctttctctgacagaagataccatattaggcaattaacttgtaatattttgtgaattttcaaatagcctgctatgataataggtggatcttaatcagaatggtggcagacatacttaacattatctgtggtcttttttttcctccctttttttttttttttttgcaggaacactgagactccgttcctgcttgtcttgtcctacctccacgtgcacacagccctgttctccagcaaagactttgctggcaaaagtcaacacggagtctacggggatgctgttgaggaaatggactggagtgtgggtacgtttctcctcagtgagtgcttagaaagctgctaagtctttgcctccttgtgttttctttcctgtgtatttctatctttgttcctgatgcctttagagacagcaaatgtatggggttttttgaaagtaaccaaaaatgcattgatcctgaaaggtaaatagaatacaaaaagcaccttcaccagcctcggcaacatagggagaccccatctctacaaaaaataaaaaaaaatcagccaggtgtggtggtacatgcctgtggtcccagctaattgggaggctgaggtgggaggacgtcttgaacccaggaggttgaggctgcactgagctatgattgcaccactgcactccagcctgggtgagactgagaccttgtctcttaaaaaaaatatatatatctttaccctcttttgcatgtctgcagttcctagtggatacatttcaggggaagtctagtctgtgggctgcagatggaagagattcatggacgaaaagagacaaaactttagtccttattatcccttattctatcaacaatgaaatatgaacaatgccttgtcattagcagttaaatgtgtgatggattttggatccagaatacctgcagctggctacagccttggcgaggctctcagggcaacagtgacgagatcctcgtgttcttcttgctgcatctaacgatggcaaagctttgcttgttctccaaactccttctctcccttcctgagcaaataaccctatttctgagaaacatggcatttttcactgacattgggaagacttccttactgaagctttgtttaagttaaaatgcatgtcttccatatctacatcatcatccctatgcttttattttgtcttgcagagctcagagatcccaggatgggggattacacctggggtctcttagctgtacacagctaaggggttggctggcatgcaatctcatgctgaatgaggtagggaaggccttagtgtgtgagttacgcaaaggagtgaaaaatcagcattccagtccactcggaacttctcacaacttccagtcttttctagcagcattgcctcttacttttacattgctgggctcatctggacagtatcagagtgacagaagagatcattttgtccatattccagtactcgcccaggttcctgaagattttcatatatttgtttccttttactttttctctctctcattcttccttccatttcttttggtgaaataactcaatagtttctaatctttggatccagatgttttggaaatccatgaaagttgcttcctagttctgtttgtttgtttgtttaaagcagaaaattgatggcagtggtggtcacctactgtggtgattgtcagaacaaattttgttctgttttgttttaaatcatgaaaggagcaccttcttaagaaacaagactgggctcttcttccagcttctagatgcttctttaattatctctgtgaacttgggagatgttttacatcttcaggcctctcctctatcatcttgataggaggattcaaattaggcgagttctgaggttctttttttctctaatagtctgtgattctataaagtaatgagagtgagtaccatttgtaatactaactaggaaaaacaaaaccagaacattctctctaacaagatttataagaagaatgcattacgcttagggctcgtacatataccaatacaagcctgcctccttttattttttcctttctaaaatgttgcacataaatcaatttatatttttcgcatcttagtgtaaatcagtagaatattttctctttttaatgagtgttctattttaatgtgtcaggctgcttatgcaactctaagatttctgttggctagcaagcaacctcacgctgatctcatcacacctgttgattaaattttatttaattagcatggcatacatgcctgactcattagaaagtctaacttccagtgttgtctcactactagttcctctaaagtatttggagagtattttcaatcttcaagacctgccttagcccctgatttatagatgtttgtgttgtttttttgtttttggcggaaagataaaatccttcccctaagcattccatgaatttttaagaaagtttttgttttttaaatccaatacatatgagtgttctaaagaatatttcttctttccaagaagggcttttccttattacacaggacgggactgttggattctgaataattatgtaataaaataaaagggggatatttgcttcataagaaacactccctgcacaaaggaaaactgagatggaagcggttaactagtgagggtgcatctcagtcactcagagcatgttctctccacatgtttgagggctgtataattctgtggatcatcactttctccactgcaggtttctctaagcctggaaaggcatattcagtgaccaagaacctttattatgtaactgtacaccagttctactgcccgtgattgtggcttactgccttattcttagctgagtgagtgctgtgtctcatattgttatagtaactagagaaagactgacttcatacagatgttgtgagagctgcagaaggggcttctcagtacaaccacacaagggcagttgaaatccaggagatacaattctgctctgcaaattcacggggtggtcgacatgattttaatcatcagagtgactaacattgagagctggccgtatactgggccctgatagcacatgtatttgtgggagccataggcttttggtcccataaaggttgtcaagaaatcactggcatgaggcagattgattcataggagaaaagacatactaatttattgaatgtgcatacacaagagccttcataatgaagacccaacctcccaatggggtccagaagcttatacaccatcctgaggttacagaaaggttgggggcttgggccaggcatgggggctcacacctgtaatcccagcactttgggaggccgaagcgggcagatcacctgaggtcaggagttcgagaccagcctggccaacatggtaaaaccccatctctactaaaaatacaaaaattagccgggcatggtggtgtgcacctgtaatcccacctactggggaggctgaggcaggagaatcatttgaacctgggaggcggaggttgcagtgagccgagatcgcaccactgtactccaggaagaaaaaaaaaaaaaatatatatatatatatatatgtgtgtgtgtgtgtgtgtgtgtgtgtatgtgtgtgtgtgtgtgtgtatatgtgtgtgtgtgtgtgtatatatatgtgtgtgtatatatatgtgtgtgtgtctgtgtgtgtgtgtgtgtgtgtgtgtgtatgatgggggcttggatcctggtaaaacaggttatgcgggtcagggagaagaggagttctgttgaggggcaataaatgattgctagggagaattattggatacaggaacagagattatcttgtaatttaaatgatccttggagttagtcattgtacttggaaaagggtctcctcaggggtagtcatatcttggtcttcttttctgcaacagacaatgaaattacagggaggggaagggaaaaaaatgttctccttgtgggggtctggatcttaggtagataaaagaacttcaccttctatgggagaaactgtgtgtgggatgagggggaggttagagagacttgaggcttcttcggtttagcatgtcaaaatgcaatctttggggatatcagtttctgagtcccagcatcttacctcattttgtgctgccagtggtccctgtgcagcaggtgatgttctcatcattcgcattccacaggtaaggcaagtgaggcttgcaggttaggtacacccacctcaggttacagaattcataatgggtgagcatgagttccaatgcaggtgtcccacctagaacatgaaatctacaccactttgtttcttttctttccatgtaataagaaagcgtgcatcatgtcagtgcacaaccaacaacatatctccgggacagatctagttcattcattagtcatgttgactggatgctaactgtgtgcttaaatgttttttggcagtgtagggtgggagtggggtgcaatgatgataagactataggtttaggggagaatgttcagcctacaggatagtaagaaatttaagattctttcaggagatcctataacaactcagggcagaaagtgaggaatgtcatgagggaggtgcagataaagtgcttgaacagtttggaagcaggaagggcagtggtgctgtgcatgttggatacagcagccacatcatttcagcagggcacacccacagtggaattctttgggcaatcatggtgctattgcaaagtctgattttcaatcccagttaattctgaagcagcccaagcatcagggaagaacaaacgtgtaaaatctcattgttctccagtatacaacaagcattttggaggcgtgtcattctggctgtttctcttcctttggaaatagactgacatttttcatagacctgttcatggttgggggtcaggtggaaggatggatgtagttctcaccgggggtttcttatctacagcttacaccattatagtgatcacagctagtctgtgaagtggaatttgcatgcaatcagcattcactcagagccctgtgctattaatagaacaacatgaaggaatcataaatcagcctttgctcaggattagactagcaagttctgtactattacaaagaaaaattcaagtggagaacaagaaggtgaatgctaaaacaaatctctggcttccaatcaaagcttcctggccaggtgtggtggctcatgcctgtaatcccaggtggatcacctaaggttatcagttcaagaccagcctggccaacatggcaaaaccgcgtctctaatcaaagtacaaaacttagccaggcatggtgtcacatgcttgtaatcccagctacttgggaggctgagatggaagaatcacttgaacccgggaggcggagattggcatgagccaagattgcgcccctgcactccagcctgggcaacagagtgagattccatcaaaaaaaaaaaaaaagccttgctatggaaaaaaaaaaaagaaaaaacacccttccactgctgagagttggaatcaactgattttatgagattctttcaaacaagaatggcaagtcttcatctttagatggagttccagaagtctttgtgcatttgtcgttcagttgctcaggattggtagcttggcatcccctgttggctgagcatgacagggcaaccctcagtttgatttctctcactctcctctgccttccctgcaggaggacctggacattgctatcgtaccctctgggcacagagaaccaacctggaggaaaaataagtggtgaattcatgagatgagcttgggggatgttacagaatgaatgcgtgtttgccatgcctgacatttagtcagtcatgtgcaactcaatgtagcagcaagggccatgcacccaactcgtcttgagggatggagaataaattggaaggcctcattcgtaagagctcaggattgtgtcaagaacctcaagaaacacaagaaaactctggcaatggggaaccataggtattggtctaagcccttcaaatttgcagtgtaattttaagtagggcctggattatcagacatggttgtaatggattatccattttaaaatagactcttttaggaggtttggattaaaatgattgtgaaagtatggactgtagcatgcaatgaataacccctctgtatataggttcatttacatggacaaaagtcctctgattcaatatacgtagaagacatctacttttagaatctgtaggggccatggggaaaacttccccttcaccctctgaagtttctctaaagctcaactcacaaaacgcagattaattggagaaaagtcataaaaactatattaacctgcacacagggagcatcacagagtggctacccaaaccccctatgggataccaaagcttgtataccatattgaggttacagaaagaatgggagcttgcatcatggcagccctccgataaaataagtggtaaatggtttgtttgtttgtttgtttgtttgttcgttttgagacaggatcttgctctgtcacccaggctggagtgtagtagctcaatcttggctgactgcaacctcgacttcctgggctcaagcaatccttccactttagcctcctgagtagctgggactgcagatgcttgcccccaagcccagctaataattttattttttgtagagacaaggtctcactatgttgcccaggctggtcttgaactcctgggctcaagcgatcctcccatcttggcctcccaaggtgctaggattacaggcgtgagcctccatgcttggccagttaatgtttctttaagatctttaaagtgtaggactctcatttcgtatttcctagatctggacgagggaagtcctggttacatgaatacagagtttctgcagatgcaaatctcccccacaaaaacagctctccttgcatgctgtctgagagccatctcgcatatatgaaataaatatattttgtggtaaaatattttgatttccttcaagttctatagaccaggtacacattaggtgctcaataaggaagttttaaaagtgaaagtatggcggtcaggtgcctgatatttgcaaagcctgatccaaggtgccaggaattactaggaacacagatatgaataaggttgacttggctttctcctatatatcaaaatagtagtccaaccatgggcatggatgagattgttctgcaagaatatttcaggcagttgggcaacctgtgacccacaatttatctccatctaatccaggataagagtttagaaatcaaccttcatgtctttacttctcaaaactgtaagacccaaaaaaacaaaagcccatgttctatttgacattctttgccctatacagagtctagcctggatcttaaggctttgtatttcccttggggtgtaatgcatcacttttctatcttgaatttcttaaacattcttatttttgatcaatgcaaccctctttaaaaagtgacaataatgtgctcacttctggtgcacagtgaggatggaaggtccagtccagcatccaaaggaaggtcacggcagaaagaacctctaaaagaaaaccaaaagaacagccaaaaactgggaagacagactcagagaagtgtgatcagggaattcaggagcaaagagcatttcaacggataatgatcaataccaacgagtacttcagagacatcaagaagggctgaaaagggacaagtgaatgtaactcctgtaaattgtagaattatagtgtattacagagaatgatatttgaggagctgaggtcaatgaggttggatatttctttcaagaggaatggaagaatttgtgccaagggatgacttaccaggctttgtctgagctcatctctgcttggagaccatgaattgggtgttggcacataggtatgtggattttcagttcaatgcagggccagaaagtaggatcaccaaacttattgatgattgaagttttgctagcagggagtgtcacaaaaggcaactgggcagtggaatttgagtgattagcaacagaaggactgaagtggcagatggtggtgggggatgaggaaggaagagagctggtggcttgtgatgatgaactggagattcaaacaagattgcagcaaaggtgttggaaggctggggcagagtggaagtgtttatattccagaggttgaatcattccaggtattcccaggtgcatggcatgcctgctggatgatgaatggaaggcaagttcctggcgttggagaggtcatggaattgggaagccagagtgttcagctggtgccttcatatgactgtgcaccagcaaagatgccatgcacggctgtcctgtgattcctagggctgattatctttattcactttcatggtggaggtttatagccaggcagagagaggggatgcataatggtttacttgcataatggtttactttgtaaggaggaatgtagaaccattatggactgctcattcattaactgagcttccaatattatcaaacactcaaaattgaggcttgaaaattatttcaatcgttggttacctgccaacgtttcaggtttttaacaggtttcagggagtcagggaggtggtccatgcacactaagaaagctggcttccctctgtccagcacagacccatctgttagctcaatggcattaaggcagtattaagagctaactgctgagactatacaactagttatctcttcatagctgtggcacacatcccagtgggatgtgatgtgcagggggatgcacttggagcaataagaaatagaacgtggaagcattttgtcttaaaactcttaagaaaagcaaatgtatcccctagtctctctctcatctgcttccgcagcaatggttggatgtggtatgaattcttaaatgtgtttttaattttcattttgttttaaacatgcgcttcatagagttcaaataaagataaataaatagagcatagagccatgtgacactggctccagactagacagcatgatggaacagagcaggaagcccagaaaaagaatttcatgtaaaatgtaaatgtaaaggtgacccttcaaggcagatggctaagaatggattatacaataattgtgatggtatgattaaacttttaggagagcgattgtagttaattcactactgtctggcattgtggtgctttgcatgtgcttaaatggtataataatggtgttgtgttgatggtgatggtgatggtggtgatgctgatgatggtgatgatgatgatgatggtcatgatagtgataatgttgatgatgatatgatgggtatgatgatggcgatgctgatgatggtggtaattatgatgatagtgatgatggtggtgaagatggtgataatgatgaaaataatgaagatgaagaggaggaagcagggggacgttgtgatgctcaaaataaagaagtcaattttacaagaagtatagaagattaaagtaagttgcccaaagtcatggagatggcatatgatggctaggattttaatcttgtctgtcttacatactatgctattcttgctgttcctcatatatttaaataaattccccatgcagattgtgtttggaaaatggaagtactgaagaattccaaaaaatatattgagatatatttatctgatatacaggataattgagaaaggtctttctgagcacaaaagccaagaaataactaactcaaagagaaagattgcagaattttacttcatgaaatctaaaatctcctgatgtcaggtaaaaatataacataaactgaacaaaaagaccaatgacaaaagacttaaaaagcatgtgcatcatcaacataaaaagaaaactcctgagatataggaagagctcatacaaagcaaatgatagaaagataaatatcagaaaaagacattgattataccaatttattgtatcagttcattacacatgttctagcattgggcattatgattttaaaaaattaaatgtttgctaaaataactgaaagagatcagctctttttaaaaattacacataccacattatactgattcctgaataggtcagacttttttcttgtatttttaaaaaaataattaaactacaaaaaaaatctgttgccatttatccagtggagtcagaatctttccttaatccccaatgcttataggaggacctgatgaaatctatggccactgaatcccttatgagtctgccgctgataccatattactgttgtttcagcttacgaggcatattttaaatattcagccaacacctctcatttatgaatcccaaggcatctatgacacaatgattaaaactcaagtgaagcaacaaattgggctttattttcacactgatgtttttcttcattggaaatcccctttaggaaatgtctttcaaaaggctttaggttatctgtgtgtgtgtgtatgtatgtgtgtgtttacacatgatattttacattaaatttatctcccactcatcctaaatcacactttttaaaaaatgagtctgtgaaatctacttattttaataatgctaatgtaatgttaattccccaaagtggaaactgcagttaaaaaaaaaggaaatccattggtttattcagactgtcaactcttggtatatgcttgcagtcatagctgagctctggatcagatgaaatatgacctctgatcgtgtcattgcacacccgtattgctgagattgctgtgataatcatgaaattgcagatagacagtatcttctcagggacttttgacaggggctggtattaagcctctgctgcctaatgaaccaattttttattcaagcagatctagacaggagagaaatgaaatcatttccattacagaccactgtttacctgaatgcaacatgcataatgaggttttgaaacttcaggaaaacatctaggaggtgatgacaacctctacattgcaaaggaatgactaatacaaacccacttatgcgtgattctctttccacgattgccaaacgtatttaataaagagacagtttaaaaaccgccagttacatgcttgactgtaaagatatatagtacactttaggatatgtgctgttttgctgtttgggagtgttttgtatatactttttaaaatacaaggctttctcaaataggatagaccatttgttactggaatataattttatctagggttcttactccttttcattactgcaggaagaaaatgaatttttggtaaattgaaataaaatcacatatgtcaacattttctattgattgtcactttcagaattgtgtgtttgggaagcctttgtgagtgacaaggcgtggaatggaggagacagtagctatgagatgctcgctgactgtcccagagtttatgcttttcttgtgccttcctacgatgtctggacagctttctcttcatgcagaggcttaggatgaagtcactgagagctaaggtctatgatttaatgtagttcaagagcagagttctgggggtgagtgtgagatagcatgtcacataccactttgcaacagaaaaaaaaatttaaattgttgcctcagtcttctgtgtttttttagtgttttccacactttgtataaatgtttttctgattaccaaagtaatccgcagtatgcaaaaccgaagaatatagacacaaacagtacagaaagggaatgacccatgaaatctcacccctaaataggcagcatcattaatagtttgctggatagatttatttcttatatgttgccagtatgacatattaatatcaagatttgactattaagaatattttacacaaactctatatgctattctgcagttttttcttttcgctcaactatctatttggtcatttttccatttcaccatttcgattttcattttacctttcttagactacaatttgtttaatcattcctctgtgagggacatctgagttccttttttaaaatttttttattttttattttatttatttatttatttatttgtatttcaggtagtgctataagtgaatattctgtaaagctgtgtgaactggtgggaataattttgaaataaaaattcagccgagatcaaatttgctggatcaaagagcataaaaaatttgctttcatttgatattgcctaaaataggtatactctttttttcaccatgatagtaggatacccattgataatcaatgagaacgctaatttcctcatactcttagcaaccctggatattatcagtctctttttcatctatcgggtgaaaaatgctagttcactatttttttttctattgtgtgtagggttagtacagtgttgtatttcttctcccaaggattctttggtcacttttctattggattgtagatctttttcttattgatttgtttgcactatctatatgataagaacattaatattttacttattgtacactgcaaatatttttcctgccttttttttttgtcttttcattctatttaaagagtcttttgcaataaatttttgtagttaaaccttcatgatgtctggggcttgtaattggaagattttttttttttaaagcttttcttactcccctacaaattacaggttgagtatccaaaatactcaaatattcatccaaaatactcaggaccagaagtgtttcagatttggaatgctttcagatttgggaatatttatattatactcaccagctcagcatccctaatccaaaaatctgaaactcaaaatgctccaatgagcatttcctttgtgtgagcatcatgttgacactcaaaaagttcaggacttaggagcatctcagatttcagattttcagatgtagaatactcaacctatatgtatacaccctttcccttgtattttcacccaatatgtatatggcttcatgctttacagttagatatttcatctgtggaggaaattctgtacgtgtgtgtgtgtgtgtgtgtgtgtgtgtgtgtgtgtgtgtgtgtctgtgatggaccatgtgttatttgcctattcttgtgaatttgggtcttgattgatcagtactcttggctggtgtgggacctcttaaaacttgggtaggacaagtgttggtggcccagtgttatactttgtcttcaggtggtaggaatccagttaggatcttttctgcaagggctatgcagagggtcaccataatgaaaccactggaagccaggtggctgtagcccagtagtctcttcccatgaggtccagcattggctgattcatctagctagatccacccttgagtgggcagcaataattagttcaaacctacactgtcactgcaggagattgggagtgaagccaagctccccttgcaagtacatgaggtcctcatggtggtcgtggcatccaccagccaaatgagttaggaccacaaggagggcttcaactgctagagctgtcaagagcaacctatggtttctgggagctgctgatggcttctaacagcctcacttttggactggcttctgtagccaccatttctgggtggggttttaggaggaggtgagggtcatcaggtggttgggcttcccttggtcccatggggcagcaacagtgatttgcaacccatgtgagcaggcaggggcaaggttagggctgggaaagtagtttgcacacaggggagggtgggatggtttggtgactgtaccctccaagagctattttcctcaggtgctaccattcccacttggatgaggagcacaaagccttgaaatcaagtgaaggaggggcttttctcaattgcctccaaagggagcctcctgctttgctcccacatgtcttccccaagcagtgaggagggagcagctggctggtgctactgtgcatccttccctgacctgtgggtccttacctgtggaatctcatctgtatccaggtgtacagccatgtcccccactcagattcctatgatggtcatgaatccaggaatatgtcttttttttccttaagagatgaggtctcgttttgtcacctaggctggagtgcagtggcgtgatctcggctcactgcagcttcaagcaatcttcctgcctcagccccccaagtagcagggactataagcatgtgccaccatgcccagctaatttttgtatgtgtgtatgtattttgtagagacagggttttactatgttgcccgggctggtcttgaactcctgagctcagtcagttcacccacctcagcctcccaaaatgttgggattacagacagaatatgtttcttctagagtagttatgtcacttttgcaaagggagctaggaaaaagaaggaggcagaaattggtctatgttctccttgtttctggaatcttatgaaaccagtgctcaagctgtttagatttctgcatttagaaaagagggaagagaaatacaactcatgagatcatttgaagagaagacatttctatcccatgaatgaatgcatacttaattgaaagcagacagttcttgatctgagccctttctttggcatcatgggaccattttcaaaaaccaaaaggcccttaatggtactggcagcattaaattgggggttcagtgctgtgttgccatctcttctccttgctcttcttgtgttcactgtcacattagactgtgtcctgttgtcacgctgccgctgtcatctgctccactgataatattaatactactactaataaagttactcgttcttctctcactatatacttactgtctgccaggtgttatgcattcatagtagttctcatggcagccttctgcgaatggaactgtattatcccattttaaagatgtgtaaaccaaggtgcattggaaggcagtaactagtctcagcaagctcacaaaatcagcagattgcagaggcaacattcagagccatgtgtatatggttccgccccacacagtgtatactgggacgatgatatcataccacttctggcttcagcatattgatggcagcagcggtgccaagaaaggacagactttgtgaccagattgcatgtgattctatcccccactgaccaacctctggcggttaaatgtgggcaggtgacctctctcactgagcccccacttctttctctgtaaaatgagatcatttcattgcctttcttgctggggatgttttgaagagtgccttcggtgtattaagcactgggcaaacattcactattgttaggaagccttcacacagagcttttgttgcatcacagcgtcagttgattctcttttctgtgcatcttgactttgccgtctctcctccaagtatattttattttgctttttggtaggaaaggggagcaaatggccatagctctcttagggcacaatttcgtgtgttcgagtcttgtgacctttcgttggtttggtatctcaccatgagaaaaatggagtaaatgaaatatttccataactttgtcatctgagatcatgtgagcacgcctctctgcctgcaatctgaagagtcacttctccaacaagcctcgtggagtagaaattcaggattgctcacagagtctgctgggagctaactgtctgtcttagggtgatttctgggctcacccacttggactgcatctctcaacatggcatgcagcgcccgtggtttgggggcaacagtggcttaatgctttcttggggaggtaaacacttaggaaggaaagtttctttacaacaggattctgtaagtcattttatttgctctcaagaagtagaaaaaagagaaggttataacatagcatatactttcgtatattactccttctcagtgcaaaatggatcttgttcattgggtaccccagataccactgaagcaaaaaaattaaaacagaacaaacctctgctgtttctggcgttaccttagtgcctgccatacttaacacaaaatttcatttatttaaggtcactcacagtgagtgtaccctgactaatttagctcatcaattacttaaattttaaaacaaatactgatgctcacctaaatgaactccatttagtcagtcacggcaaaatctaactgttgcacctattcacacttccagtttgtagaaaattgttagtgaaagaacattgttgtcataattttttttttattctaaggtaagacaatagccagaacaaaacaaaaatgacaaaattacagcattttaagtcttttaactttaatcacttgaaggtggaattacctgtcaaatacctgtgccgacaatagctatttcttgtctgccaagtttcatcagtaacaaccatctataaatgcttttatgcatccgatttgttgcaagtaaatataccatactttaggaagaaaaaaacctagagaaaacaagcttctttgacaatctttgaagctttgagcgctgactttgagaaaaacgattttgttttgtttacacaacttgacattttggttttgcgtagtgctgccttgcaattaagcataggaaggagagacgtgaaatgacattacaatttatttggaaacagagagaattgccatacttacagatagagtagatgcttctgtgttactatttctttgtaactttatccttgcagaacttcccgagagggtgtcccagcatggggatgcatctgtacaaaacacagctcttgtagacaggagtgggtcttgctcagatatcgttggccaagaagggcttcagtctattcagtttgggagatggaaagggagtctttgtacagaacagtatacactgagttataacatccacaagtggtgttactgcctggatccacatcatagaatatacatccacattcatatggatttgcataaaagcatgcagcgaactacacataatatgtagcatatttccttccaccatgtctcacccaaagccagtaaatcctttagctactcatggctctgcagatggcttctgcttggtttggtccatagtcttgtcgttccttaccatgttctgcattgcatgccatgtgctttgatccactgcatgccatatgccaagttgaccattcacagaatagtcatttcctggaggaaggtctttattctaatgaaattgctcagtccctctgcttgcaattgcatcagagtcctgcttgaagcatttcttaatttaagagtattccaaagaatacttttctcactttgccactgaaccagtctagttaggactgaagatggaggtcactgggcaaggtcatcctttcagtgcatgcttcctgacttcaaactatattacaaggctacagtaaccaaaacagcatggtactggtaccacactgtctcaatgccagttgcctgatatttggcattggcttctctttgtgcttttaaagcaagagtgggtagggtggcagggcttgcctctgttttgggagggagaagaatgactttctaggtgactgctgtctaaacactagttcaatgcaacaagcctcattggctctcagttgccatctctacttccgggttagacttctgtgcccttgggcagcctcctggagtgtgatagttgaactattcatgcccctgaacatgagccccacaaaaatgtttattggacttctttacttggtactttttaaagagttgaggaatggaacttctacataaagccagtatcaactgaagtatgattaaagacaaggccggaacactagggacataaagatgagaaactcttcattgcctctcctcgactatctggtatgagtggcagtgctggagttattttccactgaattcctcaatgattctttttgtgacccatttgcccactaatttgatattccccatatgtgctgtagtcagaatatagcatgctttcaatggcattaatgttaaatcctttgctcttgcaggtgaatccacatcttcgaaaatggcatttttttttcttccatcatcctattcttgattttaaatgtatgcctcagttacacccatatggaaagctcaaagtaaaccagggtatcagaaaacccagtgataacagtgcagcaagaatgaaggatatgtagatattgtgtatgtttttcttctctctccactttctatttgagtttccagtaaatctgcatttgtgacaaaatagtaaactttgcagaaagaggtttttgcaacctcagattacagatggaaacagtacatagcaggaaaaatagcagaagggttagcttgagaccaggtgtttgaggctacaatgagctatgattgcaccactgcactccagcctgggcaacaaagtaagaccccatctctaaaataaatttaaaaaaaataaaatttgagagagatggggtaagggcattatggccagaccaaggtaggcctggagagccaaaaaaaacttttaactgtaatacatagttgaaaatccattgtatagagtattgattttggtcctctacattaatttagcttataaatcattaatctctgagtcttatcaagtctataatgatgttaccatgtttaaacatctgcaaacctaatttcaggttcttgagcctgaaactaatattatcttacctggaatttgtatctcaaattaaaattaatagtgtttaatgttgtcttataaattatttctatcgtttccatggtatcttccatttattatggtatcttccaagaagataccataagaaattatcaaagaatcaagttatcaattatcatgaccacgctaaaatggtcatgatggaatgaccattaaaagaccatttggctagttaattcagatgggattaataaaagtacatgagagcatctgaatactatcaataattagcagcaacacaattgcaccacaataataataaacatttaagacttacaatagctaaaatgcaaaagcatttagtctattttagtcacatctctaagcacaatcttagtcatgcgtctaaacatggattacttaatgtaatccctacaactatgctacaagatacttttatcatcacctctggtttaaaggcaacaaagcaaaatttggttaggttgagcaacttgtgtcaggattgcccaacagccactacactatagagcttcttggctgcatgagaagagttctggattgtgaattgaattcagacagtagacctacctggttgctggggagagtctcctgctctggagctgcaggttgtgtataagacaagtctgtttggaccaatggcctctgacagttttcttctcactcctgtattctagtattccatcaagtcctgagttcttgagtttgcctcagatactataaagatatctgggttcaaagttaaacaagggatgtggaggacagtagaagctatgggtactacaagggtgttttgggtaatgctttttctgccatctaaccattccaagcacatttaattttgctaattaagtctttcaaggcatagaaaggaacgacattagaatccatgagtttgagttaaagctgtgttctaaataatactccactgaataccaatgtgtatatttgaaaagtgaggtcaaaattaggggtcagaactagagttgaatacctgttgctttaaagtcatggcccaattatagctcagtcaaaaaaatctagtggaacattcctcctccatgaatttattcagcctgcttgaaataattgaattaattaattggattaaatgaagtaatatatttagagtagtgagcatagtgcctggcttgcaagacaggctcaataaatggtaactgctatcattattattatcattattgttatgattactcttctttccacagatgtgtaaagcatctttgcttaaaatgtgcctatacctccattacattgagtagaaaaatcatagatgagaaaacgtctataatggaaaactaagcagatatttgcatcatcttatcttttttattactagctcaccttatatttaaggtatctctggtaggacccacggtccctagaagggcccaccaatagcattggtattaaggatcttggggaaagatctgcttctctcgactaacactgcaagtccccacataaagcaaacagatcatcctggagttaggaggatattgcaaagaagctgtgactggcaaactgaaggttgcatggattaaggaggttgcaaaacataaaagatgagtttaccaaggcattaatcaatctgtccatgttttaattcaagtggaaagaaaggcttggacctgtgactgatgtacaaggtgtcagcaaaggaaaacatcattttcaattttgtatcttcagctttagagatggtaaaatccaatgcaaagacctagttgtagcatgaacgtgagtctcgatggtgtggtagagcatcataaatatgaagaattctgaagggctttgtttcccagtccattgttcatagcctctggccattctcgactcacagtcctccctcccttgtggctcagtctggaggtttaaggttgcacctccagttggatattgctggagaagttctggctgatctgtgtccagagctttgcattgacttctgtcatagaaatgatgcaatgagcatctgtgcaacctcctactccatggcacaggctgggttacctcccagggcaagttcagctgatggccataccaaacagcaaatggctgtacccgattacccaatctctatctttgcaagaagagaaagtccaggaaatacaatggcattgctggatcaagaattgaaagacagtgtgctcactttgaactctgctctttcaaaacatgtcctgctagtctgaatgcccatggctcagggaaaccactctattgtgatgtcgataaccctatggaaacgatgtccaaagtggcttcccttgagctacaggcatgctgactttgggtcttctcccagacaccggaaggagtatagttccacagaacaggtacaatgactttgttcttccccgcaccttttcccatctatgcaggaaaacactggtgtgccccatgaacgtgagaacaagttggagttatttaaattatttccagcaaatgcaacaccctggaaaacacacaagttattgttaatccaagaaaatagtggagtagatccgtgaaggcatcccagatggtgagagcagatgcaagtgcaggagggtaaatcacacattacgactgccattagggcaaagatgggtttaatggaggaaatcacaacattatcacaacaaccaggtacaacacaatataagaattaattaccaggggacaatatgaactcaggaacaaaccaaagagggaaacccagtcaagtgaagacagggttatctgtagaatggcgacattgcactcttacagttttccatgttttaagtaccctaataattccgattatatgcatagtatgattatttactatgtttgaaagttatgtgtcaaattgtctgaaactagccaagtctcattatgagcattgttactgagaactgtgaaattccagccatctctttttatatgtcaacattgattaagcatttagtcgcaggtaacctttcctctcaaagtgtggttcttgggcaggtaccatcagcattatgtaagagcttttttttttttttttagaaattctcagatccccactctaggtttactgaatcagaaccttcattttagcatggtcatgaattagccaattgaaattcaagaaacattggtatataaggtgactatactatgaaacctatatgctaagtacaaggtcttgtgtgttagtttggttcagccagcagaattctttaaaaaattgtttaagttaatctaatcagtttccgaatatcacatttgcttacttttccatagttatttaaaaaacgattagggatgtcttcttaacatgttttgaatgaaatttttatgttaacttatgacatgtgaaagtgagtaaattaataaaaagcatgatgatacacaaattaatgcatgtagtgactagttgaatgggaagatcttgcattgggtacgtccacccatcaccgtcgaagagaaatttatcctctaatccaagaacttcagagaggatgattctccatcatctatttgaggcagacaaatttgcatttattaacataaactgcccatggcagaagtttgagccccttgtctcttgctcagtcattaggggagataggagccactcttctcttgttattcaggaagtagatacagtatgtgctggagttcaccatctgcctcccagttccttagttcctgcaactctcctgcaagagtttcatttccagtgccctccttagaccttgctgtccacttggcatttgactgattgaatcccagatgaccttttatgcaggagttgcattagatccatgttgagtacagcaaagcacaacttctcctatttaactattatgccattttgcattcttctcttgaaaaaaaagggaaaagccatacaaacaccaatattccctgcagttacattgagtaggtaggaaagacttccttaataaaccccccaaaagacagcacatcacttttgtatctcaaccaacatacaaaatgcagattatcaactttatgcctttttattttggtcctatactatttttcttttatgtgtaaacttttagatttgattttatactgtagataaatcatatgctttccaatgtctgatctgaagggtcccttgagctccatatggatggaggagatcaggactaaagttttggaaatcttgaccatttatttcaggaagaagtactagattgaattcacctatatgaaatggacattgtatcaaactggagatgatacacctatttgtgcagtgacagatataccctgatgtatgggacattggtgttacttctaatcctaacaaagaattccctttctgggactagtgacagcagaatatctctgtgccactccacaatggttcaggagagcatgagaataacgctccaaaggccacatccctgaagtaacacctagcattttatatggccagcagagagtcgtagccacccccaggtggtacaattattgcaactcttatctatcttaaaattctagctttagctgaaatactggagtctcgccatctctgttggtcagatgtaggagtaacttgctcaccagcatagcttcagggagactttagggtaccattgtgccctggagttacactgagtaagtgaagaggctttcttaattattaacagtgggtgcctgtttaaggggatatctacctatctatctagcatatgtgatataaaaataaaacacctatgttttatattatatattaatattatataaaataattatatatttatatatatataaatatattttatttatatatttatatataaataaatatatttatttatatataaattattttataataattatgttatatgtatataacatatataagtatatatttatataattataatttctatataaattgtataattaaaatttatatataaagtatataaatatataaatatataattatataaaatatataaattttatataattatatataattataaaatttataattataaattatatgtaagtatataaatataaataacatgataataaatatataattatattaattaaatttagaaatattataaaacataatttacatgtatacttacaaaattataacattctatataaatttatataatatacgtataaaatatataattttatatatgtgtatataaaaatatatacacatatataatataaaacatatatacatatatgtgtgtgtgttatatataatataaaacatatctatgttatatttaatgagcctaatgcttccaaaagtataactttcatatatatatagtgacttcatagcactttgctccagtattctgtctgagtgtacctaccttgtagaagaaaaggcaaagcgaaatgaactaaaatgacaaggatttggtgaggcaagctgaggttctaactccattgtaaagttaaggaacagtgagcactccctgtacggccagtccaggatgaagtgttttgggtggaattcctcattcttccacagcaaccccctactattatccattatcacctctgacttagtggcagaggatcccagtgagaagccagagacttgggtttcaaaccaactcgcttaagtcaggacctagaagcaagaactttagcacttagtcctatgctgtggcacctcactcacctaagacctcgaattctgctttcatgtttgaaacccttctctctctgcactttgtagctcagtgcctgactcttaatagtagcttagtgcttgtttgtgggctaaataaatggaatgacagaactttctagaatttaggcttcctctgcaacccacatccacacttgacagaggaaggagccagatttttgcatttccaaggtttcttctttgggactgcaaaaggtctggttaggaagccctcacattgataagcttgttcttgttatctccagttaaataacaaagtgctcttgaaatggcttattttctatatttgtttccttcagaaaacaaaggcagaaagctttggagatagaacatttcatttacaagctataatgcagctcaccatcggcaattcaaaactatcactctatataaatcagtgtcattatatcttgagaaccttcctgagaaataatatttgcagacctctaatttataatagattgctctgaaagcaaaaataatacagcagcatttgttctcatgggagatttctgttcacagtgtttaggagggaaacatgttagacctttgtaggatcaatgttataaaaaattaaatgtcgaatgggctctgggatttacaaatgagattctggcttaagacctgagtagtatgggatccagactgtatcttttgggaaagaatgggctaaaaggaaattagaaatctgaccatttctcaggaagttgagctaaatattctaccatgcatacgtgcatggcagcctcagctactttctcttgtactaatcccagcccagttgtatagggcactttaatgaaagtgatcactctaggcaatgaagaagaaacttgatgaggacatgttaaatatcatggtcatttgaaatattggaatttggaggagatatccagggataagcattaagatggggaaggatgcaggatatttcagttgagagaatctgcataataaatgcagctgtaaatttgtctggagttaaaaataggcaagaggagaagctgtaagtaggatgtagctggccttggctttggggataagagctgtccctgaaaaactctgtgacaccccagcctttagcacacagcccgtgtaaggtgggcacttcataaacccatgttgaatgaatgcatgaggaagtctaggagtcaaaactgcatttgaaaggcatttaaaaaattaacagaaggaggctgaggcaaggggattgcctgagcccaagagtttgagaccagcccgggcaacaaactgagacccaatctctacaacgaatacaaaaaaaaaatagccaggcatggtgatactcacctgtagtcccagctacttaggaggctgaggtgggaggatcacttcagcccaagaagtagaggttgcagtgagccatgattgtgacactgcacttcagcctgggagacagagtaagaccctgtctcaaaaacaacaaaaataatagactatttttgagcagttttacatttacataaaaactgaacagaaagtaaagagtgttcatacactctcccctgcacatagtttccttattatatatattatgtattcatgtggtatatttgttacaattgagccaacattgataagctgtgattaactgaagtccatagtttccattagggttcactcttcgtgttgtatgttctgtgggtttggacaaaggtataatggcatggatccacaattacaggatcatacacagtagtttcactgcccccaaaatcctctgtgttccgcctcctcatccctcctttctcccaagcccacggtaatgactgatctgtttaaggtctctatagctttgcctttcccagaatgtcccatagctgggatcatacagtatgtagccttttcagattgactcctttcacttagaaatatcttaagatccttccatgcttttcatggctttatagctcatttctttttagctctgaaataatctttcattgtctggatgtaccacagtttatttatccattcaactgctgaagggcagtttcattgcatccaaggttttgacgattataaatagacatggtataaatatttgtgtgtgggtttttgtgtgcacatgaattattatgggagacacatttttataggaaatttctttgcagcattttctttgtgcagatacttctacatatagaaagatgaattttgtttcaaaggagggtgtatggtcatatgccctttactaaatactaactacaatacacggaagcaaattcctaagtcctctgctacctgcctaatctgtgttattttacacagaggttgttgtatgagcaaaagggggcatttttctttcaaagtataaacgggggttatagcgccttattgtttccttctatttcaactcattaagctaattaccattttcaaagtaattaggcttaaattagtgtctcagccaaacaaccccaagcccgagagcacaggtggtttgcttagctgcaccagataacaccataataaatgtctgcctgatcatgatttatcatgggagacaaattgctaaaatggccctcgggtgtcttattttttggttctgagtatgacatttacatatatggtgtgggttctgggaatgtttatcatttgagttaaaaattgagaaacattgaacatactctagcccgtggcacttgcaatcaaatagcaaaaatatgccttgccacaaatgacttggttgttgcttttgcatcagaaatcatctctgccacctccatgggcatctcactctgcagtccttctccttccccttttcgggaccaagtgggtgtgagtgcaacctggagcgaagggtctggcactgcagggtgtgatctacctgctggataggatgtattccaaatcctatatttaattatttcgactgcagaggatgcctgcggccattgtagaatatcagttgttgtggacatcctagtgtgactaagagcccacccaaaatttgattcccatgtctagaccagtgacagcatgcacacactaagaggatatgaaaaggcttattactcatataatgtggctttctgaggagagcaggtgatatggtttggctgtgtccccacccaaatctcatcttgaattgtagcacccataattcccacgtgttgtgggagggacccggtgggagataatggaatcatgggggagattttcccccatactgttctcatggtaataaataggtttcgcgagatctgatggttttatgcggggtttctgctttcgcttggctggctctctctcctgcctgctgccatgattgtgaggccttcccagccatgtgatactgtaagtcaattaaacctctttttataagttacccagtctcgggtgtgtctttattagcaacgtgagagcagactaatacagcaggttactaaaccagtacaaaaaatagcttgagagagctcggaaaagaaacggattctgctgttatggtgattagtacttggggctgggataagggtctcttgcatgcagacaggggcttgcatagttccaacctcccaccggcggtgaaggagggagcgcccaggatttcttatcagcctgcgtggcacgagcagaagagggagagatgaggcttaaaaactcttagcactcaaacattaagaaatggagtcaggctctaatataccagtcaaagcctagcagtatgcactgacttattaaattaaatcagcagcatatgactatgtagagccctgtggaaattgtacattgtctacctctagtttgcccatcattgtcttctgatttgagagctgagtgatagcttcctaatcagaaagtccatgtttcagctccttcttcaaacttcaactttcctctgtttttttcttgcagaaaattataagcatatgcagaaatgaaatagtacagttaaacctccatatgcccttcactcatatttaacagttattaactcctggctaatcttgttgaatctatatcccatactcatttattctcgccctgcattcttttgaataagacagcagctatcatgttcctcaccacctccatttcatctacgggtatttcaggatatatctctacaagattttttttctctggtgtactttttactcctctgattctcactgagtctatctattcacctgttcaggatttgagcattttgagttttcaatcagatttaattcttactttctgattcttccacttcttaagtatctgaacttgaacaaatcggccttttacagcattgttgctctacccataaaatgaagctagtgccatttactcatagggttcagtgtggtctaaacaagataatatgtaataaaattctctacatgtagacagtgctcaacagagggtagcaattattgttattattattgttgttgctattattttttgaggggttatctggaggtggtatacaatgttagttctggggaaagaaggtgaggtcaggaggaatgttgatatttgtgatggacggtttagacttggagaataactcccggttattcctctatcaatgaggaatattgatattcatgtgagggatagtttagatttgggtatctactgtaagtattaaaagagaatattctcataaaatatctatatacatatttgttcacataagaggaacatcactggtttagttttcccatccaataaagaaaaatgatagacttctttatagccttagagccaacaccagctggtgagaacaacctttcagcttctttcttctggcacctgcctccaagtggctctccatcaatgaacctggtacttttagaatactttctcaggtctccctgcagaatcacttcatgatacccagaggttcaaatggtgcttctaaatggcactcaagtcaatgaatcttggtgtctattctaagaagccagccacagccagtcttgattgcatcacgtctcatgctgggataaactccaatatgtaagaacgtttacttccaccttgagaaattagccacccactgagtagggcaaccatctccatttgctttatgaatatgcattatttttaaatggagtctttttcccctccagggcagatcttgaaccttctggatgagctgagattggctaatgataccctcatctacttcacatcggaccagggagcacatgtagaagaagtgtcttccaaaggagaaattcatggcggaagtaatgggatctataaaggtgagaaatgctgggatggagaagctctggcctctcagctcatccgctggtcacttttttcttgattttcgagcttttccatagttcttctgctactttgcaataggtaggacttccttgtgtcatggagacagtcagaaggccaaagtgaccatttctgttctggttcccacagaatttaaaagcccacatcttgtgtcaagacattagaatgagagtatgtatctccaaatgtaaatgcagcctcatataatgtaactgattaaaacaagaattcctctacacctatgtgtagatttcctgtcactactgtaacaaattgacacaaacttatgggcttaaaacaaatttatgaacttacagttctagaagtcagaagttcaagatggatatctcactggtctgaaattgagatgtctgtagggccttctacaagctcttggggggaatctgtttccttggctttttcagcttctggggacttcccactttccttggctcatggccccttcttccatgtggaaagctaacaattcactgtcttcaaacctccgtgtctgtgtccgacctgtgcttccataatctcatctccttcacttactctgacacccctgcctccctcttatgaggacacttgagattacgttcggcccacttggataatcccacatcatcttcccatctcaagatcatgaacttaatctgcaaagtgtcttttgccatggggtgtaacatattcacaggttacagggattaggacgagggcatctttgggagaccgttattctgcctacgtgaacccacaatagtattttgagctaacacttttcaaaaattttttttgcagcattagctgagccactttcatggtggattgggcatcatgctagtcattggagatatttgatgagacccagctactggcttgtatagtgtatgctctgccaatataagatagacatatatattgtctaatatatacatttagacatatcttatgtacttatacatagctaatatttaatgtctatatacattagacatatctaatgtctatcttatatgacagacattacatgacacacaacgtggcccatttcataaagtgatatgatacctaaaagggtgtatttgtgctaagggttaggactccccagccaaatctgcagtggatatgggttgaaggtacaagaagagatgacgccttaaccaaaaggggagggtgaatcacagtttacctgcaaagatatgaaaggatgatatagggaatgcttttatctatcaatttgtttagaaatattgattatcttctgtgtgtcttgcattgggccagacacaacagtaaatatataacatggtgtcttccctgaaggaagtcatgttgaactggtaggtgggtgggtagatgatgacgtgaagcctgggaagacccagtacaatttgacaagggcgctaacacttgcatgcacaagatactaatggcacaaggggaaagagagcctcacttggctgaggggttcccaggaatgtttgcaaaggagacacggctagaaaggaggtcaccagtgggtctgtgcctctgctttctttccccttctgtctctttctgctcttccaaccccttgctctcttttgtcatgctggaaagaaggagaagcagcaaatagcttgttctgcaaactgcaaggagctcagtaaggccagattacaccatacctgaggcaaagagaaatagtcctctgtagtctatccctgcagcataaggctgcaggtagcttatgaagccttatgcttctagttacgtctctgtgtgcacatctggagccctatgaccggctgagcacccatgggcaggaaccgtctcctacaccttttgttacctggcacctagcacaaaaagatgcctgttaggtgcatctggacaaccttcataggctgctcagacctcctcccagccccttcctttaggtctcattgttaccttgctcaatgcaggacacataatcaatatgtaatgtgggtttgattaatgaaccggtgtgtttaatctgaacaggattaaccccagtaggctatcactctttcagcccttctctgtgtgccatgttactttaaaagtagtaaaaagtggaaacatgtattcctaatatatgaagacttggtattaccgggctgaactggggtccactcacccagcgcagtaaggccaaacatccacaccgaggttttgcagtgggagaaaggagggtgtttatttgcagggttccaagcaagtagaatgaggcctctctcacttaagattccacttccccaatggtttgcaagcaaaggtttttaaagcctgggaggcagaggctacaggcaaagtcataagtctatacatggagattatacattggtttgacctaaaaaggcaggacatcccaaagaagggcgcccacaggttataggtggcttcaaagattccctgatttgcgattggtttaggaagtgaagctttgtctgaaaatttggggtcagcaaaaacaaacatgatatctggcctgtgggcgtggcttcctccaggccccttgggaagaaatttggaacaaagaatgtcagtcagagttcagtcctcagttcctctttacctggagcctaggtgccagcagatggcattttccatttggaaggggtccactttctgaaaaacaactatgggacatatgttaaagtgttatctgtagttattacagggaaccaaacattttatggctctaacttccttgtctattattttactctatgattaccttcttgcttatcagttgctcatttacttttcaaagctagctaggtgcctggaattttctttgaaggaactcaagatttttccttatttccctgcctgggggagtccagcaggcccctaagaggggtccctgctccatctcattggtgtttcagtcttattttcacaaggctataacctgtgtggatagagttgtttttatttcattttgtagatgccagtgtccctaaagactggagttccaggctgcattccacgctctagttcatccattcattcattctctctcttagtgcctgttcagttccaaaatagcttagcagctgccgaggaggagacgtgtacatcaatcacaattctagaagtggttggagagtaatagttacttaagaaagttacctatggaaggctatagagccccagggcagggagaggggacccctgactgacaatcccggggaagtttcatgggacagagaaggagctgcatcacgttttgcacagatagttcaccagggttcagagacacgagaggtatagatcagaaagggagcctcaatggtcttgaataatggttgggaaccccagttttatcatacaaccctgcaagcatgtcaggagctactccataaatttcttttttttttaaagaaatgtatttgatgtattagaaatgttttgcttgcatgctggagagaccatgaatgtgtaacatgattaatgtctcagccaccgctctattgcaaagtattatccttttgtcaacttatttgaaatcaagttcacagtgaaacactgttaaaatacaatgccctaaaaggaagatggggtttccttctagttatgggaagtaggcttctgagtgtcaagtgtcaagatatcttgttctctagagctgcaaactcgaacacatacctgtggtttacgcagacacagagaaatcataggatttaacaccctgtttaaaatagcatcctttctaaacaatgatgacttctactgtccatcaaaacccttcaaaggactttgctatttgaacttttttttttccttttgagagaatctcgctctgccacccaggctacagtgcagcggagccatctcggtatttgaacttaatgattctactgtattcccaagtcaaatctgtttccctggtgaaatctatgggcttcatcaatgacagagtggataaagaaaatgtggtatatatacaccatggaatactgtgaagccataaaaaagaatgagatcatgtcttttgtaacttggatggagctggaggctattatccttcgcaaactaataatgcaggaacagaaaatcaaataccacatgttctcacttataagtgagagctaaatgatgagaacttatgaacacataaaaggaaacaacagagactggggtctatttgagaggggagggtgggaggagggaaaggagcaggaaagatcactattgggtactaggcttaatacctgtgtgattaaataatttgtacaccaaacccccatgacatgagtttacctatgtaacaaaccaaccttcacgtgaatcctcaaacctaaaataagttaaacataaataaataaataaaataaaatataccagacttcttgttaaaaaaaaaatctatgggctaaatttggtagaatggctaggattaaatcatccttccattaaattcaataggttattccttttaataagaggtacattacatgtctgctgcagtctacatttaaaaaacaattatctaatattccaggggtgagggagtaataataggactgtttcatttctttaaggaaatgactttgcagtatgattattctgtttaggtttggatatgggtaaattttgtctttgtcaaaatgttctagcataaagggaaattgggaaataagggtagggtcaaatgtatactttggatataattctggtcaaagtttagaaatcttggcagtaagtcctttatacagtagttcctaaaatatttccctctgagacccttctaaaataaattttcttctattgtccacatgctttgaatgattgtgtcaacctaataaaaccaattttctaaggaataatttatcttcccatttaataattaagaaatcattatctccattagggcttccacttaatttgactgtgttccataccatgtgattatgattttcatagacagcaagataaataagtaaaccactgaacatcccatagcctgtgaccctttgtagctgttaaatgtaaaattttccatcagggctgttgacatttgaaaatgttcacattgcttctttgggaccttaggagtagaaaccattgcttgaaactaatagaggatttaagatttctatgcaatccttaactctttctaggaaatttagtttatggctctcaatttatgttcctacaccctggacaggtattggatctatttggatcagcctggtgggtgagtcttgagaagacgcttcattctgcacttgtatctgtgtcaaggcagtagaacagaaaggagttcaagctgagagtcctgcaaattgcagttctcttattgaaggagcaagtggccccacccctagcttcacttttctaaatcagggttcaaagcctttgagcctctctttgcatgaggagttgcaaacaaattcatggaagtttcttctcaaccttcactgcagctgcttctcacctgatccacctctcaatgttgaagacctccagggctctgtcctgggcccccttccctttatcttcacacttgccctatctgatgtcatccaaatccaggacgtcatatgacatccaactgcagggcatcccacatacagagccgggaccctgctgtggaggtccacattgctatgttcagctgcccacttgccacatgacctggaagctcagtaggcatgtcatctcggaaagatgcaagctagacatcaaatgcaagctagcccaagcccacacatgcccaaatctgcatgatcttattgaatgctttaccccgtgactgaacctcagtgctacgatatttgctggttgatgggcttgttttattttgcctctctttaacccctatgtatcccatattttggaatcacatcctattcactttattttctaagtttatctgacattggtcatcttttgtcagctgtatcaattttccatcttgtccaggccactgtggtctgccctttggacttctccagtgtgcttcttggtggtctccctaattctttgttctcacactccgttctctacccagacactggagtgagctttcgtaaacatagtgtcaatgtactctattgaatttctgaggactgacataactgttagcaccacaaactgggtgacttaaaaacagcagaaagttgttttctctcagttctgggggccaggagtctgaaagcaagctgctggaagtggtgggctccctacgaaacctctaggggagaatcctttgttgttctgccattaattcttaaccttccttgacttgtagatgtgtcactccaatctctgcctccaccttcacatggcttttttcctttcttcaaacactctaatatcaaccagccatggtggctcacacctgtaatcccagcactttgggaggctgagatgggaggatcacttgagctcaggagtcggagcccagcctgggcaacatagtgagaccttgtctctacaaaaaacatgtaaaaattagctggctgttgtgttgcacacctgtagtccaagctactgaggaggctagggtgggaggatcacttgagcccaggagtttgaatctgcagtgagctatgattgcaccactgcactccaggctggtcaacagagggagaccactgtctctacaaaaaaacagtttaaaaaacaaaattaaccaggggtggtggtacacatctggagtcctagctactcaggaggctgaggtaagaggatcgcttgagcccaggaagtcgaggctgcagtgagctatgattgcaccactacactccagcctgggcaacagagcaagaccctgtctcaaacaaacaaacaaacaaacagaacaaaaaaccactccaatatcttctcatccactgaaaatacaatgtgaagtctgcaccccagctgtacagttttctcctcctctcttcctggcttttcctgggtcccccaaccccttcatcttgttcccacctcagagtctttgtgttagaaactcatccttccatctcatctttggatggattttatctttcactcatatgttgcctttgtaaggtctccctggaccaccaaatcaaaagtccttgtctctcccaccactttattctaattgctcgcatctctgataacttacctgtttattattttatttgctcatagtccttctcccatggaagctggaatctgggctgcctcatttaccactgtgtcctagtgccttgagtaaccatggagtaggcattcaataagaacttactgaatgagtagggatatggtttggctgtgtccccatcaaaatctcatcttgaattgtagctcccataatccccacatgtcatgggaggcacctggtcagaggtaattgaatcatgggggcgggtctttcctgtgctgttctcgtgataatgaataagtctcatgagatctgatggttttataaagggcagttccccttcacacactctcttgcctgatgccatgtaagacatgcctttgcttctccctcacctcccgccatgattttgaggccccctagccatgtggaactgtgagtccattaaaacttgttctttataaattacctagtctcagatatttcttcatagaagtatgaaaatggactaatacaaatagtgaacacttctcagatttctcttccttctgtctccttctctccctatttcttccctttctcctaaaatatcccttagatgggaccagaataacttccttaagattttcttttagttgagtttagagttgtttgccttttcctcatactacaagatttccttattctcagaacagaacagttaaactcatatgtctggcttcatttccatccctctcccaagtcaaggtcaccctgaaggaggctcttcctccctccctttttctctgcctacaggcaagtaataaatgtcaatggaatggataaattaactctatagatggcttctgcagaagtgtgggggtgggggatcatattttccagagtgttcaagaatatatacttttttttcatgtgcagagaaatgcttttaaaattccctgatggctgcatggaaggcactgctcttcaggcattttttccttaccttaaggccaaattccaaacacgtggcttgagtccatgtcacttatgagttgcttcttacagtcactgattttgacatctcttcctgtcattcaataacacagctttctgagagcaattgatacttttattgtgagagaaaaatagtagcaactgactctggtagattattacaaggtagttatgttcaaatgatgttggcaaacattgtcattggcttcccaagagtaggcaaagctgcctcttcatgctagtgtcagtatttagtcctccagcaggtatccacagccttttaacctttgaaagatcacatcagtctcatttatgtgttcatgcatttggtttaattttactggcatgcatttatatattgattctatagaacatgccaggcacagggctagctgatagggtataaaggcaaagaataaagggtctccgactgctactaatttacattctactagaagctagtagcttaaattctactaaaagacagaatgcctctaaattctactagtttttaggatagatatataagagaccacttcagtgtaatgtactggtaagggaactgttaaagaatggtaaaggcagttagcccaacttgggaattcagagaaccttccaggaggagctgacattttgcaggttgacgttttgcattgttggctaggagaggacaggtgggaagtacacagtaggcaggtgtgaaatacttatggggagcgaaaaagcagctcagtatttctagggatgaaaatgtagctgggcgcagtggcttatacctgtaatttcatcactttgggaggccaaggcagaaggatcgcttgagcccaggagttcgagaccagtctgggcagcatagttagaccccatctctaaaaaacagatttaaaaattagtcagatgtgatggcatgtgcttgcagtccagctactccagaggcttgagatgggaggatcagtggagcctgggaggtggaggctgcagtgagacttgattgcaccactgcactccagcctgggtaacaaagtgagatcctgtctcaaaaaaaaagtgtgagcaaggactgacagtgtcaggtgatggagacttggtatcatgtccgggcattgagctctgccttgtgggttatctgagctgggagtagggaccagacagatgggttaacattagtgaacaccctgaaaatggaagggccatttggaatgattgggactgtccactttagcagaaaatgcaactgctggatcaccactgtctcaggcattgccgtaggcagagtgatttgattgcattggcttcagttgacaaaatgtatgaccttaatactacacagttaaatgtggcagagcttgcacctgttgttgaaaaagtcacatggacaggcaggagattgtgatcccgtaatgggaggcttgaatttctcacttttgagatgggcaagattgaagttgtgtggtcaagcgtgctctgcaggagagaaaggttgggattccgggacagcaaagaggtgggaaagtgagaaggatgtggccacggtgggtaactgggctctgtgagggcagggagtgggcatagctcatgcttatgggctcattttctttgatgacatgcagggagagtttctcttttgatagtcaaaggtcaagctgtttagtatatgactggtggagaaaattttaggaatgcaatgtattagggaaatgaaacatttagcaaaatagagaccagaagaggttagacataggaatttgtaatcacattcacctataggcttctgtttttttcccacagtaatacgcttcattgattaattcattatttcatttatttcacaaaatatattgagtaccatctatttggaagggatttcactattactttagttgatttaacagtgcattagacagtttgttctcaaatactgttgatactgttggaatgagacatgcatagaattggttgtcatatgtcccataaacttgaacttgaaaaatactgtggaaattgaaagttgaaaaataatatgtgatcatagaaggcttaatgaaatcggagaggcttgttatctaggcttttaaggagctttgtaaatgatttgggtgtgggggctgtattagtcagggttctctggaggaacaggactaataggatagatgtctatatgaaagggagtttattaggagaattgactcacacaatcacaaggtgaagtcccacaatgggctgtctgcaagctgaggagccagaaagccagtccgagttccaaaacctcaaaagtagggaagctgatgatagtgcagcctttggtctgtggtcgaaggtccgagagcccctggcaaatcactggtgtaagcccaggaatccaaaacctgaagaacttggagtctgatattcaaggacaggaagcatccagcatgggagaaagatgtaggctggaagactcagccagtctagtccttccacgttcttctgcctgctttatcctagctacatgggcagctgatgagatggtgcccacccagattgagggtgggtctgcctctcccagcccactgactcaaatgttaatctcttttggcaacaccttcacagacacagccaggaacaatactttacatccttcaatccaatcaagttgacactcaatattaaccatcccagggtcaaatcctagcagagcaaccatcaagagggagcagcagaactttccggagagcagaggatgagctgttgaccaggacattttcgtgggactcagctcaaccaaggtgtgatgttggaaaggtggaccccagtcaggacatggttagcttcgcattccagagtaagatgtattttttagtttttcattcttgcagacaatattaagtatgagttcaattaagtgacaagaaaaatgttagtagaagttgctgtgacacttccccccgatgctgaaggatttaatattatggagtaaggtccaagttggtgtgctcaccccaccccaaaaaatcaaaatttagtaaattagaacaggactggcctagctgtagcatgtgggcctaatgcaaaccagcccttgattttctaaataaagttttattgaaacccagctgtgctcatttgtggatgtctcattcctggctgcttcttaattacaacagcagagttgagtagttgagaaagccacccaaagagcctgaaatatttactacctggctctttagagaaaaagtttgccaacccttgacttagattccttagcagttggatgtattgcttgatgagtcattcttaatcatttgacctgtgtcaattaattttaaggatattcttcaattcttgacatgttatttaggaactgatatcaccaggttccttatttttgccttcataatagatgggtaatacgttggtggaacctgaaaaatattgttatatttcccatctgcaattcatgggttttagtctttggcatgaataaatcaaggagagtataaaatgtagcatcttgggtgagaaaacatttcccgtgaattatcatcacacacttcaacggggtttgcctcaattcagagaattagtgttatctcagatgggaagatttgaggagaaaaatgaaaaacaatatttcataaaactctgcccagatcaagcataagaatgactagcatatgctcttgccattaaaagtgatttgacctgctgtgtggtagcattcagaaggacaaaaatagaagcctggtttgcaaacagctgtttctaacaagagtctttgagtaaattgtagaagaatcctcgctacgcttgcctagagagattgagtaactcagccatcatccttctgtgatgagaacatcatcacaacatgccatcaagatgttaaaactgtgaattggacaattactctacaaaaagttaaacttagaccatggctttttctctgctcataaattttcagaaaaaatagttcatactccttcacctgtttttttttttctttcccccatatcccattctccaactttcctaagtttatttctccttcaaaacccaagtcaaaatctattggcacagggcaggtttgcccaggtaaaagacatttctttttattttggttggtgtttaatcagagttatctgtgggcatatcttttggtttgtttgtttgtttgtttgtttgtttgtttaaggcagcgtttcactttgtcacccaggctagggtgcagtggcgtgatcacagctcactatggcctcaacctcccaggcttacccaatcctcctgcctcagcctcccatgtagctgggactagaggcatgcaccaccatgcttggcttttttatttcttattttttgtagactgggtctcactgtgttgcccagcctggtctcaaaccccgacctcaagtgatcctcctacctcagtctcccaaagtgttgggattacaggtgtgagccactgtgcctggcctgtggatatatctgagctgtcttttgagacctttaatttctgtagggcaaggtccctcttcactgtgttctctctgggattctgttggcatacaatcagagttctcagtgggtattatctgagctatcttttgaggctgtgagtttctgtagggcgtaatctccattgtatatctttgtgtcccatttggggatgtgaaaatcagtaaagcctagcatttggcaggacaggttctagaactatacctaataccatcaattactggctgtgtaacctttgccaaagttttcttggctgtgaaatgggttacttgccttgcagagtcatggtgagaatcaagagttaataaagtcacgagtttgaatggtttggggaacatgtgaaactccatcattagtcctgatcatagcaagtcattgcttattaaatgtctgctgaatgaatgaagcatcccgtgtccaccctctgagttcctctaaactctgctcgatgataatgtgagtggtgcccgggagagcagatttcggtgctttttcagcctgacagacacatttggcgcatctcgctttccacacaatatcgcaggaggaaggagactcaaagctacaccatctgacaagcaagggcacttgctcatcaacacatgcctgcaaatgtgtgatcatgcttcctccaacatgtttttccataggcagtgtgtgctcggatgtgtttatcatctgttaaaaaaattttaaaacatttttttgccatgactgttgtaaaaactctccctttatagctttagaaaattgcacaagattatgtttatggatacatttctttaggacctgaatatagactcagaactattaatacaagatgggaatctcgtgatgttccacatagtgggttcagagcttccaacagagcgtttctcgggtgtgacaatttgttaacactagctgcagatgaaaccatgcctggtgctaccattcaggtggtcagtaggtggctagatctaggggctacaggcacagctgcccccatagtccagtgcctgcaatagaggtgctctgtgcatcttacctgagcaggggtaagctacttctttgcacccaagcagaagtattgccaccaggtggccatttgtggcttggagctcctttgggaatctggaatctctggcaggctgtgatatttccagggcctctgcaggagatttgttttattttgctttgttttcaaagtggttatacatcaagccatgttctcataagatgtctcttccatcacctggagttctgggatattagcaaattcctcagaggggaatagatcactggcacttgggttgtaaaatacacagacattggatgtgcctgtggatttttgtgaaactatgtgctttgttttctgttttttaagacatgacgtctctctctgtcacccaggctggagtgcagggacacaatcatagctcactgcagcctcaaactcccagtttcaagcagtcctcccccctgagtagctgggactacaggtgtgtgccaccacacctggctatttttttaattattattaatatttttttgtagagatggcatctcaccatggtgccaagactggtcttgaactcctggtctcaagcatctcacctgcctaggcctctcaaagtgctggaattacagacatgagccactgcacccagccactatctgctgtttaagggccatgtttttcagccactctgtcaagtggctctacagccaggtgcatcccttggcttcccctggtgagcccctagtaaaccatcctcagacattgcctttcaccctaaagatgatgtacagatcaactcctgggagggtacgaaattcgctcggtgcctcagtccttaattctactgttcacatgtatctttctgagtttctacatagggtgtagaaactaaatgtggtttacaaatatggtgtgatcctcttctttcaggacatagacaacttggcaccagtgctcttgctgcaaagataaagtgatattggagaactgtttaaattcacaggctttggagtcagtcagacaaacctggatttctatctgtaactctaccgcttactaaataagtgacagtcagcacataactgaagttctctcagcctcagattgtgcaactattttatatatatatatttttatatgtatatttatatatatattttatatatatgtatatatatttatatatatatttttatatatatatttatatatatttatatatatatttatatattatatatatttatatatatattttatatatattttatatatagttatatatattttttgtattttatataagtattattttatatatatttttattatatatttatatattttttattatatatattttattttatatatatataaaatattaaaatgttatgaatgagtttagattgatggagaattacaaaggtagtacagaggtatatttttcacccagctatctgcaatcttaccatcctacacaactatggtgtatttgtcaaaattaaccttcacatgttaccagctttcccattaatgccctttctctgtttcagaatcaatacacaatgccacgttacatctagaagattaacttttagagggtgctttttcctgatttaatagtttggtttttgttcctgtttatttatgctgttttatttaaaacaagggggcaatatgtgtatatctaaaccattaatgaaatcagcccttttttgttgtatagcgatcacttattttgttgttaaatttaaagtgaagatggtgtgagtttgatcgagtagcaggataagcaggtgaaaattttatgagtttgatggaacagaaggaaaactagacagtaattcacacgttgagattcctcccaaagatctgctttcaactgcttgaatgaactacggcaaagtagttaaacttcccatttgttggctgtgatgtctgtgaagcaggaatcacagtatctgtcagagaattaccttcaagtgatgttgaaaggataaaataaggggaagagttttaactttcttaggaggccatcacagaaactacaaagtatgatgtgaacttccataggaatctcccctaagtgactgtgcatatagaatgtctgaatatctgcaaaggtcagagcctgctgaggagactacagtcttcagctgtaagaaatgagcttttaactattcacaatagcaaagacatggagtcaaccaaaatacccatcaacagtggactagataaagaaaatgtggtacatacacaccatggaatactatgcagccataaaaaagaatgagatcctgtcctttgcagcaacatagatggagctggaggccactatcctaaaagaattaatgcacgaacctaaaaccaaattctgcatgttctcacttataagtgggagctaaacattgagtaaacatggacacaatgaagggaacaacagactctggggcctacttgagagtggagggaaagaggaggagggagaggattgaaaaactaaatatcaggtactatgctgattagctgtgtgatgagataatctgcacaccaaactcccaagccatgcagattacctatataacaaacctgcacatgtacccctgaacctaaaataaataaaagtaaatacataaacaaatacatacatagataaataatgtaacatctgaaaaacacactagagcagagtgcaataaaaggaggcattcctgtaaaggttagaaaaacaaagagaaagagatgagcttttaacaatggaaatttgcttcaggacccctgaaacctctgtttctagtaatttacttcctaaatataagtggcatttatttccagttgactcacacatgatattcctgcaaggaatgagcattttttcattggcttcgttctcacttaactgtctatttaatgcttcacaccaattgtttaaaacagcctcttttttgagtagctgaacttcaactccactccctttgtccccagcctaaattcctgacggctacttcagtgccccttagccctatgctgtctttgtcatgaagggtgaggaagcagtgtttattcccccagcgatgggtcacctgcccagctggagtgacctcagccctggcctgtctgagccctatactggagcacttggtctccatccctcaacgggaggtgttggtcatataggggccacaggaaaactgcccctttgccctctgaaggtttgctaaaaatcagctgacaaaggcaactgagaaaaggcacacaaatttattcacgtgcgtggagccttacaaaatagatctcaaagaaatggctggatggttgatgcttttacaccatcttgaggttacagaaagaatggggccttgcctcctggcaacacaggttaggagaggggagaagaggacgcctggctagcagaggtggtcttgttatgcagatgagacctcctgtgtagcagtccacagagagaagagatggtgaatgtttcttgcagacctttaaaggtatgtgtctctcagttcatctttcctggatcggacaacggaggccttcagagaaagcctggctgcctcaatgcagattctctctctctctctctttttcttttctgagacagatgctcactctgttacacaggctagagtgcactggtgagatcttggctcactgcaacctccacctcccgggttcaagcaattctcgtgcctcatcctcccaagtagctgggattataggcgtgcgccaccacgcctggctaatttttgtatttttagtagagacatgatttcaccatgttggccaggttggtcttcaactgctgacctcaggtgatccacccgtcttggcctcctaaagtgctgggattacaggtgtgagccattatgcccagccagattttctctatagattcaaacctcctctacaaaagacagttttgcagggctgcttctgtttgcagaccctgtgaacatccatctcaaaatatgtcaaagaagagtattttggggtgaaatattttggttccttcagtgaccatcttctgagattatctgctgacattctgatccactctgaactcacccttcctgcctctgccggtaccctttcgatgctgtatttaattatattctaattgcttcataggcaccaagcctgtttcctcaactctcctggttaagagccatcctggtaataaaataataccaacgaagataatagccattttttgtgcctctcttgcaggcactgagcttggcagttgggataatcattccatgtaataatcacgtggaaacatagtgggaatatgagatacagaaagctgaagctattttctcaagtgcaaagggctggtgtatctgtttcctatgtccgttgtaatcattgaccacaaatttagtggctcaaaacaacatgttttttttttttaatttttagattcagtgggtacgtgtgctggtgtgttacatgggtatattgcattatgctgaggtttggggttctaatgatcctgtcatccaagtagtgaacatagtacctgatagtttttcactccttgacctcctccctctttcccccctagtagttcccagtgtctactgttgccaactttatgtttatgagtactgaatgtttagctcccacttataagtaagaacatgcagtgtttgattttctgttcctgcattaattcacttaggataatggcctctagctataccatgttgctacaaaggacaatattttgttcttttttatggctgtgtagtattccatgatgtatatgtgccacattttctttatccaatccctgtcgatgggcacctggattaatttcatgtctgctattgtgaatagtgcagcaatgaacatacaggtaaaggtatctttttggtagaataatttattttcctttgggaataaccatgaattaaatgggtcctcaaggtgttggcagggctatgtttcttgctgaaagctctaggggagaatcttattccttgccttatccaacttctagagcctgcctgcattcctgggcttggggtgcccttctctgcctttaaagtcagcagcatagcatcttccagcctctctctgtgattacacccctccacttctctgactccctctttcccttgaaagaaccctgtctacaaaaagagtcagactctgtaaaacgtttgaagagattcattctgagccaagttgacacagccccgggagatcctaagaatatgtacctaagttgttctggctacagcttgatttatacattttagggagacatacagcattagtcaatatatgtaagatgtacattgttcagtctggaaaggtagcatgagtcaaaatcggggggtggggggtgaggaggcttcaggtcataggtggactcaaagaatttctgattggcagttggttgaaagagttgatttaaagacctgcagtcaatagaagggagtgtctgggttaaaataagggggttgtggaggccaaggttcttatgatgcagatgaaacctccacgtagcaggcttcagagagaacagattgtacgtgtttcttatcagactttaaaagataccagactcttggtcagttctctcccggatcagggagaagaccccaaaagagaaggagattgtctacagaatgtagattttctgcacaagagacagctttgtggggctattttgaaatatgtcaaataaatatattttggggtaaactacttcaatttctatcagggcctgctatctgtcgtgttggtatcttatggctacaaacagtctgttttgtcagtcttaaggtctgtgttttaatgctaatgctggtcagttgtacctgaattccaaaagaaggagggtaaaatgaggcatgtccaatcccctgtttccatcatggactgaactagtgtttcaggttaaacctttagaatgccctttgctgagaggaggtgtctattctgttagtcgaggggcttagaattttatttttggtttacaaccctatgattatattagatccactcagacaatgcagggtaatctcctcatctcaaaatccttagtcacatgtttaaagtcccttttgccatataaggcaaaatacccatttccccaggctccaggctccaggaatttggatgcggacacttgggggcaccattattttgcctgccacagctggtgtaaagtagaaatggaacttgaattccctgactccagagtcattgatttgaatctttggtgactcaaatctttgttgcgttgagtccctctgattacaaagtttttgttcaagatgccatacagtgctgaccatgtcacatatggtggtgactgtatcatatatattccttttttcaatacaacatatactatattgctcatggaatactcatagatggaatctatgtaattagagcagttggttcttctacattgagcacgaaagagtccattgaagtgagcattgaaaggattgaaatctccctgttgcctcttacctcttttttgatcttttaggaggaaaagcaaacaactgggaaggaggtatccgggttccaggcatccttcgttggcccagggtgatacaggctggccagaagattgatgagcccactagcaacatggacatatttcctacagtagccaagctggctggagctcccttgcctgaggacaggtactctgatgccagggtggttggtattgttgagctctgatttcacagcccagtatgctctggtttgcctgcataatggtgtggggaccaaggcctttggccccctggagttttcctgaaaatcacaggtttgaggcaggtcaattaataggataaaaggcatatacatttacttaatgtgtacacagcaggcttccaaaggaagacccaaagatacaggggaaattgttcatttttttgctgtggttcagcaaagtatgggcagtgtgtagaagtaggattggagggaaaggtctgacctcatgctaacggactgagtggggaaacccagccaggcctgtctatctagatgcttcttggcctctctgagcagttttccttccttctgggcatggggcagggccctctctggaacgggggtcttatgacctacagtcaaacaaagtaggtcagaggatttatttatgggcagtttttacacagaaaggcagggggaaagttggagtcatatttttaggtttgatgctggctttggggatcaggggttttggttcttacgacctgcattggggaagagggattctagtttctctggcgccttggggtagagtgggactgagagacaggagggcaggagaaagtcagaggaaaactgcactgaggccactgctgaggccctcggtttggagtgtcacgatgcctccagctgtacttgttatctctgtccggtctggggccttactggtgggtttgccaatgtaaaaacccctctgccaatctctttatccagagggaaataaactcagaggcactgaaggtttttagtgaccaggaatgtggacgggtggtgtttaattcagccttggtctttcggcatcgtgctgacgctcttctcgtctgttcaccccaccgtagcttgccattgtgcagcttggccacaacctctttgacctccaactttgggatcccacaccttttcctttgtccacactcagcagccctttgctgtaacagggagaaatgcagccgggtccccagctaaggccccatttcccagcacgtcttcactgagaagttctaaatgaaatgtctttctcttaaatttaaatacgacttcatatgacattgccagtggtttcttcctaagtgttattaccaatctgaagagttttaagtgaagcacactgattaattgttttcattagtttggtgacagaccaggcgaatgtcacgcaggcggctgcaaatcttgtttaaattcagctgtaatgagaaggaagaggaaaggggaaaggaaagacaaaaacagccacgctgccaaagcaagtccagagatgggtttcctcccctcccgctgtattcgaccttgtttccttactggtttcaactctgctttaggtatacacccttcctcaacacacacacagacacacacaccaatgagaaatgcagcgttgacagttcaactattctcaaactttgaggtctcaaaaccccttttcattcttccatgatcgaggaccccagtgatcttttcctgatgtggattgtattgagcgacgcttattatattagtaataaaaaatgaaattttttaaggcaccaaagtactccaagctcacattccattggctaatacatcgatgatgtcatcatttaccctgtggccacaaggaatgtccattgtacactcctaaaaaggtgatagtgagaaagacaaagagtgccttcctattgttataaaaataacattggcctcgcagacctcctgaaagggtcccagagagtctctggatcacgctttgagactagtgggtgctatggctaagagtggagattctagacctttctagacctgcactggttgaattcatattctttttttttttcttttttttttttgagatgggggtttcactctgtcacccaggctggagtgcagtggcgcgatctcagctcactgcaacctgcgactcccaagctcaagcgatcctcccaccccagcctcccgagtagttgggaccacaagcatgcaccaccacgcccagttaattttttgtatttttggtagtgacagggtttcaccatgttgccaaagctggtcttgaagtcttgagctcaagaaatcctcctgcctcgacctcccaaagtgctgggattacaggcttgagccactgagcccagctgagttcatattcttgtcatcactgcagggtaagcgttgaactttcctgggccttcactccttctctggaaaataagttcaataataacactgactttacaggatcaataggaggattaaaaacctccttgcctgtaatgttcagtacaaagaaggcatgaatgtttgccatttcttgttttgcctatcattttgaggtagtagtcagatgtacattattagtacagttctttcctcttccacatttaatattcatccgaggtcataaaatcatagagtatgaggccaaaaggggaattgtaagatctcctactccagtcaaactattcttttttaacactctagtgatggaaaacatggcagcagtgtctcagaaagtttttcctatataaagccaaaaatcccattctctatttcacctcctccttggctgtagttcttacctttggaataaaggttaatacttcctcaagtagctagaacagagtgttcagccaatctcatttattacgtttgtctctcatcacccataatgttaaaaccatcactgctcttcactttcataatatcttggaatggttttctacccagtgggggaaaagcaaggtaaggaaaaagttcagaggcaaagaggaagattcataaagggaaatcttactgcttctaccttctagccactctagtctgaggctgatggaggccaatctgtgtttcttctatgtgctcaatgaagaagataacagcctccctcttagaagacccaaggattttgtgtgtgggtttgtgtcatcagtagaaccaactctcaatattgaagattcccctctgtttctgattcctttcatggacctcagaggtgcttgctgacctcatttttttttttttttttgagcagagtcttgctcatttgcccaggctagagtgcagtggtgcaatctcggctcactgcaacctctgcctccacctcccaggctcaagcgattctcctgccttagcctcctgagtagctgggactacaggcgtgcaccaccatgcttggctaattttttgcattgttaatagagacggggtttcactatgttggccaggctggtctcaaactcctgacctcagctgatccgcctgcctcagcctctcaaagtgctgggaatacaggtgcgcaccatcacgcccagctaatttttgtatttttagtagagatggggtttcaccatgttggccaggctggtcttgaactcctgacctcaggtgatccacccacctcggcctcccagagtgttgggattacaggcatgagccacgacgcccggccagttgacctggttttaaaccacagatgttgcttctgtgttgaggtcctagctcctggtactagtccagctgtaaaatgcctttgtcatcctagagacagcacaggttagaaaacagaaatgtgcttccaagtgccttatgggaatagaattatcacacagtaccttatttaaagcatattgccaaccaggtacagtaatattcttatgtatttgtccagaagactttgaatatctaaagtagtgttttcccccaggggtcacttatcaatgcctggagacattttttattgtcttggctcagggtgctactaaacatcctgcaacacacagcacagagccctactgcaatgattatcttacccattatgtcagcggtgctgacgtcgagaaatcctaccctgaaatttattattgctcttttatggaaaatgttgttataatggaaaatcccatcaaaacttttcaataaaagcatctagacaataccctcacatctatatccatctataaatgtgatacacagatgtctgccctttagaaaatagtcttaactccttcctgctcagagtggtgcaaataagctttctcagctccctgctagagagatattaaatttgcatttctcaggagaagaaactcattcagacggttggacccaagctgtttgatgagcacttaacaaagtgcctttgcttctttctgcgttttgtttgaagaagataacttctgttcagcagacctccattcttcacgcactgtcctgtaattctcaggaagcattttggatctagtgggagtccttcatggccaatcaaagcatggtgggagatcagaagcccgtggatccaaggtttctacttaagccaaaagaaaggtagtccggaggaacacaggaaagattgttgttgttgttgttgttgttctgtttttgttttgcagcatcttaacactgcagtgagaataattctctaattcaaccctatgatgtgcttacgtgagatttctctctggcagtgaatttttccttcatatgcacgttagtgattcattttcattcagtggcatgacttatcagaagaaatttcagtgtccatcaccctgggcatattcagaaaaattatttccctccaggtctccaaataagctgattttggaaataaatggaggacaaccttttgtgttacaaaaggcagcaacaaggacttacaaaaaagaagaatcgaatatctaaatgtattaattcattaacatgaaaattctttctgtgggtctcatctttgcaagcagatacaatattgccatagtatgagtatgaccatgccccttcctaacaaggtattaacatcagtaatagagaatggcaacaagccatagttggttacaccttttggaaaacatcaacattttaaccatagacccttcagctgggatgcaaggaaacagagtgctggcaacctcaagaatcaaattttagaggtgaaatatttagagcttgtggtccataattaaaacaaaatttgacttcattttttaaagttacaaaaacaaattaatgctttaatgcttaacacacttttgtctaatggagacaaggaatggatttagctgacttctcccagtaacttttgctgacttacagttgagccactagagaagaccttttcaatagagtgatacagatgaaaaagtcagtgagctgtatctgctttacattagttttgcagaactaaaggtgactctcttcatgggaacaatcccaagtttgtgtgtgtaaccacttatactgatcttgctttctgttcaactatggcagagggtttaatgtttacaaatggaaacatatttttctgaattgtgataataactttctgaatacttaagattccctttaatttattacagatatatgtactttctcctaaagatgtttccttaactatgactgtctacattgaaatcattgccatttgtatatcaaataagctgctcaccaacattgtgccccaaataagcttctctgttagtctccaagaccttaccttctgtatcaccccaaaccttttctttctcttatgatccttcagtccttggcctggcaatttggccaggcaaagggcgcgtgggaaggacatcccacgtggagggacgaggatgttgaaagcctcagagctgagagagagcacagcacattcttggaggaatgacgtcaatagggttcagggaaggtttccagaacatgccctttttaattatgtaaaaattgtctgtatggtatttaacttgacctgaaattttgacacaagggtaccttgcaaacaacctgttaatagcgctaccatcattgtcagtcaggaacccaaggagaataatttcaccttccaaattaaaaacactcccaaacactcccttttccaccaagagccatgagggcactagggcagaaaacacattcagttttttttagcattggctgttatgcaaacatgctacaaaaacttgaattagtttgcaagaaaaatcccgttagactgtttccagagaaaacagcaatgctttgagtcactttgaaagtggattggcccatctcccccagaacacgacattctaaaagcatttttgtactagcagcgttaatggaaatgtgctgttctctgggttattgccatagttaactgcgaatcccacaagtggtttaagacaatcccaaatatttcgatagcttagacaccacttaaaagtttagctcaacagggtcactttccatttttcatggcagaaatgaggcttcctttgacagaccatatttctgcagcactgttaaatggtggctttccatagcagcgtgatttatggcctgcctctaggaaggaccacgttaggtgtgggatattaaaaaaaaaaaaaaaaaaaagtctatctccactttggaagaaaaatagaaaaataagtttgcagaataaactttgtgcccctcctttaaaaaaacctcaaatatttcatttttaagtaagaaaaaataattataagacttggagtcttattttgttttagttaaatccccctttcctataatcatgatcaatttcagttatcaaatactgatcttggccaaggccggaggagagcttgaagccagaagttcaaggccagtctgggcaaatcgctccaaaaaaaaaaaatgaaaaatagctgggcatggtggcatgtacctgtagtcccatgtacttgggaggatgaggcaggaggatcgcttgagcccaggaggtcaaggctgcagtgagctatggtcgcgccaccacactccagcctggatgtcagagcaagaccttgtctctaaaaaaaaaaaaaaatcgaaaaatactgatcttaagacagcaattccatctctcatgttcttatatcacaatatcacatgatgaattttgttggcagatggaaaaaaaaaaaaaagccagattcaaaaagtaaaattctagcttgtgtcccagaaaatggggatttcatcttgcttttggggagtcattgaaagacattctccctgcttggggaaggatagaaatcctctgtccctcgtctctccccttcaggtcacttttcaccactgggggcttttcctggtctaattctcatgcctgcccacttcctctcttacttcttccttcctttcagctttatttgggatctcataaaggcctgagtctttcttgaaaggaatttgaaaagaaccacgcacaatgactgccatttcgggatggaaacagtatttcagggcacacgctgtgtctcaatagaactctctctacggtgtttctttttcttcccctcgtggttcacaggaaccttggtttgagaagtgagccaagccagtcttttgttcttatttttacttatgataatagaatattttcagtctgcagacttctgcagagtgcatgattaataacaagggttgagaccggagaagtgctaacaacaaggctataattacattataggtttttagtgacaacaaaataaaccatgggagaaagctcaagggacataggacctcttaagcacacttaccaaaattgtacagccacgccaaacttccagtttctaaacgccttgtaacaagagatggcagggatgtagtgtttttaatcagagaaagaaaatcctcaagttaaacactcaccctttcaaaataattatctgcctctcattttgatggcaatggcctaatggtatcatggcttcaatttctcatgtagctgttaatttatgtttaatgcaaaacacaattttataccttattcctttcttcaaactataagtaatcttattttgctcatcaccaactgcatatgtcttattttcttggcctagttagatacccagtagtagaggagatatattttcatttgggaataatccgttccctggttatttaatggtatcattattattatatatacattaattcattctaaggagaaatttgcattcattgcagtctacgaatccaagttgcctcatgcaatatagtatctttttattttaatcccaaattgtcaggtgcccatcttttcagcaggcctgtatgtcatgaataaagctttccctttgatcaggcaatagacagaaaattgtgttttggagaagcaagaggaagaataagggtatgaatgccagatcagctggatttcaatcccatcagttcttactcgtcccatgaccttgggcaaattacttaacctttctgtgcctctgttttctcatctgtgcagtggggatgacagtagttccagctcatggtgctctttgcagatgtaatgagataatgcacggacagagctgggatcagtgtgttgcacagggcacccaggtggggtcagtcttctttgtattaattacgactggagctccctcatgctcttattggttcagaaggacatttgagaacacaggactgattcacgtcttgatgcctggctgtttatcccacaggatcattgatggacgtgatctgatgcccctgcttgaaggaaaaagccaacgctccgatcatgagtttctcttccattactgcaacgcctacttaaatgctgtgcgctggcaccctcagaacagtgagtaaacagacctttccacgctcctcatgctccgtgcaacctatgccatgggaatagataaaactaaagggtaaaaaggtggctctgctcaatggaggccaacaggtgcctcaatgtgcgcccatgctttgctttgtcctcttttccctcctcctcctctcttttcgttctggtcacatagttgtccaggtaggaggacatcagaaggccatgtcattcacccacctgaacaccacccacagcttctctatcccagcagagaaagctccctgttctcaacagggcgctgtggccggttgctttattgcatgcacagctgcccagcttcacttcctagcactcctctcacactgaagaaagcagcccctgtgctctgtgcattgctgtgcttacacttgcaggctcttctcctggaaggatgtcttgcctcatccttcttggagggtactcctcaatgccccccaggccctgctgaaatgccacctcctctgcatgtcctcaaaacattcccctcactcttctagcaagccactaaaggctagagaaggaatgaagagcatttaaatgtttatctgacttactttcccagcctaaagatgatggatcgtgactcactgcatctgtattttgtgcgtcatgcatatttgctacatttagatatttaaagcaaagttaaaatgttcttcagttctatctcattttctgaactgggggttcttttaattgtgcaattgaacaggatatcttgtgggttttctaatacttgttttatagtggcatttccaattagcatacaggaacaaatggtttataatcttaggtgtggttgttgatttttatggctgcatagtattccatggtgtatatgtgccacattttcttaatccagtctatcattgttggacaattgggttggttccaagtctttgctagtgtgaatagtgccacaataaacatacttgtgcatgtgtctttatagcagcatggtttatattcctttgggtatatacccagtaatggtatggctggatcaaatggtatttctagttctagatccctgaggaatcgccacactgtcttccacaatggttgaactagtttacactcccaccaacagtgtaaaagtgttcctatttctccacatcctctccagcacctgttgtttcctgactttttaatgattgccattctaactgatgtgagatggtatctcattgtggttttgatttgcatttctctgatggccagtgataatgaacatttttttatgtgtctgttggctgcataaatgtcttcttttgagaagtgtctgttcatgtcctttgcccactttttgatggggttgtttgtttttttcttgtaaatgtgtttgagttctttgtagattctggatattagccctttgtcagatgagtagattgcaaaaattttctcccattctgtaggttgcctgttcactctgatggtagtttcttttgttgtgcagaagctctttagtttaattagatcccatttgtcaattttgtcttttgttgccattgcttttggtgttttagacgtgaagtccctgcccatgcctgtgtcctgaatggtattgcctaggttttcttctagggtttttatggttttaggtctaccatttaagtctttaatccatcttgaattgatttttgtataaggtgtaaggaagggatccagtttcagctttctccatatggctagccagttttcccagcaccatttgttaaatagggaatcctttccccatttcttgtttttgtcagatttgtcaaagatgagatagttatagttgtgtggtcttatttctgaggactctgttctgttccattggtctatgtctctgttttggtaccagtaccatgctgttttggttactgtagccttgtagtatagtttgaagtcaggtagcgtgaaacttagaattacagtaatattcctatcactaagatacctggcagtcaatggtaagtggtgagcaatttacacaattattgtatgttctagaggtacctgttgaggctggactttcagttccttctttggaggtaaaatgaaattccccttttctctaaggggctttggagctctgcttctagaacctaggactgccccccccacccgccccaaaggaggggtgtgtaataacctcctaggtgctaacttcttcttaaacttagggtgattccattccattttccaacaaatctttgtctcttccccactcacctagccaatttacccaagacttatcatttaaagaaaagcctctcttttatttttacaacttttccataaaattacaacctttctattagccacagaaatcacaccaggtttatgcttcagagtttctcctttaagtctggcagttttctcatgatatgttctagaagacaaaaaaacaacagaaacatgggcttgcgattttacttctggaagcattttattcacatatctcatccatgtggccacaattcctagtttccataagaatactccttcttttttagatcagtttatagcatcaacttctgagctttgtaataaatgagagctcaaggactcttaatttcttttcatatggagccggcaagaaatgtgaagaacaaagtttctgtgactactgcatgttcgaataagtctgtatcatgtcctgaaccttgcaaaattgtattttaatagagccaaatccccagttagagaagcgggaaggaacatattggatcagaggctggaggaacacattatgtggaggagtaaagagaaaggggacaggaagagacagaaaataggagtgagaaaaacaagacccagtttctgataggcaactggccccgggataaaatttgcttcttagactctgaatgcaattccttcaactcttctgccttgaactggtaacaaaaaaaggagaaatcacagtatctgaaggctagaatcatttatcgagataaaggacctcaggaaaacaagacgtttatgaatcatttatgatttatttttcagatgctatctgaaactcagcaaccatatttgctgtcttggcttttgtgtatggcttcatgtttagtcattttgtattttatgtgttcatttttcctagaaatatgtattgagcacctactgtgtggaacatatcgtcttagcgctggcatctgtcagtgagcaaaacagacaaagttccctgctgaagagtagcttacattttagagcatgaggcactgctagctgtacaatgtgctgggaatacagggatgcgtaaggaaaacgtgactctcatccatatggagctttctgtcacctggggaagacagatcttaaactagtaatagttgagtgtgactgcataggtcatctcagatagactttggtaggagcttgccaataatcactagactgtggaacatattccatgaatcttagggataagagggttgtcgcctgacctcagaatactttattagaaaatagaaaaaaagaaatgtagtattagggtttagtagcaggcagtggtatgctggaatcagctcctgatcgttcagaaatcttgccagcttgttattaaaccattgtctgttttcatttggctgtgttgtgggtgtttacaccacggcaattggcaaacacaacaaatacaggttgcctttctccctcagagccctagattaacaacagtttgttggtatcagtagaactgactgcagatgtttttaagatgcagtttaccatttgtcttgattacttagaggattaaatgttataattccaaactcatgaaatactgattttcaaaaaacttaatgctaggatttcatttccacccttttaaaacatgaatctcttttaaaatttatatataatgtcttcgctataatttagttgtctcagtaaattgaatgacataatttaattatgacctgatatcattattcctattacattttataagaactcatgaaagcatgattataacatggataacttttcttgcactaaaataagaattttgagttaaaatttaacattcaatgggtatgaaaaattttggctttaatgtttgacatatgaattaatgttattaaaaattcaccacaatgacaacttgattttatggatggaattgatcttagagggtaggtggatacttggctccaggatttttaagctgatgactgtagtctgtgagataaatattcacattaatggagagtccccaaaccagctggtcataccaaaatccatgggatagctgtagatatattctagaatgcaatgcaatatagtacatagttaacagcttaaagcgttttgtacagacatatatggaatcttagcatcatgtagacaagaaagtcacatatatttaaaatgtcacactttagtcagaaacgggatctccatgaagctataaaaattacttaggggaacggggcaccaataccattatttccctaggagaaggatgtagacatcctcacattggactagcagagtttcataaatcctggctccatattctattcaagtttgttggaaactttttcccaacaacaaaaaataaataaataaagctttattttaaaaatgacaatactaggaacatttgaatgattctcttctagctattgtgaaatatacaatcaattaatgttaactggtgatggatatcccaatttccctgatttggttatatgagtgtttcaaatgatcacaggtaccctgaaaatacatacattgaatatgcatcaataaaaagtaaataattaaataaaattacagcaaacagccatagggtaatggaattcattccaaaggaatgtgttcctttccggctttctgaaagataccttcatttcaagctcagtaaatggtttaaaatcaaaaccagcttaccgtggtaacataaagaaaagtgctcgcatggctcactgtctagcattttcatttaattaaaaaattaattttgcctctaaaacacacctaataaaagagaagaaattctcataacagccacttatgagttaacagcatcagaaaggcagcacttggctttcatcatcactagtaattttggtgagtacttgtcagatgcccttcctcatctaatcctcagaattaggatctaaagtgtcagaaatgaaatatcgaaggctgaagctgacctaatgtgagatgcagcatttccaaatttaagctcaccaggatctatcctgtgtttcagctgaccttatgaaaggacatattttcatcctactctgtaactgttgtagcaattaagaaaaagcacatatatgtaaaccatttcaaggataacttttaagtcttaggatttattttctctgtgaacacttcaaatgctgcattgccacaagcttttaatagttcaggcatgcagctattatttcactcatgtgcctgtgaagcccagtacaaggtacaacatttgtacttgtaattgtagcaacacaggatgatggtgtcctgggatgaacagaatttgctttggagatctaggaaaaggagtgatttatgaggttagaaaagatttcatagaacttttaattttttattaaatttattttatatcattatcatctagacacatcagtaacagcttaacttcccctaacagtcatttccaacagtggaaaaaaatcaccacataaatagattttgtgttttccaacatagcctattaaacatatattttcttatggaacttcatattaccttatagacagtatcagacaatatttgagataaacgttcacttttcaaccaaagttgtagtatgtctgatctaagattacactaatactgtggaagaaaaattcctggtcattacttttgataatttgctacaatgcaaacttacttccttatagaaacaaagtaaatcaaaattgaattttctttcttgaatacaaaaaaaaaaaaaaaagcgccaaaaaacttggtgtggctgaatgatcaaatgccctcttccatctaagcttggcacccagcttattctgatctttttgccaggggtcacttctgatcttttccccttgcattctccgtcctaccgtttcattgattttctacagtattttacacatctcttttccctgacttcaacacggggtgtctctcagttctcccgaaatgtctgcttatgtctctaaccccccgccagatttgctttcatatgctctcagacctggtgttttctaaatagacattttagttctaaccagggcatgcaatatttagcaattttttgtgtcttccttactttcgtatcttctgtacaaaaatgttttgtaggtggttatagacgtttccgtttgttaatctcatgttcttgaaatttgtcatctctttttgtgatcattatgtatcttttgaagacgtgcttgatgacagtaaacactgatgtttgttgcatatttactgtctgcccgacagtttgtcaagaacattgtatttgatatctcattagaagagattatgattatattagtttcagatttggctgtaacaaaaaacaataaaaaaaaacagtagtttacattagagagaagtttatatctccatctcatgggtgacatccagaggcgaatggtctacaaaatctctggggtgcagaatctttcaagcggcttttccacctcctgtagaatgtgacagcttcatcttcatggtgaatgatggttgtgtctaccctaaacgcatacaatggcgggacggatgggaaagatgagaagaaaaaagtgcatggctactacttcccaaggaagatagtcagactcttctcagaggccagaagttggtcacctgttcacacctagcttcacaggaggctgcaaaggagagttttgttatgggtgttcatgtacccagaggaacactcaatgactgtgggaggctggcggatcagctagctatctctcctcccagtgttattttttcccaattatagatggggagacagagaggtagaaggtcgcattactggcatacagttgcaaagttgatggccaagttgggatttgcaaccaacaccatttgcttttgagtctgtctcccattaatcgaaatgtcttcccctaagacaatatgttcttttactcacaattataaatcatgattcctccacctaaccgtgtatctggacatctctgtgcccccatgcactgagtccacgattcatccacatcctcttattccccaaatgtggacatccttggcatcatcaggtctcatactccttccactggctccatgcctggtcctcgtcctctcagctgccctcctccctctccatgaatgttctttcctgggggccaaatgacttatgccccctgcacaattcctgatgactgcccatttttgacaccaagcaatcccaaagcaaatgtacttccaagctctctgccttcctcactccgttatctgccatgatcagacagtaatctccagtgcctcacagtagtctgttggtccttcaggctggagatggtgcagagccattgtgtgatttcaggcaggatgctccgggtaggtcccgaggggactgtggagtgtatttggcttcttgtctgctcaccctggatttcataatgacagctggttcctcccctctctttccatcccttcctcctaataaccatcatctctttttttttttaaatttatccaacaatttttttttttgagatggagttttgctcttgttgcccaggctgacatgcaatggcacgatctcggctcactgcaaactccacctccaggttcaagcgattctcctgtgccagcctcccgagtagctgggattacgggcgcccaccaccacgcccagctagtttttatatttttagtagagacggggtttcaccatgttggccaggctggtcttgaactcctgacctcaggtgatccaccccgcctcggcctcccaaagtgctgggattacaggtgagggccactgtgcctggccccaacaatttttattgggcctctattctatctaagatactaggcactacacatttaggagatgtgggagatatagtccctgccttcagagaggaaataatccagccagagaattggagacctcaagtgttgactgagtgatgaaaagtggtgagaggaacagaggaagactggtgacttccagctgggaattcagatgggtgcatggaggagaacacagcagggctttgaaggacagctagaatatcaatatggaggcaaggaagggaaagtgagggaagagtctcatatacatcctacacccactttgttccaggttatatatttctgtcccttaatatgcaaaacccaaggcttggtaaaagggagtattttgtcctcaaatactcaggcatcagttgggaaagcttgtgttgctctcaaattggctggctgtgaaacagatgcacccagccaccagagctgcttcctcatccttctcactgttgttgtatcgtgagctctggtactgccagctgcaggaagcaggcagaacttatctactgtcatcgattatatatcagccaagggctgaatagttagggggtttgtgctatggtaaacagatggcagtgaacctcaggggtcagaaacagagcttggggccaagatgcttttggtgagtgtgcatgtattaagttagaagacacatgatctatggaggctcaggtatggacacactgtaaaatctttgggtgtaagaaaagatttgaggcattagtgtggggtatctggatgagactagggtaatgtatggaacaattttttaggtggatcgcaggagtaggagggcaccatgagatgggttttcagacatcagttcagtggatgacattaacttttctgtaaacttactgagggggcaggcctagggttctttgtgtgggggttcctcacaatggaaaaatggaacagtatgtgaaatggttcttgaagaacttcaagatggcaacagaggtacatgctgccaagactgaaaacccaaaatatctgtgtataccttctatgatatatacatgcagtcttccaagcacccaaaataaatctcgccaaaactaccagttgaacatcattcatcaagggaagtttaaatctgagtgatacattaagagccactgtgttgaaaccatgtagatttattaatagttttccatatactttaagaatccttagcagaaaaaaaaatgtcttacgacatgtattacagtagcaacagattgaagggcagatggaaactgaattgtttcttgcgtaaattggctgcagctttctgttcacagctaactcatgtatagtctctactatagacccagcctccttctgacagcatcacatataggaaccaatttttaatcctcaaagcaatgctaccagggaagaactattattatgaacatttaacagaggagcagactgggacacagagaggtgagagcagctatgcccagcatcacgtatgtaagaaactgcagagctcggggttgaacctaaactattgatgctcagagctatgcccttaatcaagtcagtggcaggaaaaaccttggccgaagcacctgccctctagctagtgcgttctctctctctcttccccgcctaccgccagcaccccccgcccctcccgggactcctctgtctatgcaagtctcacatagcatcaggctaagaaaggcaaatgctcttttctaaagacattgctatcatcctagaacaagagagtcttcgggcccctggcaccaccccttctccatcatatttgtcctggaagagcacagcaactctacctgtctctgctttttctatactgcctatggatctttggtgcctttcctgtcctttagagctgttcattcattcatgcagtttatcaccacgccttgggacttgtgaggattgtctgtctcagtccagcttctggctcattttatcaaaaataaagtttgtcttattttatagcttagctctcagagggttcatgtgtagggagtggcgaatttgtgctatgataactattagccctgacatttcaggggctcagcccagcaaacatttattctcactcttgctgtagaacagagcttgtcaacctgggtactagtactattgacatctggggccagatcattctctgtgctggaggctgccctgtggattctagactgtggagcagcatccgtggcctctccctaccaggtatcagtagcaagtctgccccactgcagctatgaccacaaaatgtgtcttccgacacggccagaggttcaggagataactgtgttcagtgcctgtcatggtgggaaggtgggggtctaggaggagaaggttctgccatccatttgtcagggaccaccctgacagaggccccatcatctcgagtgtcaccagcagaagagacagctcctctgtgctgtggctgggaaaagacataccacatactgctcacgtttggccagaatgggccatgcggcctttctgacttcaaggaagctggaaggtgttctggagcgcttgaattactcagggtttattatccccaaaaaggaggtgtagtcttgtttttgtggcctcagagttccaggttgggggcaccttgctttagccgctgtgggttagaagcaggggccgtaagggcacactcacgttgtgtgatgcctctgagtgtctatcatgcgcgcagtgtctttacttgtgccgaacaggctttccagacctggttttgttttgtctcacgtgatggctctgagacttctgcaagacagcagtttaaacattcagagaggcctggaaatgagtgtcctggggtctggactgtgccgagctgtgttatggactgttgtgactgctctaagtagagaattcagaatgcaagatgtgagaggcttgcgtcactatgagaagccagaagcacttggggcccttgggataaagacagaatgaggccttcgaggacgttgttaaaatttgtaggcgatgtagcatgaccctgttcccggaccaaaccgagggtaggactgctatttctcgcagcccaacaaaaagatgcagatgaactggggagaaagagagtttttatttctgtaaccggttacagggagaaggcctggaaaatattgcccagaccaactcaaaattgcagttttccggagcttatatatcttctaagctattagtctatgtgtaagtgtgcattcatctaaagatataagtgatgaacttcttttaatctataaccaagatctgagtcctgaagaccttcctctggagccccagtaaattggcttaatctaaatgggtccaggtgctggggtgattacccttatcttgtctcctgctaaatcatggaggtttggggagttccttcagatctccagtaaacttgtttgtggaggtctggggagtttcttcagacccccagtaaaacttgtttaatcctaaacgagtcctgttaagaatccttcgttatcatgtcatgcttcaaggcccaggagaggcctgggcaaaactcctgatgggcttttgttccattccagcctttgtatgaggacactggctctttcagcttttaatagtaacttcaccactcggtcagtgccgaaacagatgtcatggaggcctgcgttagtgagacctggcctgccacaacccgactccaagacgttaagagggagcttgtgctagatactaatattgattttaaaaaatattttagtacataacgaaagttctggtttgcgccctctctatttttgttcttggggagcacatatgctcattttcggggcttccttgccagggctcccacttcctgtggctgagtcgctgtaatacgaagtaatagaaatcacaacgtctcttctgttccagggtcagaagcccctgtggtccccaggcaatcccagggaacccagatacctctttatttctctttgttcacagcttagtttatttttaataagatagctgttttaggatcctatgtggaggatgttgaatcagtttctggcttaggcatcaactttttctcacttcaattctatttgcctttttgtcaaatgacaataaactttcttctctcatgagttgagtcacattgtttagtggtgattttatataaaaatatgtttcaccagatgggtgatgatttcctaagcattttgttctagcacagtgacataacagtgctatatcatatgtcattgatatctttgaccatcacttgtgacaattcgttttcttaatttgggggaggatttttaaaatctcagtagaattattgtcctcaccactacttagactacttaaacaagtaaaaaaaaaaaaaaaaaaaaaactgtccactttaatttccctgcattctttataccaaatttaatcattccttttccaggtcattggatctcagttataaatgagtctaagttcccagtttggtcaaaatacttatcgttttcagtggtgagggagaaacagtcttttatcagagcagttgatgataatttttaaaatacagtagtgaataaacattttttaaaaatttaacatttttctagtatatgaggatactcaggatgaagtatgttatcaagataattttggaatacaggactaaatatacctatgaaaaatataagatgatgctgggcatggtggctcacacctgtaatcccagtgctttgggaggccaaggcaggaggattgcttgagcccaggagttcgagaccagcctgggcaacatggagacaccccatttctacaaaaaaatttaaaatatagctgggcctggtggcatacacctgtggtcccagctacttaggaggctgaggcaggaggattgcttgagcccaggagttcaagactatagtgagctatgatcataccactgcactccagcctgagtgataatgcaagaccctgtctctagaaaatacaaatcgaaaatataaattaaacaaaagaagatgactctgccaggtgccttctgttttatctagtgactgagctgtgctatttatctttgaaatgacacctttggagatgtcagttgctgggttcctggtgaataatagaacaagcttccaaagtcggggttgttaccttgtgagccactgtacaataaaaagtgcagttctagttctctcttttcagtaaatctaaagtggtccagagaaacagcacagagactaagcaatctacctttttatgaaaagtttttaaaaatccaaatgaaaggataaaaaggcaagcaaccccagagcatgctaaataattctttagaataattaattcttagttctacacttgtctgaactacccagcaacaccactgccattcccaggccggggtgcctgcatctcttgactgggcctgatgtcaatctgatcttccagctcacacctgaggaggattgtgctctagtagtaatgacaggatcatttgagtggctttcaaaagcaagtggaaaatacaggctctttacatgaatttattccaggagcctgtattctcctggggttttaaacacaaagaggcttgactcgaatgtcaagttcaaaacgccctctagatttgcatcattgggagcatgagcaagagaggcttcctggctcgcttctctgtgtacccactttctctctcggctgaccctgatgaaggattctaagtggctgcaaatggcaggctctgtcagcctgtctccaaaaaggcttctgaaggaaatttctcataccctggaagaaagtgtgggatgagacgagtggatgggaagcatcttaaggttacttgctgcctttttaaaccctgctggagatggtaaccaagtcctggaattcttcctgcagcctggcgtgtctgtgtgtcagcttgaccttatctttctgaagcaggtgcactgagcccatgtaaagtgcacagatgtcatgtcctgctctcgcagaatcagctatgccacagactgcagtcgtctcattatgaatcttctttaatatattaatctaaacgtattcacctcgctttccctgtctttctcagctttaaaaaaaacccacatacacaaagaggctgacttttaccatcactaaccttgtccaaggttaggggcgatttggggacaacacatgccctagtgactgttggtttaaaccgattgcattaatcagttttgcattttgatcagttgatcatgaaatgcctataattacaaaagtcacacatgccattatatgcacaaatgatcgggatgacttacacaggggtggagggcttcctaggaggaatgcctctttggttttatgtaaaagctgtaagggcattcacgttctgcacctgattctagtcggttcatgcattttaattctctgtttttatctgctacattttgcctacccatgaaacatgtttaggcctctcttagaaggtgtttgagagcagtcagctcctcagaaaatgataacattgtccgataagtaggaaatgaatcaattatttcataattattcatttgtttgtgaattagtttttcctagcaatttcaatattttggagtttattgaaatacagaacttacattttaaaaactaaccatcctattctggtgttgatgaattcccctaatttggaattcctagcagcttttaaaggtatacgttgcatgccattatattctaatttaaagatttttagaaaatgtatagagttgagcagtctactttcagaacatctccttcatcgccaaaagatcatttccattccccatttgtaatccctcctcaccatcacttctagcctcatttaattcttttttatttttgtttatttttgtgggtttgttttttgttttgttttgtttttttgagacggggtcttgctctgccacccaggctggagtgcagtggcatgatcatagctcactgcggtttcaactgcctaggttcacacaatcctcctgccttagcctctggagtagctgggactacagacacgtgccaccacacccagcttttttttttttttttttttaatttcttatagagatgggctttaactgtgttgcccaggctggtctcaaacccctacctaggctcaaggctcaagtgattcttccacctcggcctcccaaagtgctgatattacaagcatgagccgctgcactcggccctcatttaattcctttttttttttttttttttttttttttttttttttttgagacagagtctcattctgtcgcccaggctggagtgcagtggcacaatctcagctcactgcaaccaccacctcccaggttcaagtgattcttttgcctcagcttcctgagtagctgggattacagggacctgccacaacacctggctaatttttgtattttttagcagagacggggtttcgccatgttggccaggctggtctcgaactcctgacctcaagtggtctatctgtctcggcctcccaaagttcatttaattcttgattcgacattttttggactttctggaaactgagaaaataaactgttaactatggtcctaccaagtttgacgctgttcctgctggctgtgtgtgtgggcgtctatgtgtggcttcataatctttcctgtacatattaacattgtgtctgcagccttatgatatcttcaccttcttaaagcacatggcagcataatttccgcatcactttttcatttgtggtacatacaaggatgcttcatacctaatgccgtttccatccttttaaaccacaggcacatccatctggaaggcctttttcttcacccccaacttcaaccccgtgggttccaacggatgctttgccacacacgtgtgcttctgtttcgggagttatgtcacccatcacgacccacctttactctttgatatttccaaagatcccagagagagaaacccactaactccagcatccgagccccggttttatgaaatcctcaaagtcatgcaggaagctgcggacagacacacccagaccctgccagaggtgcccgatcagttttcatggaacaactttctttggaagccctggcttcagctgtgctgtccttccaccggcctgtcttgccagtgtgatagagaaaaacaggataagagactgagccgctagcagcgcctggggaccagacagacgcatgtggcaaagctcaccatcttcactacaaacacgcctgagagtggcactggggaaacataactccatctacaccttggatttggactgattctccattttatcacctgaaggcttgggccagagctcaacagctactcaactggaggggtgagggggataaggtctgtagtatacagacaggaagatggtaggtttatgccttctgtggccagagtcttggactcatggaaatagaatgaatagaggggcattcacaaggcacaccagtgcaagcagatgacaaaaaggtgcagaaggcaatcttaaaacagaaaggtgcaggaggtaccttaactcacccctcagcaaatacctatgtcaacagtataagttaccatttactctataatctgcagtgatgcaataaccagcataataaaaaggcaatcacataaaaaagagtttagtcgtctaaacataagtaactttaaggtgaatgaaagatcttctttaggaataatagatgatggtaagttccactttggttattggaaggcaagtcattattactggtattagttaaaacacatatcaaatgcttgctcttcatcatatatatagttatgcatacatacacacacacacatacagtatattctttcctcaaaagggttaagatgtctaaaatagggacctagaagcttaacactatttaagtaaatacagtagaagctcacaaatagatttctttgcacaatgattttttgcaaaattttacagtaataataatcccaaggcaaatctctcctgaactgctttccattccataatttgtagtataattcttggattccactgttttctttggggaatggaagttctgaattaaaagcccactgtggagatgctgtggttcatggaatctcttccagtgtaattcagaatcattggcctagaaagtctctgatatttggaggggaacaaaaatcactcacaagcaatccatgatctatacacataagcataatttcctttagttctagttagtcatcagagaacagtcatgtatgcaagttttgtgactgagaaatttctgtgcttccaatccacaatgagatgcatgattttgttttcatcccatttcccccaagcccctgtaaatcagggaaaatgcgcaactgatcgcctaggagagggcctcgtagtggcacagctggagatagtttcaaagtctaaaccaccagcccatcctgaggaaagcctcctatggaatgtaaagtgcaatcatttcttcagatataagactttccccaacaatgtgattggattcctttatggcaaaatcgagagaagctgccatccacctgcttatgcatttatctcttttgtggacttgtctgaccaccttctatttgcccagagtttgctcaattccaagacagtgcccatgaatgggacacctgtaatgtaacccacacagcggtttgcagagaatgttagccatgacttgggctttctgaaagttggctataatttctctatccctacccacaaccctgggaagttggagcaagaggggcatactattgggctgggaggatttgacagcatttccccagttgccctttaagttcttctatttcaaacgttaattttgcttctctttctaaaaaaaaaaaaaaaaaagaaagagaagaaagaagtgattcctaccccctacctccagagttgttgaaagctgaaaagcatacaagattcttccttttaacttggatttctcgttccagaaattgtgggataatctgtattcttgctttagaaaacattcttagagagggtactagcttactgatgatgtgttaggattgctactgatgctgtcatgtggaaactatttaaaggcactattataaatttatcctataagatgacaatgtttactcaaagtctaacatattcaatgcaagtaagactttctgaaaacacttgatgatgtggaaatgctgcaggattaaataacttgaagagcctttatagattatatgaatgcctatttgtgtctagaaccagttatttaacctgtaaaatgtcaatagcaaatgaaggatgaagtatatctctagatgcaaatacattgagtttaaaagtgcctcaaaataattgagatcacatttcaggacatttggaaatcaggtcgatttgtggtaactgtagtcatcttaaatttcaaaccatttaccatctgaaagttttgatttgaatgtaaaacaggaaattggaattcctttgtccaggagaaacctcacaaaccttctttaaggcatagttttgttgtttgtttgcttgtttgttgcaggctgtaaggcatggctgcttgtttacaaagcatctcattcatattacctgtggagttgcatatccaaaccttagtgagttttgaagctttaagcaaattcttttaaaaaattcttgtatttctagcattactagatattaaaagttaagcaaatagattaatgacgtatacataggcatcatttcacaaggtcagtaatgctgcaggaaaagcaaaattgcaatctacgtatctatggtactaaggaagtcctgtttttcaaaaatggaagcccacttctcagatttttctgaagggcatacaatgaaaagtgaaggggaaacacacacacacaaaaaaacaagtatttggcttgtcacaggaatctgattgcattaagtgaaaggattatttagaatatgttaatgcaaagctaaaataaaattttccttggcaattaaaaatgctgtgcgctaataccctgctttctatcgtgactcaattcaacaatgtggggaatgtttactacatttccaacttgatgtcaagcaatggggaatacaagttccagttctgcaaagattcgtcaactttcttagctcaagagagaggctgagaaatgcagagaagaataagacataaaatagctccgacctccatgatccgagagtgggaaaaggcccgattattacccataaggcacactctctaaggccttttaaggggcctacaaaaatgttttattttataatcagaagaaaaggaaatgaacattggggattgaaaatcatattggtatttgcaccaacatagtcataaaatagtatgttaatatgtttttactttatatatttatatattaaaatatatttaatatgttttgcctttgtggcccatgaaagtcttactgggccctggggaaggtatcctaccctggtgaagcagctgctttgctctacaaatacctggggcagaaatttgatttgaaaagtattattctctcttctctttgtttcaactggattcctttggaaaaccaaactagtatcagaacaaaccccgaaacagtaagaaattggagtgagaagggcatggtattgggactaggatcggctctcattcgatcgagctattctcttaaaatgacaaaaagtgtccataaagaggctgctggagagtgcgtggccatagggagccgacatgcccgggaggaaaggtgttgattacatggatacttctaaaagctaaagccttgttgccttctctttaatgcctagagaatgggatgtgtgatgcaaatgctcaaaacctcttaaatcatagctgtctgacctctacggacctcacatccatctgaggcttcatggacaaagattctccacttggccaaactttagccaagctcctcaaccttctcccaggcccaatctgggcacttccttgtaaaatctagttttggcaagaagtctattaggtcagtttagcaagaacacctaacccccccatatctgttcaacctcagtatctgatcaggctcctcagcctccaccatcccccaggtgatgtctggtcaactggcctgccttcagctagaatcctgttaggtcggtttagatgaatgctccctgatatttcctcttggtaatcttccatccactgcccctgaccctgttccctgtctataaatccccagttttccatggtgtattcagagctgagtccagtctctctcccctactacaagtccccattgctgtggtccccgtacctgtcatgatggtcctaaataaagtcttactgtgctttaataggtagcattgaaaaatttttttctttgacatcattcatgacaacatgaaacctattgggacagcatgactgtgcagggtctttagagctcagctttctgaggccctgagcattcttggttttccgacatcgtgaacctgttctgtgttgcaagatatcactcaagccagtgttgcttaataccatctctttgtgtaatagatctgaataaagtaattgtaatacaccaatattttactttgttgagtattattttaatgggagcctttccaatgaaggaaacatcagctttccttgttagaatgcaagcagcttaaaaactacccatgtctttctggaaaggaaacattgccatgtaactatgtatcagttttctaagaacttcatgggccttccata

SEQ ID NO: 632 - DNA, 13210 bp, Homo sapiens
tgtctgtgaaggatcgtcatctatacactcagtcctggctcaggctgtcacggtgactgcaggtgtttgaagctgtgggactcattggaaaaataattgaaaatgggattgctgtttctttcttttcttttttctttctttctttcttttttttttttttttttttagacagggtctcactctgaggctgaagtgcagtggcgcgatcttggctcactgcaacctctgggtcctgggttcaagtgattctcatgcctcatcctcctgagtagctgggattacaggcaaacaccaacacgccctctctttctttctccttccttccttcttttctttctttttcttttttctttctttctttctttctttctttctttctttctttctttctttctttccttccttcttttctttctttctttttctttctttttctttctttctttctttctttctttctttctttctttctttctttctttctttttctttctttctttctttctttctttctttctttctttctttctttctttctttcttttctttcctttctttctttctctgtctttctttcttctttctctttccttttttttttttttcagagccttgctctgttgcccaggctggagtgcagttgcacaatcttggctctgcgcaatcttcgtctcccaggttcaaatgattttcctgccttagccccccaagtagctgggattacaggcgtgcaccaccacgcccggctgagttttgtatttttagtagagacggggtttcaccgtgttagccaggatggtctcaatctcctgacctcgtgatccacctgcctcggcctcccaaagtgctgggattacaggcgtgagccactgcacctggctgtttgctgtttcttaacatgtgaggttccaacccagtggggcccactaacatgtgctgttctgctttggaccgtggggagctggggtgctggacccatctcccaccttctacagcctggagtgtgctcccagatgacacagccaagctggcgtgtttttccctcactggcggaaagttcagcaatccctgactccctcaccctgccctgttgagatttaaaaaaatttcctcttctgggcctcagagccgcctcctacctgaggtttattgctttctctgcaccagcattgagcctctgcagccctttaaaaggggcagagcccatagtgtgatcagcaggtcctgtccctaggagataagagtatcttgcacagcaggtgcaggtttcccagcagctcaggcaagagtccgatgtttgtgccatctgatcctgatgtctggagaggtgagccctctgtcggcatcttcctctccaggctggcagagcaaggggggctgtgaattaattcaaggttgggggtcggggccttctatatctggacttgcctcccacccgtgtcctctgtccctttttccctacggcagatagccatgtgtgagcctgaatttggcaatgacaaggccagggagccgagcgtgggtggcaggtggcgagtgtcctggtacgaacggtttgtgcagccatgtctggtcgaactgctgggctctgctctcttcatcttcatcgggtgcctgtcggtcattgagaatgggacggacactgggctgctgcagccggccctggcccacgggctggctttggggctcgtgattgccacgctggggaatatcaggtgagaccagctctgaggattcagcctgatgctgacttggggcactgggtgtggaaagcaaaggcgttgtcaaggacccctgggcgcatacgtattcgggatttcaaggagcgctctggataactatggggttgggagtcagactggggtcaactccagaccccgcagcctgtgagcttgtgactttgagcaagtcattctctttttgagtagctggatcacaggcatgcgccgcagcacccaactaatttttaaattttgttgtagagatggggtctcactatgttgcccaggctagtcttgaactcctggtctcaagcgatcctcctgccttggcttcccaaagttttgggattacaggcatgagacaccatgcctggctggcaagttactctctaaacccaaagttccccgcctataaaatgggaatagtagcttttaaatgttttttttttcaagccaacatatctatattgctaaccatgtaccaggcactagtctaattactttatagatattagttatttaatcctcacaaaagccttgtggggtaggtcctgttattagccccattgtacagctgcaaaagtgaaaggccatgtaatctgtccaagcttagagggccagaaagtggcagaggcgggagtcaagaacaagctgtctggctccagcgctcaaatccaagtgcctcatgcggaagtcatgagaattaaatgaagtagagcgcctggcacacaccaaacatacaacaggcattggttgctgtgttattgttaccactagaagggggttttagggaaagcagaaatgcatagaagacctgagccaggttttcccacctgggtatgcagagatctgcagtggtcctggcttgtcaagaggtgatcaagaaggaggggcagggaaagggacaggcttctctggcttagctctcgtctgggtagaggctcaatggggaggtctgtggacatggctgctggttcccaggagagccagccatcacgacgaagatcttgagtggggtgcctggcagggtgatctgggacatggttggtctgtattaaatctcactcaaaaaatagatctgaatgaggaaacagaaatactatttctgagaaaaccagaatggaaaagagctttaacatctctttaggccgggtgcagtggctcacgcctgtaatcccagcactttgggaggctgaggcgggtggatcacctgaggtcaggagttggagagcagcctggccaacagggtgaaaccctgtctctactaaagatacaaaaattagctgggcgtgggggcaggcacctgtggtcccagctacttcggaggctgaggcaggagaattgcttgaactgggagggagaggttgcagtgagccgagattgtgccactgcactccagcctgggcaacagagtgagactccatctccaaaaaacaaacaaacaaacaaacaaacaaaaaacaaaccacatctctttagacgtccaagggaggctgcaagtgaaacaaaaagtacatgatcttccctttggacggatctgagattgaaggcaacctttatcacttcttagcagggtgaccacagcaagttgctgaagcctctgtgtgcagtggtataaatatgagtaataataatagctgatgttttttgaatgctaactacatagatactactatgggctgtacaaatattaattcttaatatctttgcaatagctttatcaggcagagatcattgaggcacagagaggttatgtaactttgccaatgccacacagctcttcagtggcagagttgagctttgaacccaggccagctggctggaaagaccatctctttggcactgcaaatactgcctctctgtttggcttttttgacaaatatttattcagcacctattgcgtgccagacactgactttgaggttgttcactggatccaggataagctatgtatgtaagttataagcacccagcacagcccctggcacacagtaagtgtcagagaaatatatgctgagtgaacaatgaatgaatgaatgaatgtgtcttgattgttttattgctaatgagtgtaaaccaggaaatgtgtggttttcgtcacctggccctcctgatagagccatgctctgggtgacagtttctctcccctttggggctcccctgggaagccgcctcaccctgacttcatctgtgtatctcagcagagcccaggctaagctacttgaggccaagtaggcctggctgcccctcttcccaacctgtggagtctgagcactggctggtgctttcaaaccatgcatggaggtcaggcgcagtggctcacgcctgtaatcccagcactttgggaggccgaggcaggtgaatcacctgaggtcaggagttcgagaccaacctggccaacatggtgaaaccccgtctctaccaaaaatacaaaaattagccgggcgtggtggcagccccgttatcccatctacttgggaggctgaagcagaagaatcgcttgaaaccaggaggcggaggttgcagtgagccgagattgcaccattgcactccagcctgggtgacaaagggagaccctgtctcaaaaaaaaaaacaaaaaacaaaaaacaaatcaaatcaaaccgtgcatggagcttatctgagggcctgggcccagagctgagccagacaagttggggtagctggtctcgagctatcagggtgttggacaaagtccttttgggcagagctgaggtcctctgcccagtctcaactgaatgtcctatgtcctttggaggatgggtaagctcattggtgggctctttacattaggggggcactttggttctcaagtgacatggggagtcttggggtccctttctctctcattggggagtatccattcctggaaaccagatggattcaggaggccaaactgtgacaatatttcctccatcagagtgggactggttgggacactgatgtgagtgcagccaccctggctctggggcctgggctggttgaacatcttggtgaacacgaaggctctttacccatgagccagggggtggctgatcaactgcaacctgccctttgacctcaggttctgacttgtctaattcccttccacaccccaaactcccaatcccaatccctaacctggtcatgaacctccaactccaccccgtgattctcaatgccattttcagcctgaactccaaatctgcattttacacccatcacactttcagaccacaagtagggttttcactggctgagcagttcaaccaatcaggaggtcttattcagggcctagctactcataaagggagacccgggccgggcacggtagctcgtgcctgtaaccccagcactttgggaggccgacgtgggtggatcgcttgaggtcaggagtttgagaccagcctgaccaacatggtgaaacctcgtctctactaaaaatacaaaaataagccaggcgtggtggcacacacctgtagttccagctacttaggaggctgagtcagaagaattgcttgaactcaaaaggtggaagctgcagtgagccgagatcacaccattgcactgcagcccgcgcgacagagcaagactccgtctcgtaaaatcaaacaaatcataaggggaggcctggataccgctcttgggctactaacttggagccttggtatctcaatctgacctgtggccacatctctgaagggctggagggaggcttggagggagtcagggaggagttaagggatggtctccctacacgctcttcctccagggccatcctgggggctgggctttggacttagaggctgccctttatctcttaccctctgcctggcatctcagggaaaatggaagcaatttggtgcctctttgtatttgagctgggccccggactgactcttgccctgagaggccagcctggtgggttggctgggacacactgtctcaagtgccagccatgtggtcagccctgggctcatgacttcctctgctcttgtgggttacagtggtggacacttcaaccctgcggtgtccctggcagccatgctgatcggaggcctcaacctggtgatgctcctcccgtactgggtctcacagctgctcggggggatgctcggggctgccttggccaaggtgggtaaaccccaggggctgggctagtcttcctctctgatggggctgctggaggtgcatatgtgggtgtgtgtgtgggacagtggggagtggggaaatgtccaatcttttgcttgtttctgccagtggaattggtggacgtttttcttctctctttctttcttattgcattttattgtattttttatttgtttgtttttttgagatggagtcttgctctgtcacccaggctggagtgcagtggcctgatcttggctcactgcaacctctgcctcctgggctcaagcaattctcccacctcagcctcctgagtaactgggattacaggcgcatgccaccatgcccagctaatttttgtatttttagtagagacggggtttcatcatgttggccaggctggtcttgaactactgagctcaagtgatctacctgccttggtctcccaaagtgctggggttacaggcatgagccactgtgcccggcctctcttttttattttagagatagggtctcactctgttgtccaggctggagtgtggtggtgcaatcatagctcactgcaggctcgacctcctgggctcaagtgatcctcctgcctcagcctcttgagtagctgggactacaggtgtgtgtcaccacacccaactaatttcctctgcctaggaaaaccagagacctttgttcacttgtttatctgctgaccttccctccactattgtcctatgaccctgccaaatccccctctgtgagaaacacccaagaattatcaataaaaaataaataaattaaaaaaaatttttttctgtagaggtgggctctcgctgtgttgaccacattggcctccaactcctggcctcaagtgatcttcctgccttggcctcccaaagtgctgggattacagacatgagccaccgagcctggccagccacagagttttcatagctttatgcataaatccatggatagactttctcccttcatccctctttttcttttttttccctctctttctttcttttcttttgcccttaagtcttggttcagccagggatacttcaagcccttcaagatgtgggccttgcttggtgtgtgtgtggggggtggtggatgggggagctctgtcagcttggctgtgatagggtctgaagctgtaagtgctgacccaccgcagactttgttctcaagcctcactttactgtcatcccctgctgtggtctctccatgtcccaatttgagagccacagcctgttcccctgtctatggaacacgcccgggaccttccttctcggcttctgctctgaaaagcagtggccagactcgagctcaagccctgccacttaaaacctgtcaaacatggttctgacagctgcggggcagcagggttccctaagcacattcttcctgctaaatgttttacacatattctcttatttcatctcccagcaactttatgaaaaaccatagtcagttcatagagagcgcttaccttgtgccaggcacaccaacggccttgtctgtgagctgggagctgtcagtatcatccctattttatagatgagaaaacagaggtgcagagaagcaggtaacttgctcaagttcagacgtgcctgtaagcagcacagccccgactggatccagagtccagaagcttgtgcactgcactgtctttccccttcggggctgtgatagccctgaggccgatcgcccatagaaataattgagctcaggcttcagggctctcctgcacatgccccttccacggtcctgtgggggcttagcaatgagttcacctgatcatatgtgtttgtaaagtttctaagagtaaggtatttttagccacgcatggcggctggtgcctgtaatcccagcattttgggaggcagaggcgggaggatcactggagcctaggagttccagaccagcctgggcaacatagtaagaccttccatctctacaaaaaattttaaaaaaaacattaggtgggcatggttggtatgtacctgtggtcccagctacatgagaggctgaggtaggaggaacactggagcccaggaggtccaggctgcagtgagctatgatcgtgtcactgcactccagcctgggtgacagagctagactctgtgtcaaagaaaaataaaaagatagtttatgttctttttctcaaagaggatcatctaagttacataagttttaggtctgtaacctggagccatgactgggttatccccatttttctttttctttttcttttttttttttttgagacggagtcttgctctgttgttcaagctggagtgcagtggtgtgatctcagctcactgcaacctctgcttccagagttcaagtgattctggtgcctcagcctcctgagcagctgggattacaggtgcctgccacttcaccccgctaatttttgtatttgtagtggagatggggtttcaccatgttggcaaggctggtctcaaactcctgggctctagtgacccacccatctcagcctcccaaagtgctggggttgctggcgtgagccaccacgcctagccccattactatttttcagctgaacaaagtgaggctcagaaaggttcagtagttcacgcagggtcgcacagtaaaatctggcagagctgggatgtggatgcaggtatatctaactgaaattggacataacccttcactggctcttaaggtgggtagcatgcgttttttaggccctctcccctcagtttccagctgtctctctgccccactgtgaggctcagcagcttctctgtgcaggcggtgagtcctgaggagaggttctggaatgcatctggggcggcctttgtgacagtccaggagcaggggcaggtggcaggggcgttggtggcagagatcatcctgacgacgctgctggccctggctgtatgcatgggtgccatcaatgagaagacaaagggccctctggccccgttctccatcggctttgccgtcaccgtggatatcctggctgggtgagtgtcccttggcagtggggtgaccatgcccagatctgtgctgttcagctctgggggatttcaggcctgagggtcacagattcagttgctattaggggccaggaaggtgctgcaaatggggaggggggctggcatcaggcagacaacagggagtggtggggactgcagtgtcagaggtgctgcagtcagttcagctcttgtcaattattgctgggtacatgggtctgggctgatgctttcattcaaaggaagtcagaaatttaaatctgtatgtgatgttttccaatgttggtagcgtaaatacaacatttctgtgaactgtgttcattcggtcagcgggcagccgggttttagcctcaggcttacaaagagcatgtgtagctgttgtctcatttatttttagactcccagcaggctttggaagggattaagtagacaagattggggatgatgtctcccgttttatagataaggaaactgaggcttagagaggacagaagtgacttatttaaggtcagtgggcagtggcaaattaagtgatagatttgggacaagaggctgagtgaacccttttaatttttgttgtagagataggggtcacgctctgttgcccaggctggtcttgaactcctggcttcaagccatcctcctgcgttggcctctcaaaagtactggaattacaggcatgagccacagtgcccagcccagggagcccctccctaatgtctgactctttcctttcttttggacacagaaccaagtctaacctttctcctgggtcagctctccctcaactttgggaggtggagcctggggcaggctggggaatgtgtgtgtaaagctgtggccatgctttgctgccccctagtggtctttgattcacttacaagcccttttttttttttttagctccgcttcccgggttcacgccattgtcctgcctcagcctcacgagtatctgggactacaggcgtccgccaccacgcccggctaatttttttttgtatttttggtagagacggggtttcaccgtattaggcaggatggtctcgatttcctgatctcatgatccgcccgccttggcctcccaaagtgctgggattacaggctgagccaccgcgccccgcctacttacaagctttttgacttcgaagctggacacagggtggggatgaggtctacaggcccccagctggagagaatggggtaaagacagagccccagaacgagaggagtgcacctggggaagagtctccctgtaggattctgggtcttaagcttgtggtgcaacaagggcctcatctggaccagctagattagttaatgctttttgtacattaattatattcgaggtgtgggctccatttgcattttctcattcactcctgatgacaacctatgggatagtcactttcacctcacctgaacacagagaggttcatggaggttcccacacctagaactatctgggctggggtttttctttctttatatgtatatttttaaagctttgtgggtgaacctagtaggtgtatatatttctgggttacatgagatgttttggtacaggcatgcaatgcataattatcacatcaaggtgaatggggtattcatcccctcaagcatttattttttgtgtcacaaacaatccacttatactcttcgttattttattttatttttagttttagtttttgagacagagtcttgctctgtcacccaggctggagtgcagtggcatgatcatggctcactgcaacttccaacccccaggttcaagcaattctcctggcttagcctccccagtagctgggactacaggcgtgtgccactattcccagctaactttgtatttttaatacagacagggtttcaccatgttggccaggctggtctctaactcctgacctcaagtgatctgcctgccttggcctcctaaactgctgggatttcaggcatgagcctctgtgtctggctgaggttacatgagatgttttgatacaggtatgcaatgtgtaataatcacgtcaaagtaaacggggtattcatcccctcaagcatttattctttgggtcacgaacaatcctatgatacactttttgttattttataatgtgtgggctgggttttgaatctaggtcagcttgactccaaaaggattgaaactgattgactttcctttgtagactttggagcaaatgtagctccagcttctcttcctgccatcacccagtaggcatttttgctgggcattctagaggagtgtgtggggagtgctggactgcacgcccagcggggagccatgccttctgcttcctggtgctaatagcccctctgccttctttaggatctacccaggagctcatgatgtaggagtttagagagggtttctgggtggtgtgtgactaggcctagttggggacatgagtgtgaggtgaggtggggtttggctgggatcctggtgaccttggtgcctgggtgtttgcaggggccctgtgtctggaggctgcatgaatcccgcccgtgcttttggacctgcggtggtggccaaccactggaacttccactggatctactggctgggcccactcctggctggcctgcttgttggactgctcattaggtaggagtgtgacacagggtcaccggcccattggatgggcacttggcaacatctcccagagagtccgggactagagggctaggctctcacttgggtttggaagagaaaagagggagcctctttagaggcaaagaaaatggctccatctaggagctttggttgcaagtgacagagatctatttcaaaatagcttatgtcataaagaggaattcattggctcacatcatcaaaaacttcacaggtagcagtggtttcaggtggcgctcaaacaatgtctttaggacttggtctttctccttttctttttttgacagtttccctctgttgcccaggctggagtgcagtggtgtgattctggcttattgcaacctccgcccccgggttcaagagattctcctgcctcagcctgccaagcagctgggactacaggcgccgccaccacgcccagctaatttttatatttttagtagagtcgggttttcaccgtgttgaccaggctggtctcgaactcctgacctcatgtgatccacctgcctgggcctcccaaagtgctaggattataggcatgagccaccgcgcccagccagtttttgtgatttttttggtagagatggggcttcaccatgttggccaggctggtctccaactcctgacctcaagtgatctgcctcccaaagcgctgggttacaggcgtgagccactgcacccggcttcatttaattctgggctttcagagtggcagcaatgagcatcttcaggaaaagggttagaaaccaagcaggacccgggcatgtggttcacgcctgtaatcccagcagtttgggaggccaaggtgggtggatcacttgaagtcaggagttggagaccagcctggccaacatggttaaaaccctgtctctactaaaaatacaaaaatcagccaggtgtggtggtgcttgtctgtagtcccagctactcgggaggctgaagtatgagaattgcttgaacccaggaggtggaagctgcagtgagctgagatcatgctactgtactccagcctgggtgagtgagactctgtctcaattaaaaaaaaaaaaagaaaccaagcaggaaactgtctctctctctgcaaggggatctggctattaaggctggggaggctcaggaagtcatctttctggagacttctgagcctggagacatgacgaagggctgggtctcacctccggggcagagaccttactgggtcatctttcttgcaggtgcttcattggagatgggaagacccgcctcatcctgaaggctcggtgaagcagagctcgtgggattcctgctgctccaggtgtcctcagctcacctgtcccagactgaggacaggggagttcctgcatttcctgccagggcagaggcccagaggagcgaccccctgcttccactgcttgggcctgctttctcagatagactgactgctgaggaggctctaggttcttggaattcctttgtgctcatcagagaccccagcctggggaacacgctgcccgcactgcccagagagcagtgcaaacaccacaacacgagcgtgtttcttgagaggaatgtccccgagttggacaaggaggctgtttctgcacatcagctcatttcccgcaccccatttcttgcttgattgctttgttgggggcctggccacttccttgcttctcaagctgacaattctcactttgcaataaatagtccagtgtttccttccacgtgctca

SEQ ID NO: 633 - DNA, 107021 bp, Homo sapiens
ggcacatgtggctggaaatgcaagaagagggaaacgtgtggcttggagtttcaagaagagtgactgtctcagtgccgagtgcctcagcagcttctccacatgctcttcagtccccaaagttggagaatcccatcaaggagagtagccctgtaaggaattcgaatttccagcatgtaagtctctgattttatacctactcagattgtagtagtggaaaacagcaacatgtaccttgactctctggccccatgttactgaacatttgcttaaaggttaactcacttgagggagcttgtgtggtgctttctcttctgctgcaggctggcaggggtttttgttcagtgggggctgtgcacttggtggctctccatgcacacacagtcactccagtgacacatgtttgataggtgctgggaatgatttcatgactggctcagtagcaaatgcgggccagatgtgattctattttttccatgcaccaccagggatggtgttgggtattttattcccccagcctctgtttcttctgtaaatgaggattttcttagtatctaccttgtgaggattaaatcccatgattttatggaggtgattagtaaatgtgaactctgcccttccctttataacatctgaggctccgtcagggctctctccttttggtgtatgttatagtttacttagaggtcaatttggtgtctacctatgcagtgtgatttgaggagaattagaagatctttcccaccaacttgccatgctgagtacaattcccatctgaaaacatatgcggataggaatttctattgggagaattgttcggttatcgacttcaaggagtcgaagttctcctggttttaagtctgttgtcggaagtatataagaatcaaagcttaatcgatggaaatcattgctctccatcatgcgtgagttaaaaccattacttctgagtggtcagtttacattgggctctgtctagaaggtttgccttcttcacctccagtcacatccccatttcacaagtgagcaaacagccagaggaggggaggaggatggcataagatcttgcagctggcagagacgaaatgtgaatgtagcccgtttgcacttggtgctgtcgggcagccaagcaatccagtgtgtaggtccagggcgacaagcgctgctcccatggctggggtaagtccctccagcattcagccttgctccctgtgcttatctggatgcggtgtaggatgaagatgaccctatagaactctaccctggaagtcctggcaaagtggatatgtgacatttttgaaaccagggacatgttggtgctgcttaatatttaaatcataattttcagactcttaaaaattactaaataagtttgaagagacacagccatctgcctacagtgccacccctgagcttcacgccaccctggtctccaggaaaggggagagtctcaggaatattgaatgcaggtaagatgtggaagaagagcggagttttcacattttaacaaggtcaattgagtaatcaactcaataaataaataaattattatataaaatgagggctgggtgctgtggctcacgcctgtaatcccagcatttggggaggctaaggcgggcagatcacttgtgctcaggagtttgagaccagcctgggcaacatggtgagacctcatttccaataaaaatacaaaaattagccaggtgtggtggcatgcacctgtagtcccagctacttacgaggctgaggcaggataatcacttgagcgtgggaggcggaggttgcggtgagccgagatcgagtcactgcacttcagcctgggtgacagagtgagactctgtctcaagaaataataataataataaaataaaattatgaaagttttactctgccaagaatatgttgcagttttaaagatacatagagccttaaatatataaagaaaatcttggttcaactatggagagaaatcaacaaatccaccatctttaccaattatagtaaactggatgatagatttagcaaacaaaacattagtaaacatttagaaaatttcaaagacaaaagtaatcatcttgctttattggacatatatggaatcaaatacctaaaaattagaaaatacactttcttaagtgtcttaagtggcattatgcaaatgtcaacatctatcagagaactgctctcacaccaacatgttctctgactgcaattcaatccaattaattaaattagaattcaattaaaaaataagcaaatattgctatgtatgtctggacttttttttttttttttttgagatggagtctcaccctgccacccaggctggagtgcagtggcacagtctcagctcgctgcaacttccacctctcaagttcaagcagttctcctgcctcagcctcctgagtagctggaattacaagtgcctgccactgtgcccagctcatttttgtatttttagtagaggtgggatttcatcatgctggccagggtggtctcgaactcctgacctcaggtgatgtgcccaccttggcctcccaaaggctgggattacaggcatgagccactgggcccggcagtctggacatttttttaatagctactgaataactcatgtatcaaagaaaaacaaaatagagattaaatactatttatacataaatgataataaaatatcagcacctcctcatacctgtgtccccctggtgtgtagcccaagccgtgtgcagggtgaagggcacacatccagggagcagtgcagccccagctccgccctgtaggagccctgtgctcagtcacccactgcagcccccaagctcctggccagtcctccctgaccagggctctttctcatgggtgcattgccaggggcaagaaagtgggagtctgtgttcctcaggacagaggagtttcagctcaagaagtgcctggctgtccagcttgacactgtcccctcccacagacctccaatgctcacggctggggcctgcctctcctctgtggtcatggctgaactcacagtgtttggggggatgagccaccttgctgctggcttctggctccccctggatggtgacgcttgggcagctcccatcttgccctctgtgcagatggggcctaatctccttactgcctccattgtccacatggctgctgcctgcaggtccctgcacggctgctggagggagctgcttatgcacaggctgagaccaggatcccctcacttgtaccacctgccaggtccccgccctgcagcccctgcactcatggcatgttctgctgcctggaaggccgctgcctctgtcccagttccatggggatctctgctctagaggggtagcttcttccttgaaaagatgctgcttaaagtcagaggatggatggctctccttggggcatttctagctctggactgtgccacaagccctggatgtggtatgtgtatgtgtgtgtatgcatgcacttaggtatgtgtgtgtgtgcatgtgtgtgtggtatgcatgcatatatgcatgtgctattgtacgtgtgtagtgtgtataaacatgcatgcatgtatgcttgtgtatgtgtgtgcatgcataagtgtgcatggtgtgtgtgcatgtgtgtgtggtcggggcaggggcacctgcaggctgctcgtcatctgagtggaccctgttctccactcttcctcctctgcaaagcccaggcccctttcctagcttcacatgactctgcgtgcaccttcaggagaaacggagtcctgctccttctattgcacccatcaaccaggagtggggggagggggtggaggtggggaagatgatcctccctgttgctgccccatggtgggaggagagactgagcccaaaccatgttttagatgctgataggcttaagggtaacagcacaggagtttgagatgcatgcggctcaacacctaatctacatctcacttcactttctcatctggggaagtgggcttgggaccctgagcctcccgggtatcacagggtcctaatagtccctcacagaaggagcagacccagagtgagcactccccaaatgccacgccgtcccttcctcacccttggagtggagcctggtcgttctcaaagttgctgggagagtcccaggagccctggccccaaatctgcatcctacacagtgcctgggaacacagggcccattttttccttggcctctcgccagtcccagcaggccctgatgctcctctccatcctgctaggatggctctctccccctgggggcagagtgggggcaggaggtggtgggagggtggagggatgctgctcagtaaataatgcagagccggcagctctgattggcttcggggaggcagacactctgtctacataaatggcaatcacatcttctgtgcctcttaactgtcactgtggagaggagagagagaggacagagagcaagtcactcccggctgcctgtgagtactgctctttgtcctcatggctcacgcgtccagctctctggatggccgtgaccctggggtttggggtgggaggtttgccggttgattctagctgtgctgaattctcctcctgcaggaggaaggaggttcggctgacagggacagctgagcattcagtgtgtgcaggtgacacagggtttacaggaacttttcaagaaaataggcaccaacctaggtcggcttgcttttttgtgctatctgcaagcaacaggtcaggcagagaatctgaaactttggattgctttttaggccacattcctagagccatgacagcaacataactaagtgagtggaaattattttccagactggctcatgtgcatgtagagaccgtggaggccacacgatgggtgggaaagaaggaggctatgcagccccacagactcaggtttgcattcagatgcacacctccctggccgcctttccttcctcagacgtgaaggagaggagctaattaacagcatcctcccccagatcatagtaaaaaccaggtttgattttataaaggggcgggcacacaataggtgctcaataaatgagagctctattgtgaataagggaggaaagtgtgaggtcactgaaaatgctgctgagtggtctgctgcgccctccacagcctgttttcttcagtttccaagcgaaattcaggcaggtgacatgggttcttcccacaagcttgtttctctcttgaagactccaagggcgaggctccttgcgaaaatttctcattcagataagcagagtttcccctccaaaaggtgacaatcactgcacaaaagctggtcctctgttggtttgtcaagggtgccagagaaaaacactccttttgctgggggcaccggagtcctgctggcagcgtgcggtgaccccagactagaacacaggcatcctggatggctgaccacagagcaagttaaggggtgtctggatggttctgaaggaaacaaaatcaagccattctcagcagtttcttttcttcctgtcttctgggcacacgctaggtgggcgtctacacacagccagtgtgaagaaaataattaaaataaatcccccttaactccccttgccacaaattcaaagagatagcctgggggatctaattacttttgttttctgctcttcaagatgttgattattctgaaggttttactttcagacactcaacttgagtcagcagttaagtttagggaacggctctaggaaaaccacactatgcgggtattttaaaagaagtgttctgcggctgggcgcagtggctcacgcctgtaatcccaacactttgggaggctgaggcgagtggatcacctgaggtcgggagttcaagaccagcctggccaacatggtggaaccgtatctctactaaaaatacaaaaattagacaggcgtggttgtgcgtgcctatagtcccagttactcagggggctgaagcaggagaattgcttgaacccgggaggcggaggttgcagtgagctgagatcatgccattgcactgcagcctgggcaacagagcgagactctgtctccaaaaaaaaaaaaaaaagaaatgttctgatgttttgtgtttatctggtgcttgttggcatttctggaggaagacattcagggagcccagaggcacctcgtgggcatatgggacagcgatgggcacaggacctcgtagaaaaggttagaatcccactgtgttgagagacagcagagggtcctggtcttctggtttgtacagaggcaagtgtgaaagccatttctgagctgtgcgggctgagaggagctccgtgcctgctgcatgcttccctcagcctcttcgcattgctgtaaaggggatcaggctgctactttgcagagctgatgtgaagtttaggaggatataggtaaagggcttacactgctgccctgtatatggcaactattcaacatttcttctgctttggaggaggtagaggagaggcacttctcttggggcatggagggcagcagagtttgttgagcctctgcctgtttctgttgggatcagcccaggtgggtggaggcagacgtgtgtctgcgggctcagcactcccacccgaagccacattcccctgttctctcatgtgcagtgaaccaggcaggagccctggaccacactctgggttgcaggcaccaccttccccatccccagtgagagccctgtttagagtcctgtggtctcatctctggccatggtgaggacacaggcagctgacagtggaggtgtaagtggattcccaggccaaaggtgtgttaggaaaatgctggcttcagaacaccagcacccactccttcacttactggctgtgtggctgtggtcaagttaaacagcaataactctactggcctggcagtgttgtgagcgtgttcagtgagataatgtataccacgagcttatcaggagcttgagcactgctgatttgtttggtttcttggacaataggatgtggcaaccaaagttcaacagattctcaggattttttcttggaggggggcacctcaagtgcaggcttcttagcaacaccaggccccaggccagcagctgttcaatatgaggaatagggaagcattcactgtgaatgtagaagtcaatatttaccaccaaattggctcataaggactccccaaagagtgtaccaaagcatactaaatagattcacagtgcaggtgtcctgtgtttgtaatagacggtaaaccaggacatgtcatgggcactggatattatgactatgatgaaaagaagcaaccaactagaacataattcgaattgtctcaagccaatagcaaaggcagatggttatgatctcttgtgaactattaatgtgactgcaagagaaagggggaaagaattgagaaaaaataagggaaaaaatttgtaagggggggggtgatttctgaaaagtttcttctgacataactcttcaataaaatgaaaacaaaggagaaaagttaaaattacctagtagttatcatataaactttcaaaattagcaaccatgaatgaaaataataaaatttgaatgttttaaggtttaaagttaaaatgtgaatgaaggagcaaagcttacagagatggagtgtctatgctcaatgcctgatggtgggtgacatttctgtatcattccagtttttcaaaaagaaattgacaacacgcaaaaagaactgtacaactcacatgtctcaattccactggggaattaatatctttgagagacagacccaataggtgcgacctatatggtgatggtggggtggcatctactcatgacggtgctgcccataacagcaaacagctaacaggcaaagtggggatggatggtgtcataggaacacggtgaaatccccactcagcagcccttaataagtgcaaataggagcgttatgttaaggaaattctgcaccttgtaattaggcataaaggaaaaatgtcaagtgaaaaaaggatccccagtcatacacacatcctcattccaactatttgaattgtctacggtcaggactaaaatggaataatatcaatcagtttcatgtccttggcattcttttttgtctttggaagttgctcaagttatgaatttttccagccagcattaactaaggtcacagcatggttacagagatatgagtggaagtagcatctttccatgggaggaaaactgaaaaccaagacaaacttctctatggctcctttccacggataattgttggccaagaatctactttgacagagcattgtttattaaacagggaatgaataagaaacagctgcacaaagctccttcctccttcatgtcagcagaggagcaaggctttcccctgaattttgatctttgtttgttgtagaaaatttctcccttttctcttatgctacctcaggagaagaggcttctgcctgtcttttgtagcatcaataataataattgctagacacaggtttacagtccaaagtgctctctgcctgcatgagcttgcggccccattttataagtaaagaaacagactcagagactccaagacgtcagccagcagctgcatgcctcttgccgcagagctatgggctcaagctgttttctctgaatgcaaatccaccattctttctattcttcatgaggaggaggaggaggaggactgtcctgtggaattgtagtgctgaaagcttagctccacttgattgtggcagttccattttccaacgcagaccaatctcgccaaggaggccagctgggcggagtgggacttaggacccagtgcaaagtcccttacaggagttcctttctggacagaaactcccttgagatgatggatttgattcctcctgaatttgcacaggtgtggagagtgaaatgctatgcttcgagcatctactttgtaattatcttgtactctcttcatggttttgtgtggtgcctaggatgatggccatggtacagattgcaagtggagctgcaatggagtggacgtgtgtgtttctcccaacattcctatgttgaaatccttgcctgcaatgtattaggaaataggaactttgagagatgattaggtcatgaagtcagagccctcatgaatggaatgagtaaccttataaaagagaccctagagagacccatcacccctttcaccatgtgaggacatagagagaaggctatgtctatgagaaacaagcctcaccagataccaaatctgccggggccttaatcttggacttccagcctcagaactctaagaaatcattgtctgttgtttataagctgcccagtctatagtactttttatagtagcccaaagggactaagatagggggcttggccacggtctcacctccagccaagagctgcccaaaccctttctctttctggttaccatttgtaacgaacatgatctataagcaaacaagcaccgtggaagctgcggtgcccctgtggtcctcagtaggcattcgggaaatcattccttgcagccctaggagaaactggtattacaagtttctaatcctgaagttacttaagccatgctcttttcatcaactgatatgcatctggctacagctgttagagatgctctgtacctgtgtttgagtccaggacattctctcaggtgccttcaggagccagactgcaggaattcaactgtggcctcatctgactacagcaggtgtggagtcttggttcagttgtgcagcctctctgcgcctcggtcttctcatctgttaaagggagtaatagtagtcctgacaaggttcttatgaagattaaatacgagaaccaggcaaagagcttaacgtggttcttggcacatgtaagttcatatcaatgttaactattttttagaccaatgagagagtgcctatttaaacaagaacacccgggtttacataaaaatagtggtacaagtgtaagacagtcgcaagtgtgtgtgcgtatgtgtgtgtgtggtgccctggctttattgtgtcaattataagtagagacactttggcctacaggatgaaggaaacaggggttctgccttggctttgctgcaaccagcttcacacctgggacagtcctttccttctctgggtcccaggtccctcccttttaaaatgagcatagtaatagctctcaccaataaagcattaaaggagctaagatgtcagcctgtcctgggtctcgtttccaacagatctcttgtctcccccactgactccaaaccacacaagccatgcttctcaggaacccaggacacccggattgtggtagggttctgccaatgggaggtttagtgggaggctcgaaggcagaggtaccaccatccccgtgacactggctcagcctcctcctccatgcctgctgacccggcaagcctgacctggtggcagctttgcacggacagcctggatcctggttccaggagcacagtctctcccatctctccatccgagggatgggagtgcatcatattggccatagaggttacctgagcttcctcggttacctaaggtcacccagctaataagccttggagataagacgcaagccgagttctctggatccagagtccacccttctcccccgcagtgccatgctgcctcccagaacactttatgttgctttttacccatgtgaggaagtctgtgatgtttctctctctgtagttgagaaaactcatgtgctaagggcctcagtgacacagaatcttcatgactttctgaagaatgctgcgggaacctggggtcaatcatgtagaataattggctttgaggaccacagtctctgagaagagcagttgtatggaaagtaggcctgagcactaactctggctctagtccctgactgttatctcatcaaagaatctgacaaatctgtcagcgctacctaagtcttgtaagctaaaaaaacccagcagttgcaaaacagtggatttccagtttgtaaacagatgagtttgagagctgtggaagagaaatacaagtgaagataatgtgtcctagaaagggaggaaggaaggagctgaggaagccggcctcaaaagcctcaaaatgaggccacttctgcccagttaataattttattttttacttaaagaaaattaatagactttcacggcagtttcaggtataaaggaaaattggacagaaagtagagagtcctcatatttcccctctccccctgccccccacagttgccctattattaatgaaaacattttactgaacactgactctgcagcaggctctcaccccatcatctcattcatcttcccagcagcactggagggaggtatttgcatgcattcttgctttcacagaggctgagaaggagcctcagaaaggggtggaggttaaaggtaacagagtaactgaaagcagtgactcttgacctcaggtctgcctgacacttggtggtgtagctggaggccacttgtgagcggatttagattattcacgtacctcctggccactgacaaaaatgctcacgtaaagcttcttagtggcctgttgtgtaaccagagtcttaagggttaaagaaagaacttagaggatgtttttttgaggcaagtttatcagatagccattctcctgtgattaaaaagctctcatggctagaaacttctttatggtcttgcttggaagcatttctcctactgaatatttttatggtctttgaacccacagagaaaatgtccatcaagaaacaagtcaggctgggtacggtggttcacacctgtaatcccagcactttgggaggccaaggcaggcagatcatgaggtcaggagttcaagaccatcctgaccaataaggtaaaaccccatctctactaaaaatacaaaaattagccaggtgtggtgacgcacacctgtagtcccacctactcaggaggctgaggcaggagaatcgcttgaacctgggaggcggaggttgcagtgagccaagatcgttccactgcattccagcctgggcgacagagcaagactccatctcaaaaaaaaaaaaaaaaaaaagaaaagaaagaaaagaaaagaaaaaaagaaagcagctaatccagggggaaatcagccaaattagtgttgtgcctggatttataagtatatgcttgagggggatagtgagccagagcctcaggcccaaaagcttacgtgttttctgagacataaactatggctcctttttactggaatagtgtaaaaaatgtcaaccctatttttttcatcaggatggaaaaggaaagtcaagagaggctgaacaaagtctccagtatcccggtgtttgcagcaaaatcatgtcttgcgtgcatgaacaggcagtaccatggacagatccacagtgcatggttgccatccccactccgggcttgtgaggaatccactacctcacatgcacagtggcgtggatgggcttgcccatggtgctaggggcctgggctgcattctcttcagtggctgtggcagagaagtcctaagagtgaaattgcagtgcccagactgcaggacacttagtcaagtgctgaacatggagggctagatgttgggcagggactgagacaggagatggcacaggtggaagtggtcaagactcaatggtgggaggggctgtggctcctgagccatagtgtctcctgtgactcttccttgtggcaaatatgtgaggggctggtgatttgaattgtctcaaaggtagagagtagagtccaatagggtatattacagaaacaaaatgtctagaggaccaaatatcattcattcattcatcattcagcaaatacctacagtgctctctgttgtccagggcccctgactggtcctgcaaatgcaaaaataaataagttgaggaccctgcttggagaagcccaccattagcaaagggtgttattgaaatgttgcattacaacaaaataaccccacaggtcaatcaggaggtctgagggagttcaggggagtccatctcttcttgaagcgtgtggggctggagatgagctctgactgttgctgatgcaaaaagacattgagccagaagtccagggaggcagccagctcaccgtgcacaggcaatgcaccacaggggctgcatggagaatagcgcagcatggagaatagtgtggggtagagaatagtgtggagaatagtgtcgtgtgcagctgctggaacactgggcagtttatgtcaacagaagctatttcaagggcctggagaggcataagccacagcctttatcataggctaagtcttccagctaatatttacacagcttgggggcataaaatatcaaacagctacaaatgagcacaagattctctgtggcttcatgctaagagccttctaaaaaggtctttgtgggaaataatctgtgaataaataacagagaataatttaaaatataagaaccaggtcttactttacactttgactaggaatatttcttttggtgtatgtggtatgtgtctgcttgttgtgtttttttattccagagccacatgctttggcctggtgctgtgacttaaagctgatatccccagaagctgagcgtctttctgaatctttcccagctaccccttctgagtcttcagcttgctgcctcacatgtgtggccccccaggagggcaaatagatatagctagaatatttgcttcaaaaggcattgctaatagtcacacatcaggtacaagtcctgaagaaaagattatgagatttcactacataaaaattgacattctcataggtcagaatagaattataagcaaattgggtccaacaaaaatgaggaaaatgcctgcaaaacatttaacagacgtaagagtagaattattagtatattagaactctcacaattaaataggaaatatctaacaccctagtggaaaagaatgcagtgagcaagaaattcagtaaaaaagtaatccaaatggcaaagaaacacacgaaaaagctattcagtttcattagtcaaagtacaatggggccgggcgcggtggctcacgcctgtaatcctagcattttgggaggctgaggcgggtggatcacttgaggtcaggagttagagaccagcctggccaacatggtgaaaccctgtttctactaaaaatacaaaaaaaatagccgggcatggtggcatgcgcctgtaatcccacctactcaggaggtcaaggcgggagaattgcttgaacctgggaggcagaggttgcagtgagcccagatcacaccactgcactccagcctaggcgacagagtgaggccccgtctcaaaaaaaaaaaaaaaaaaagtacaacggaatcattaaggctggttaaacttaaaatggatattcaagcccagtgattgtatggtaaaatgagcattcttatacatgttttaggggaaaatttggcaatatattttcaagacactaaaaatatttatctctagaagaatttgttctaaataaattataaaataagtgttctcctttttataaatttttaatgcaaaagaaagtgtgcagaaacgtaaacaagaggttgcacattttaggattatttggaaaagctaatagctgacatttattgagtgctaatttgttaccatttatttatttagttgttacacaaagttcttcaaggtattacgggcatacctcttgtgaaaggaaaatatcttaggccctttcaagctgggaaccactcagggaaaatctgtctcccattctattcaagtcatccctttgctcacagagatagatgcatattttgattgccttctttagaaagacttatcagaaactcaaaagaatgcaactaactgtatctcacctaccgtgacctgggagcccacagcgggagggccttgctttgcactgtctcacctttctggatggaactaatgtacttctttcaaattgattgatgtctcctgtctccctaaaatgtataaaaccaagcttggccacatgtcataaggacttcctgaggctgtgtcacgggtgtgtcctcaaccttggcaaaataaactttctaaattaactgagacctgtctcaaattttcggtgttcacacctcagaaatattgcaaattcagttccaggtgaccaccataaagggagtcgcatgaattttttctctccagtgcatacaaaagttctgtttacactatactgtagtctattaagtgtgcaataacattatatataaaaagtatataccttaatttaaaaataatgtattgctaaaaatgctaacgatcatctgatccttcagcaaacataatctttttgctggtgcagggtcttgcctccatgtcgatggctgctgactggtcagggtggtagtacctgaaagttatggtagctgtggcaattccttaaaacaaagtaacaatgaagtttgctgcatcgatcaactcttcctttcatgaaggatgcctctgtagcatgtgatgctgtttgatagcattttacccccagtagaacttctttcagaattggagtcagttctcttaaatcttgctgctgctttagcaactcagtttatgtaatattctaaatcctttgctgttgtttcaacaatactcacagcctcttcaacaagaatagactctatctcaagatgtctttgctcatccatgagaagcaactaatctgtccaattttatcatgagattgcagcaattcagtcatatcttcaggctccatttaaaattctagttctctatttccaccatatctgcagtgacttcttccactgaaattttgaaacttgaagtcgtctgtgaggattggaatcaacttcttccacctcctgttaatgttgatattgtgacctctttccatgaatcacaaatgttcttttttttttttttttgagacagagtcttgctctgtcgcccaggctggagtgcagtggtgtgatcttggcttactgctgcaagctccgcctcccaggttcatgccattctgttgcctcagcctcccgagtagctgggactacaggagcccgccaccacacctggctaattttttttgtatttttagtacagatggggtttcaccgtgttagccaggatggtctcgatctcctgacctcgtgatccacccgccttggcctcccaaagtgctgggattacaggagtgagccactgcgcccggcccacaaatgttcttaatggcatctagaatagtaaattctttccaaaaggtttttaatttactttgctgaagttcatcagaggaatgactatctatggcagatgcagccttatgaaatgcatttcttaataagacttgaaagtctaaattactctttgatcaatggactgtagaatggatgtcgagttagcaggaatgaaaacattaatttccttgtacatcttgctcttgagtgaccaggtgcattgtcaatgagcagtaatatttttgaaaggaatctttccttctgagaagtctctctcaacaatagtcttcaaatattcagtaaaccatactgtaaacagatgtgctgtcatccaggctttgttgttccatttataaagcacaggaagagtagatttggcatagtttttaagggccctaggattttcagaataataagtaagcataggctgcaacttaaagtcaccagctgtgttaccccctttgagagtcagcctgtactttgaagttttgaagccgggcattgacttctcctctctggctatgaaagccctagagggcttcttgttccaatagaaggctatgatgtctatattgaaaatctatggtttaccgtagccaccttcatggattatctttgctggatcttctggataacttgctgcagcttctccactggctcttgctgtttcaccttgcacttctatgtaatggagacagcttctttccataaacctcatgaacaaaactctgctaacttcaggcattttttctgcaactttctcacctctttcagtcttcatagaattgaagacagttaagaccttactctggattacgctttggcttaaggaaatgttgtggctggtttgatcttcaattcagaccattaaaatactctccatatcagaaataaggctattttgcttagcattcatgtgctcactggagttatacttctaatttccttcaataacttttccattgctttcatagcctggataactgtttggcttcacttttgacctggctcaacttttgacatgccttcctcactcagctgaatcatttctagcttttgatttaaagtgagagacatactacctactcttcctgtcacttgaatacttagaggccattgcagtgttactaactgacctaatttcaattttgtcacatcttagagaacagggaggcccaaggaaaggaagaaagacaggcgaataatgggtcagtggttcagtcagacacaaatttattaagttgaccatcatgtgggtgtggtccatgctgtcccaaaacaattacaatagtaacatcaaagattgccgaccatagatcactataacagattaataataatgaaatggtttgaaatattacaaaagtttctgaaatgtaacacagagtcattgagtgagcacatgcttttggaaacattgtgcctatagacttgctggattcagggttgtcacaaaccttctatttgtaaaaaatgcaataaaacggggtgtacctatactattattgtcacgatttttgttgccagttaaagaaaatgaggtttagcatggcagcaatttacgctgggttgtacagctaatacatgctgttataatagctaatacatgcgattatgatagctaatacatagaatcagggtgtgactcgcagtcctttctttggctctcggtctcggagtgttggccactgggatacaccaatgcttcccactgtgtgggtgaaaattggaaataatataaatgctcaacaatagaggtacatgttgtgaatatggcacattcacattgtgaaatacttgtgagaaatcacacaatagaaaagtatttatcgggcaggtgcggtggctcatgcctgcaatcccagcactttggaaggccaaggcagacagaacacttgagatcaggagttcaagaccagcctgaccaacatggcgaaatcctgtctctactaaaaatacaaaaaaaaaattagccaggtgtctgccaccatgccctgtagtcccagctactcgggaggctgaggcaggagaatcacttgaacctgggaggcagaggttgccgtgagccaagatcgcaccactgcactctagcctgggtgacagagcaagactccgtctcaaaaaaaaacaaaaaaaaaagaaaaagaaaagtatttatcaacatgagaaatgtacttagaaattagtaaagaaaaacaggctagcaaaaagatctgcagtgtgataccatttgagttaaaaatttgagtcatattaatttgaaatacttccacttgaggtgaaaaccaagtttcactgtatgtgcaaaattaaaaaaaaacagtcacttcaaactaaaaactaatttcaaagcctgcaggccccaaggaattgtaagctggctgctttagcacatggccttgatgttttgctggtgaacaggacactccttggtcgttggcttaagaagcacaaaggtgcaacagaacttcagacagtcattgtggttgttctcatgcttgttagtttggcatttgctgttgctataatctagagtctaatcttacgtctcaatcactgccactcaagcactcactagctgagaaatgcatcctcaaacaatagctttaacatgggggctggatctaataagccttgaaatgacataaaaacttctgtaactgttcatttaacagagaacatggaagtaaaaatattagagagaatgccaatggaaggaaaagcacattctagcaggtttacctttgtcaaagtaccttgaccaaacatcagccaagctcctctggcccaagggggaagagcttagccaagtctcctccttggccttctgagcacaactttgatgtccaatcaggctcatgtgcttccacttttggtatctcatccagagttcctttttcccctccacccttgatacttacccaagttcctcttagtaattttccacccagggaccctctcacctgaccgttggctgtaagtccctatgtgcccctgttgtttttggaattgagttcagcccctccccttttgcaacattctatccctattgcagtggtcttgagtaaaatctgtcttgtcacttttaacaagtgcctggtgaacaatttttctttaccacctttaacctcacaaaaattgttaaaaatcccagcatggacaatgggaaaatagagaagtgctggaagctgatagtaaggtcatcaccattgctaataacagtgaatttagagtattcctaagcacttaactcccatgggaaaatttatcttaaatttgtcctggagccagctataaatttgaatcctatttctgcaattactggtcatgtgatcttgggcatgtcacattgcctctctgagcttccatttcctcatctacaaaactttggagtatgaaaaagatttgaaaatgcatccctatgcattttccttgtgccatcctatgcacaagacgtgccttatggagaaaatacatgtgttagagaagcttccccagacaggagttacagtgctgttggctgtgagtccatccctagcatgcaattgtctctcataaatagaaaatattctagaggctgggagcggtggctcatgcctgtaatcccagcactttgagaggccgaggctggtggatcaccagaggtcaggagtttgagaccagcctggccaatgtggtgaaaccccgcctctactaaaaatacaaaaattagctgggcatagtggtgggtgcttataatcccagctactcaggagactgaggcaggagaatcacttgaacccgggaggcagaggttgcagtgagccgagatcgtgccattgcacttcagcctgggcgacaagagcaaaactccgtttcaaaaaaataaacacataaaataaagtaaaataaaaattctagaaagacatgtgccagaattttgggttgtgggattttaggcttatctttttctttgtgttgttcactgtcctgttttgaaaatacaattgattcttattcacatattccacctatgcaaattctcctacttgctaaaattcatttgtaacccccaatgtcaataaatatcaatactcatggtgcttttgagaccactcagggacgtacatatgtgtagcgtagtggagaatgtgcttgtccgatgcgtatgttcccagctgaggctgaacaaagggacacactaccttcttgcgtcagctctcataatgtaaacatgtccttctctctgtctattcagtgccacatccttcacatttttatgtttttcttcttggtgattttgctgtttaaaatgacccccaaatgtggtgcagaagtgctgtctagccatcctatgcacaagacgtgccttatggagaaaatatatgtgttagagaagcttccccagacaggagttacagtgctgttggctgtgagtccaatgttaatgaatcaatatatattaaataaagtgtctcttaaaaacacatgaaaagtttatgtactgatttgttgacaaaaatgttgggatcacgcttcaggaaattgtatttcccctagaagaaatggttcagtattcactaattcagagtttatggccatggcaactgttgtagatagaacacagctaccagcaataatgagaattgcctgtatattacttatgcaaggagggaggagagcattagttttaaaaagcagatggtgcgtaaaggtgcagttccatctgtgacagaatcaagaggagagaagaagactaagtttgagggggtgtgctgccccaggctctgagctgaggctcgtgtgcattgtgtgactgtgccttcatgccctcctgagaggtcagcatcacagtcttcatttctcagatgaggagaggggctctaaggggcaagcttgtctctttcaaaggcaggtaagggcagaggcaggacttggaccagtgtttgtcattaaagttggaatcgatcatgaaaataaacgtgtgcttctagtctattgaaataaagcgacgttgtgttgttcccagttgaatagctggtgaagaggagaagcagcttttgcctcagtcccaaatccagtgccatttctacctcctacagacatggagggaaagcgccccttacttgggatccaagtggcctccagggcatgcagtcactgcccaggtgtccctacccacggcttgcttggtatccccgccttccagttcagaggttgcaaaatttgctcactgaatcattttctttctgcagttttcacctctgacagagcccagacaccatgaacgcaagtgaattccgaaggagagggaaggagatggtggattacatggccaactacatggaaggcattgagggacgccaggtctaccctgacgtggagcccgggtacctgcggccgctgatccctgccgctgcccctcaggagccagacacgtttgaggacatcatcaacgacgttgagaagataatcatgcctggggtaagtgtgtatccaaggtcagaaaacaggagggctagaactcacatagcacctacttggctctgagcaattcacatactttgtttcaaggaatccctatggcagtcaggttggagagaaattttgtcatttctattttacaactgaggaaactgaggctcagagaggttaggtggtccacctcaggtcacacaggtagtacacgatgaagtcaggattaaaatccaaatccaagggcagtgaggctctttcccccaggtcccctgagactcagtccctgcccagagacactcggtacatagagcgtgtcctcatatacattaggaagcaagacactggtggctgctttcaaataagtcaattgccccaaataaagcacacttccaccatccttgggtttagcaataggtaattagcatatgtggaagaaacgttttctttagtttatttgagagtgggcagtgtggtgctgcccaccaaggcagccctttttctctgaagccagtaggcctggggtacacagagggcagaaatcagcgggactggctgctgtctccgatactcactcacagggcagcagagttggagctcagagaaacttcccttcagctttacgcttccacagtagattttctctgccaaggagttcacctaaaagcctgttggttaaagtggctctggcctagtcagggtctgggtgggagttgcagcccggccagtttctagatcacgaatgtttatgaggatggccaaacctgcccttccatgcaacaatgtgcagagtccaggcagggaaaatctccgtgggctccactggttgatcactgccgcgacccagcatgtctgtggttgtaaggcctatgagcaacgacatgtgattttcatagaagaggggtctgggaccatcaagacccactccctcaatgtagacagaatgccaaggccctgtgaaggcataaggtcagacaaggttacagtccactgatcatgggttgagactaggcctcaggccctggacctcagggactggtttctcagtagctgagcgcctctctcaccacactgctcacatttcttcttccaggggattctcacttggcatttatgctttgagcaaagaacaggattcaggttcttctagaaattgtgcaagtacactaagctgttcagcataaaaccctttgggagaggtgtggctaaatgtcaggcagtggggagtacaggagagtaagggaggatttgaagtctttctgcttccttctatgggggcattcactgcgcagagctgagctgggaaatgcacaggcgttgggcaaggtccctgggtgggagctgcagcccacgaactgctggctgtgtgatcgcaggaaaccaggtgagctctcgagccgtgagcggagcaagtgcaggcccagccatctcaaaagttgctgtgaatatcagcggagagtgaagcaaaagagcacacatctgtccctaatcaagaatcgcttctgtccttttccagcccaaaggccacaggaaggggagagagacaaaggcacatgggccctccaggtgcggaggggctagtcagccacagggctgctcttaaactctcctgggccccgggcgctttgtctttgtcggctccttcctccctagaaatatggaaaattatgctttacaaatgcattggcataaagatgaatatattaacatcgattttttttctttaacctgaaagttcactgttttttcctcctgattacagaagaaatttaagcattttttcagcccctaacagtgtcgtgggcctggacctgctgtgctgaaggcatcacagcctgtgcagctcctctcggcctctcagcctcatcaccaacctcccacacctgagcccccaagcctagactgtgttagctccctctctccaccactccccaagccctggcagacttggggtggccgtggttgttaaataaaccttactgaacactcctagttcttggtgagctctctcagttggctgccttcacaatcagagggggttgctcatgctacatcttagacaacatatatttaacgatgagtgctattgagaaataaatgtttgcatctcttctcagattgtaagagatatcttacagatatcttagcttggactgctatatcaaaggacgtagactgggggcttaaacaacattgatttctcacagttctagagacaggaagtctgagatcaagatattaggttcaggtgagggctctcttcctggtttacagacagccgtcttcccagtgtgtactcacgtaaccaagaggtagccagctctctgccttttcttatgagggcactaatcccactgttggggggcactaatcttattaaggggaccccaccctcatgccctaatcacctcccaaagacgctgtcccttaatgccatcactttgggggttaggatttcgacgcgaatggtgtgcagatactcacattcagagcagagcagccaagcccgatagagcatatcctctgctgctgggattctgagccagacctggaggaagcatcagagcacgtgctttcattttatctgaagggatgacagggcccagggaggtgcagtcagttgtctggggtaacccagcaaatcagggttcctgctggacttgcagtccaggggtgctcccaacaccatgctattcccacaggcaggatggacatggagcaccagcaggggacaatgcggaacagggcaatgtctctcagaaaccagtgcgtggtcacagcctgagaggggtctgaatggcaatttctataccttctccatgcacaggggctgagggttgtcctgagggctttaggactttattctgttccttcagggcaggtactgcattggcaggaacaaattaaagacccaaagactaggctacacctgctccttctctgtcctcccctgatcgtcctcccagactccaagatgtttgaggctggccccttgttaccattgctaaatgttccctgcctgggtgtccaccacaacccttgcctcctggatcctgaaaccccctgtccccaagtataccacctggagctgtcactaccccttatggatctcctccctggcccacatgagcttttcctctgtgcctcacccagggagtggcaggtgttcaccttatgggctggagaaaggtgggatgcccctagccagggcaaatggcaaggggcagtggccaggctgagggacagcagaggtgagacatctgtggggtgatccagctgcttggctggagggaaggcctcagctcctctagaagagccaggggcagcgggaagaccagatgcatgtttgtggcttgactgaagaaacctcgaaaatccagagcttggtttttttttttgtttgtttgtttgtttttaatggagactttattttttagagtagttttaggaaaactaagcttttggcacaaagagatcagccttggggcagcgccttcactgacgagagcaccggagcaagaacttgaagcacagtgtggttttttgagacttcttttgttatggaaaatgataaggattttccactttattttggagatagaacttttccttctgagctagcaaatacattccagtgtcaaaaagggagctggtttaaagggagtggggacagtaaggtgatgtgtaaatgctccgaaataatggaggaaggtaatgggatggctgacatttggggaactgcactcacctaactctgggtctggctgcatctggcagctgggagccatgggggtacctgggtcccccgctctcttgaggcctggctttcctcactcctcagcagctgctctgtcctcccatgcaggtgacgcactggcacagcccctacttcttcgcctacttccccactgccagctcgtacccggccatgcttgcggacatgctgtgcggggccattggctgcatcggcttctcctgggtgagggtccggatgcacctcgggaaggggtcctggctgtggtgggatcccggggtggggacacggtacctatgcacaagggacctgagcagatggcggtgctgtctgtgggcagacgggctactgttgcagggaggagaaaggattcagcccagagagagtgcctctgagaaagtagcgattgagaacagagaaagtctcaacaactcaaagcccattctgcacaggctgtgttggaagcacttggtatgaactaacatcatggtctggggcccagagtttctgcagctcgaacctgggaatctgcatttctccaagcagctcagagaatttctatatcctccaaagcttgagaaccgcgactgcccctgtctcattccttctgttctccaccagggctgctgcctggggagaggctccaaccagcctatcagatgtgtccagagccttggagcaggggggtctctggaaaagggcctagctcctgcctgcaaaccaccagtcccaccctatctggaggtaaaatgcctaaaaaagtccctactcagaagaacggtaggcagggctggctctgcccgtgactctgtgctccaggcacagattacaggaaagatgcattcctcccaaatgcagagagcttggaggtagagctgcctgctgatggccagtgtccgagggctgctgcaccctggggagttcctcaaaagccaggggctgtccttggcctttggggtccagagcactcaccttgtctgtggcttggagccaggtggacttgtgggcatcggtctatgtggcatgctgtgatgtgtaaaggagctgtcaattaggaatttgcagcactgagccacagggcccagctgagccacctctgcttcaccagcctggcacttgctcttctctgggctggggcactggaagttgccgggtgagcaggcatcatgggccctacaggcagggctgaagagcccacagatgggctcttcagtgtctgtgctgctcctctgccaggcactggggcctccctctctgctgggcagggctggcctgggctgagcataccctctcctaaagagcattttctatcactggatattgcagcagatttcatttagctctgctggtccaaatccattctgtcccacagaggtacttggcatccatctctatctgctcattctgggacagtctgattgccctcaggccttgaagggagtgcctcactatctctcaggctgcgttgcctgatacctcatccctagcagagagcataggctcctggtagagctgggcttggccaggctcaggtagaacccagcaggatggggctgaccagaagggagaatgcactcttctcacttagatcttactggtgacgcatcgggatgttgctgtgcacatctaggcacgagaacatcttggaccccttatgttggagacttttatgaaggtggagactcaatccacctttggatggggctcaagaccagcctgttcagagagaggggagagttcatagagaaaagtcactgggagtttaaaagacaagatcaatggcttctcgggatgcccagagggtgacagctgcccagcgcccactttctcattcccttcatttgtgactacggaggaaagtccaccagtgggctttctggacccttctgtgagtgaacaaatgaatatcctagcaagcccgcagagcccatgcagtgaggctcagtggagtaaggttcattatggtggcccgtatgttccttcccaaccgctctccttgcatgattctaggtcaaacagccttcaggcctttgaatcacatctgagattgggtgattttaatctgggctttagtggaaggttaaatccccttgttactgctgacccccaaattctgcaatgcctggccctcggttaatcccttcccttcccccacgacaggcggcaagcccagcatgcacagagctggagactgtgatgatggactggctcgggaagatgctggaactaccaaaggcatttttgaatgagaaagctggagaagggggaggagtgatccaggtaaggtgggagctgtgagggccacttttgggatgcatgggctctgcacaggactgtagccgcaggtggggaaagaggcactcatgcttcttgttagttcctcaaatttctcctggagaataaacaaaaccgagctcttgggaaaatgctggctttgggattggcaggatctggattaggatcccagtgctgtctttcactcgcttccccagggcagggcactcagttccccaggcccctagctatggtaggtagcacagccgctatctcacagcaggtgcgtggaagtaacaactacagcaactatcgtttgtgtggggttccccatcgccggccactgtgcctaagcattttccaggcattaactcatttaattctcacaacaacactgtgcattttagtacccctttttacaagtgaagaaacattttaatagccctttttacaggagaggaaactagggtccagaacattaggtagcttgccccatggcttccagctacagactctgtgtggctcagagcccgtgatattcctcggaggacagcacaggtggcagatgtgaccaggcttcagaggctataaatactatttgtctttgaaccaatcatttacttaaagatgctgctgcttctatgcagcaactgaattcattttcttcatgtaacatgtatctattgagagtgactgtgtgtcagagcttacaccagggaacaagatagacaaaagacaatcatgatggaatttctattccactggggttgcaggacaaatggcactgggatgacttggacttgatgcattaaaaaaaaaaaaaaaaaacaacttcctagcatggaatatgaactatattgaacccagtactctcccttaatcatttttctcatgtcaagtagatgatagtctcattaggaaagcattgttaactttgggaaaaaggggcttccttttcagatattgtctttcacaaggctctgagaattggtgaaggcccattcagtggatgaggacagtgaggcacacactggagaacacctttgtgcagagcacatggccagtgtggccacgcgaaactagcaagcaagtctctccacttccagtcctgagaatgagcaacaagactgataattttatgtatttgtttctattgatgttgtgacaaattttgtggctcaaaataagacaaactgattatcttacagttctgtacatcagaagtctgacctgggtcttactgggctaaaaccaaagttgacaccttggaggctccaggggtgaatctgcttccttgcctcttctgacttctagaggcttccaaaattccttggctcacagccccatttccattttcaaagccagctgtgtcccatctttctgacctttcttttgtaaaccccaaatatctgagatgggtctcagtcaacttagtttattttgccaaagttaaggatgcgtgcctgtgatacagcctcaagagatcctgactacatgtgcccaaggtggttgggcacagcttggttgtatacattttagggggacatgagatgtaagatgtacattggtttggtctggaaaggtgggacaattcaaagcagggagggggctttcaggtcataggtagataagagacaattggttgcattcttttgagtttctgattagcctttccaaaggaggccatcagatgtgcagctatctcagtgggcagaggggtgactttgagttctgtctgtccttcatccaaaaggaaattccttatgagggaggcatgtagctttttatcttagtagctatctcttttaggaatagaatgggaggcaggtttggcctaagcagttcccagcttgacttttccctttggcttagtgatttgggggtcccaagatttattttcctttcacactttcctggtcgcatctccttgtgaccacatataagatcggaaagtgggtctccacttttaaggacacatatgattggattgggtccatccaggcaatctgagataatctctcaagtcaagtttcttaacttaatcacatcagcaaagtcaccttttccctggaagggaaacagtcacagattctggggaccaagacctgaaatctctgggaatgagggtgcattaatgtgcctaccacatccagtgtgcttcagagtcatggagggaacttgcttgtaatgcctattcctagactctgggccaaaaaatgtgaacgctaattcatccggatgacacccagattcctgaataggccacatgccgggactgatgactgccttctccatgacccacaggccctgtggccaggctcagagtcatccctccacgtgctcctccttcgcattctttggttatctctttttccatcagacataagtgatattaaatggggagctgaggaaaatgaaatgtcaggcatagtggctcacgcctgtaatcccagcactttgtgaggccaaggcaggcagatcacctgaggtcaggagtctgagaccagcctggccaacatggtgaaaccctgtctctactaaaaatacaaaaattatccaggtgtggtggcgggcacctataatcccagctacttgggaggagaattgcttgaacctgggaggcagaggttgccgtgagccaagaccttgccattgcactccagcctggttgacgagagggaaactccatcaagaaaaaaaaaaaagaaagaaaagaaaacgtcagctatgttgtaagcaaagcttcaatacgttgctgtgaaccataccattctacgtagcagcaacaatgactcagcaatgattcagcaaatgaatcatgcttcagtcccagcacaattttcttctggtcagtgagtatgcagctggagaagcctccttggccaagatcacagcaaggataggctgtcacaggtgcccttccagcgaggggagggagctactgcacactgtccgcagccagtgctctgtcagctgcactttgccttggtgagggccagatggctttctggcctctggaacatcagtcctgattctccaggggacagagggcagcagcactcagcgacccagtgggacagctgcgtgcctgcagagggcgtggttttgattccaggcaagggcatgcatggtctaaccctttacaagaggcctcgatgttggtggccgacttactttttcttttagttttatacacgggacaaggtctacttttccatttcttttccatttgttcctctcattttttttttttattttgtcttgtttttagacgaagtctcattcttgtcgcccaggctggagtgcagtggcacgatctcagctcactgcaaccactgcctcccggttcaagccattctcctgcctcagcttcccaagaagctgggattacaaggcacccatcaccatgcctggataatttttgtatttgtagtagagacagggttttgccattttgcccaggctggtctcaaactcctgacctcaggtgatccacccacctcggcctcccaaagtgctaggattacaggtgtgagctgtaggagatcggtcagagtggtgggagaaactatagggaaaaggagcaggccttctgaaaggtcagaaggctctgcaaagctccatggcagaatagctgaaggcagctgttctataaccctgaggcagaggataaggagtaggtacaagggagtgtaggggaatttatcttggtcaagcttgtttgttagaagttgtccaggaactgacctcggaacatccttgcacgtgacattccctgaaaggggaacaataaatgttaattatctacaggttgtgtttgctccaggttttcagcattgtgcttgcactcaataaaagcaagctgctccagcttctcagggctgctctctggccactagagccaggcagtcacttagctgctcttacactgcatacctgtgtctgagcactcatttcctccatcggccagggtctgcaggacagatccagcagtgagccactgcacccagactgttcccctcattttgaccctccctagcatttggtgagccctgctgattcaagactcagctctgtgcagtgtggagatttttcttctactgtatgttagttattgtgggccacgtcactctttttcagggacttcaattttccacagattgggtacctcttccatgatttctctcttcctttcgatatttcccttttttgttatcttctatattttaggaagcttttcatggttttctccacatgattatgtgattatggacctggtgtggtggctcacgcctgtaatcccaacactttgggaggccaaggcgggtggatcatttgaggtaggagtttaagaccagcctggccaacatggtgaaatcccatctctactaaaaatacaaaacttagctggacatggtggcatgtgcctgtaatcccagctactcaggaggttgaggcaggagaatcatttgaacccaggaggtggatgttgaggtgagctgagatcatgccactgcactccagtcggggtgacagagtgagaccctgtctcaaaaaaaaaaaaaaaagtcccctttccacctagatactggacattcatggtaaaaatgaaaagacacaggagctttcttgtcatattccctgtgttatttcagtatctacatgtgaatatatgtatacagacaaaattgaaatgatactacgcatatggattttctgcatggtgctttccttatcattttattgtgagcatttcccactatttaaatattgtttgaaaaaagtattactccatgattttctatgatgcatcacaatctatataaatatataaataatacctaagatatttgtgttgcatcaaattttccattcttataaaaaaaattttggaggacaccctttaggatgaagtgcaacaatcttccaagatgatcaccttcctcctaggactctcctggctgtattcatgtttaacattcatgctccccactaaatccaaatggaacaaaacaaaaattgaagcatttctaggtcattgcatcttataacaaaaacaatttcatattcaattttttcagcagatgattcctctaattatatactcctcaaaaaaatcttatcaatccctcataatataagctgtgtctattataataagagctacttttcattgaatagcaattatgagcttggctatgttttagcctatgtcttgtgctttgtgttattgtcttcatcctcaaagtatttatgaagattgattggattatggacaatctttttcatggatgaggatattgagtcccagaaagttagtagaacatgcatagcagcaaaagtgaattaaagccaaggctagtaggaaagacaaccagagttatgactgttacaccagctcatccctgaccataggcttgggttggtgtccagagatgtgcatgctactatgggctgcattttcgtttcattaaagacaacctcatttttgagagaccatacaagtctttagcatttgggtaggaatattcctggcatctctcagcccccgctttaacacaatcttcctgtgagcccaatccactcagtttttttctggatgaaaggaagaaatgggatctgtgtttgccaccggaagctcacccttctcagcagacaaggctgattgtctgtaattggtgaggccccaaagagcacaggagcctggtgacagcctgtgagccagcctgcattattgatcccctcagagctgtaatcacagctgtgggcgtcagcgcagtgatgcgtgtctgagtcaaatggcaaactgttgttgtgaggctggacaaatgtggtctgggaaaatggtctcttaattgggttttaaagttcttgtggaagaaaagacaattttttgcttcgaaaaaaactgaagatgaaaggacatttctgctcacggcatcagcagccagaagcgtcagaccttaccagcatcccctcctacctcctgagcaggcttgccatggcaacctttgtctgctgctatcgcacagagccatcgttcctgctctgtaccacatgtcaccctccccgtgcttctctccgcgaagatctgctgccagcaaagtgcagagagctccacctgacatcatgcttgaggccaccaggccaccctggtggcatcggggtggtgtggttctagatgtgctactgacgatttgctccttcaggcttttaaaacatcattttgttgacttaagaaggtgaattttctcttaggacatgaactaagctcccccatccccccccagagaaaagccataatgagttgtcatggtgattcaggtgattcatggtgactcatttcattagaatgttcagagaatgaacacctgcgttccaacgcttcaagcagagggtagaatttagccggggaagctgcagtcacgcctgcttgtcaagcatcagaacagggaattgtgccttccaccaggcttttcatgttacatttccaatgagaatgggtgggacatgacaaacaaaatgtgtgtgggggcagatagggggacaggaggaaatcagggacaggaatgatggggtacataggagaagtgtaagtaaggtacaatgcctgctctcagggagcctgggtttcctgggatggctgatttagctttgccagccaaaattggtttctccccttctctctcctctggccaaggtttgtaaacctggcctaaaacaatgtctaaaatcattgctcatgaaaatatagcctgaaggaaataaagtacccattttagatgctgaattaagagacgcatatatctgtatatttgaacccatccattagtgctacagaaacatgaataaatgtatttatctttcaatattactgtcccaccaaaggatgtgggttggctcaaaagaataagtaaaagtagtgtcaaggcaaagtcaaaatgagaaatcagggtcaatgaagagagcatcaaatgttaagaagagaggttagcatttctacttaattattttattatatatttctctgtaaaaacctatcatgttataaactttttcagagtcaacaagaacctaccttcttttatttgccctttctaatgtcctttcatactggtcggtagatgggtttcttctacgacttacttaagagggaaggtgctcgctgcccctacctttctaggcccatggcaccctaaaaagcgcaggcgtgggctcactcctaaccgtgccctacctagctgctgatttggggcaagttagtgaacctctctgcacatctgtttccccacctgaagatgataaaacacaaaaatgggattatttttacaacttaaatgggataacatagcaggccctgaatccattagtttgccaggggttccctaacaaaataccactgactgggtggatcgaagaagaatttcttttctcacagtcccgaaggctgcaagtccaaaatcaaagtgtccacagggttggttctcctggggcctctctcctgggcttgcagatggccaccttctccctgtgtcctcacatggtcttccctctgtgcacccacatgtctgggggccacatttccccttctttttatttatttatttttttgagactgggtctcactctgtcgcccaggctggagtgcagtgttgtaattgcggctcactgcaacctccgcctcccaggctcaagtcatcctcccacctcagcctctcgagtagctgggactaccaggcacgccaccatgcctggctaatttttgtatttttatagatacagggtttcggtatgttgcccaggctggtctcgaactccggggctcaagtgatcgaccctcctctgcctcccaaagtgctgggattataggcaaatttcatattatcagaaacatgtcagattggattagagcccagccatgtgaccccattttcttttaattacctctctaaaaagcctatctccaaatatggtcacatctgaggtcctgggggttagggcttcaacacatgaatttttggggacacaattcagcccgtgtcattaggaatcaaaagaaaccctttaaggcatctcttagtctcaaggaaaatgcacccctattttataaacaaatgcaaatcgctctgtccgagtgaatatgaacgcagagtcaggcttgcatgctggtgccctgggccgttctcctctgatagagacaggagcagtcgtcctaggccaggctgggggcagtccatgaggagaagctctcacaatacctggcgcagggaagtggtcagaaatgttagctgctgctgttacacaaaatagacccaccaatggcaaactcataccaacagctgaagtggtggtctcaggtgtcaaaaatattagttttctcctaagcaaaggagagtgaattttgccatttcagactcatattttaagaaaactatggacacaaaacaatatgtcttccaatagtgtaggtaccaatgccttcgctatgtttgggatttcatttggaccttctcttgaatttagggaagtgccagtgaagccaccctggtggccctgctggccgctcggaccaaagtgatccatcggctgcaggcagcgtccccagagctcacacaggccgctatcatggagaagctggtggcttactcatccgatcaggtgagtgtgttgtgggggtatcagccaagacttcaagacccgaatgtttggttttatgtcaaattcaaaccaaaccaaacagcatccttccaaatctaagaacagttcctcaggtatcactaaatagagacctgaactacagggaaggggtggattcttgggtgggaactggatagatcaagttaagaaggaaataaatgtgtggagacatcaccgcgactggctctgtcaccttttctaccagtgcggacttctgttgtgattatctggccttccgagcaccattgcagagaaactagatatggggatcaaagtcctcggccctaactgcagctttgttattctgtgatctcaggcccctgggtagcgtcaagcaggagacagtggcggtgggggctgcagggcaaaaggtggccggctttcatgagaattgcctttcctgagaatctctgagacaggatggatctgccacagtggtgatgcctcctggctggtttctttcctccaggtactgtttactgagcctggccaccaagctccccaaggctccacagtcaggggcagggcacagatttgagcctaggatttctaagtccacctctgggatctactttccagggtctcgccacttatccttgagttcaaacaaatgaaaaacttcataaatattgacccagcactttacccttgttagtgcctgatactttaaacttaaaagcaagattccacaggaacagaaacaactccaggaaaaaaggggtctcatgaaggtgcaggggagagggagcagtcaggagcagttctgcctcctgtgccgttaagagggaccttgtgtttgcaatgttggctgctctctgccgatccagggcctggtaataactgcatgcacacacctgtacaaatccaactctgctgtcttctttccaggcacactcctcagtggaaagagctgggttaattggtggagtgaaattaaaagccatcccctcagatggcaacttcgccatgcgtgcgtctgccctgcaggaagccctggagagagacaaagcggctggcctgattcctttctttgtaagttcggcagcacttgtggctcctggccaataaggtgaaactccgtctctactaaaaatacaaaaaaaaattagccgggcatggtggcgcattcttgtaatcccagctactcgggaagctgaggcaggagaatggcgtgaacccgggaggcggaggttgcagtgagccgagatcgcgccgctgcactccagcctgtgtgacagagcaagactctgtctcaaaaaaaattaatctttgagaaacgctttttacctccatttttttttttgttttgtcaattcaagtcaattccacagtgtaatgtggaagaactgacatggctcaaagttagcacgcagagcaaggtgacagccaagacattttgaaggatgcaaaaagagtctgccagtggatcaaggtgtacctgccatcttatcccaaaagtcttatctttctccgttgcgttcatctccacaggccatacaggtttgttcctatatgtgtttactgcttccttcttcccaacagaatgtgcggggaggtaaggtccatttgaatccctgccttatccctagctcctgaaacagtgcctggcactgaacagaagctcgataaatatttgtcaaacaaataaagatttggaagaaagatcattcaggtagaaagaaagatctcccttaaaattcccacaaacaatttcagtacaatttgaatagattctatttaaataaggtgaatttctttgaacctatagtgtcaatattaagactcagaatactctgtctagggaaaaataaatctgtcaaaacacactcttttaggtttcaagaatgaaaacaatgcaggaaacatcactgaaaatgttaagattgtattttacaaaaatttcaaaactcatgaaataaaaagacaaatgctggcaagaaccacttatagcgtatgtcgtaaagtaaatcttaaaaagaaggcttacatatcagtaagcaaaaaggcaacattccagtgggaaaacatgcgaaatatatgaagtcagtttcatatataaccacaaaaaactaagaacacaaaaccgattctgatcctctaataaccaaagaaatgcaaattagttgccaagagaggtatgttaaaaatctcacactatgagtgtagatatgtctatttccacttttatatctgttaaattgtgtacatattttgaagcatattaatttggtgcatacacatttagaattgtcatatctccctggtgaatgatcgtttatcactaggagatgccctttatatctctagtaatgcattttgtcctgcagcctactttgtctgacattgctataattgcatatgttttctattggctaatgtttgcatgatatagacattttccattctactttcaacctccctgttcatttatatttaagatgtatcctgtgaaagcagcattgattgttgctattttaaaaatttgtttttaaaatccagtgtgacgattgatatttattttgttcatttacactcaaggtagttattgatacatttaaatgttatctgctgtctatttgttttttatttggctcaactattatatgattgcttttctctatgttcttgcctcttcttggattaattatttcatattattccattttcttatctctgcattttcttatttccattcggcatcttttcttttagtctgtagaattccctttagaaatttttagtgtgaatttgatataatgaattatctcagttttgttaatctgaaagtgtctttactgtgccttcacttttggaagatattttttctgggtatagaattctagagtgtttggtagctagttttatttttggtactttgtataagtccattgaattctttcttccatgatttctgttgagatgtcagttgtaattttaatgttgtgatgatgaagaacatacaaaaatatgacatttccttctgtgccgccaatggaggtgctgcttgctttttgtctttgttttactgtgatacaaggataattttctttttatttactcttcttggatttcacagaacttcctgaatctgtaatttggtgtctctcctcggttttggaaaattctaacctattatcttcccaaagtttgcctctcctcatttcctctctcctcccattctgggactctgattatgtatatgttaaatctttctgcagactgccatatatctcttatgcccttttacatgtctcactttctttttttttttaatctccatgcttcatcaacttatttacaatttaccaattaatctctttagctatgcctagctgataaatatgtcatgctcataattctaaacattaaaaaattttaacttattttattttattttatttttttgagacagagtctcactctatcacccaggttggagtgcagtgatgcaatcttggctcactgcaacatctgcctcccaggttcaagtaagtctcctacctcagcctcccaagtagctgggattacaggtgtgtaccaccacgcctggctaatttttgtatttctagtggagacggggtctcatcatgttggccaagctggtctcgaacccctgactgcaggtgatctgcctgcctcggccttccaaagtgctgggattacaggagtgagccactgtgcctggccaactttttattttgaaataatcgtagattcatagaaaattacaaagttagcacaaagaaattctgcgtactaacccttcacccaatttcccctaattgttccaacttttataactatagtaccatatcaaagacaggagactgacactggttcattgtgtgtgtataggtctatgtcatttatcacaagtgttgattcatgcagccaccatgccaatgagaatactgaaatcctctagcaccacaaaggtctgcctctgctactccctgatagtcactctcaccttcctgatctcctaccatcatcaacccttggcaatcactgatatgttttctacctctacactcttgtcattttgagaatgttatataaatggaattatacaatatgtgacatttcaagatcagcttttctcactcagcataatggccttgagatccatccaagttgttgcatgtatcaatagtatgttccttttcgttgctgcaccacagagatttggtaccatgttatctatactacagtttgtttacccattcacctgttgaggggcattgtagttgtttccatattttggctattacaaataatgcatccaggaacattaatgtataggtgtttgggtggacatatactttcatttctctgggataaatgcctaagagtgcaattaagggtcctatggtagttgttacatttaatttttttaacaaagaaactgacaaggtattttccagagtgactgtattattttacatttccattatcaatgcttgagaaaatcaggctctttatacatccttaccagcatttggtattgtcactattttttattttatccattttgatagatatgcattaatatgttatcatggtcctaatttgcagttccctgataactaatgaacatcttttcatgtgcttattcactatctatatgtcctcgtcaatgacatgtgtctttatgtcttttgcccattttctaattggatgatggattgattttttaaatgaataagcttaattttgttagagttgttttaggcttacagaaaaataagtaggaagaacatataccttcttatatcccaaccttcatttcccccattattagcatcctgcagtagtgtgatacatttattaaaattgattcaccaatacataacatccataatttaccttaggggtcactatttctattgaattttctatatgttttaacaagtgtataatgacaagtatctaccatttcagtgttacacagaatagtttcactgccataaaaatcccctgtgctccacctgtttatccctctctccctccacttgaaccactggcagccactaatctttttggctgtctccatcatttgttcttttttagaatgtcatacagatagaatcatacaatatgtagccttttcagattgacttatttcactaacatgtatttaagtttcctccatgtctttttgtactagtttatttctttttattgttgaatgctgttttctgatatgaacacgccacaattcatttatgcatttatctattgaaggacatcttgtttgcttccaagttttgacagttattaatgaagtgctataagcatttgtgtgcaggtttttgtgtgtacataagttttcaactcatttgggtaaataccaaggatcacaattgctggatcgtatggtaagagtgtgcttaaagttttataaggaaaggctgaactgtgtttcaaagagactgtaccattttgcattcccacaatgaatgttagtgtaggttttccaatatctttgtcagctgttaatttttttcagtgttttttattttatccattctaatagatgtgtagtggtatcttattgttattttacttgaaaattctgtaataacatatgatgttgagcattatttcatgtgcttatttgctacatgaacatcttctttggtaagatgtctgttcaggtcttttgcccactttttaattggattgtttcattattattgagttttaagagttctttgtgtattttgggtagcaaacctttatcaagatatatgttttgccaatgttttctgccagtctttagcttgtcatttcatcctttaaacaatgtcttttgcagagcagaagttttaattacaatgaagtccagattatcaattacttctttcatggatcatgtttttggtgtggtctccaaaaattcatcatcaatcctaaggtcatctaggttttctcctatattatcttctcggaaatttatagttttgtactttaaaacattaaaatagatgtaggtctatgatctattttcagttaatttttgtgaaaggtgtaaggtctatgtctagattcattttttgcatgtagatgttgatatggtttggctctgtgtcccaacccgaatccatgtggaattgtaatcctcagtgttaggggaaggacctggtggaaggtgattggatcatggggatggatttctcccttgctgttctcatgatagtgagtgaattctcatgagatccggctgtttaaacagtgtgtagcacctctccctttgctctctcttgctggcaatatgaagatgtgcttgcttccccttcaccttctgccatgattgtaagtttccggaggcccccccagccatgcttcctgtatagccagtggaactatgaaccaatagttcctttctttgtaatggaacaataaacctcctttctttataaattacccagtctcaggaagttctttatagcaatgtgagaatggactaatgcagatgttcagttgttccagcaccttttgttgaatactacacttcctccattgaattgcttttgttcctttgtcaaagatcagttgacttcatttgtgcggatctatttctgttcaactcatttatttgtctcttcctttgccaataccatattgtcttgatttatagctttctactaagtcttgaatttgggtagtgtcatgtcagatctcaaacactgttgtttaatattatgttgactattctaggtcctttgcctcttcatataagcattagaatcagtttagcaaaatgcacaaaataactttctgggactttatataggattgcattgaatttacgcattttgttgaaataactgacatcttgatgatattgagacttcctatccatgtatgtgaaatatgcctacatttatttagatcttttaaaaaattttcttcattagagtattgtagttttcctcatataaagctcattcttttttttttctttttactttttttggtgctaatgggaatggtttttattttattttcaaatttcatttttttaattgctggatgataagaaaacaattaacttttatctaatattatcattttatcctacagcttgccataattgtttacttagttctgggagagttttgtttttgtttattctttgggatttctacacagataaccatgtcatctgcaaagatactttttttctttccttccaatctgtatatctcttatttcctcttcttgtcttattgcattagctgaaactctcagtacaatgttgataggagtagtaagaacagacatccttgcctcattcctgatcttcgtaggaaaacatctagtttttcatcatcaagtatgatgttaagagtaggtttttcattcatcaagtatgatgttaagagtagatgtcattcatcaagttgaggatgttctgctcgaatcctagtttgctaggagtttttattatgaacaagtgttgaattttgtcaaacacttttctgtatctatttacataatcatgagattcttgtccttcagcctgttgaaatgatagattatattaatttatttttctatgttgaatcagccttccatcctggaatagatctcacttggttctgatatataattttttttacattgttggattcaatttgctaatattttgttgagaatttttgcatctctatttatgagagatattgttctatagttttccttcttgcaatgtctttgtaatactggtctcatagaatgagtcagaaagtattccttttgcttctattttctgtaagtaatccttacttccttaaatgtttggcagaactcagcagtgaattcaattggcatggtttctttgttttagaaggtttttaattattgatctaattttaaaatagatgtagcaccattgaggttatctctttctctttgtctgagttttggcaaattgtatccttcaaaaagttggtctattttatttaggtttttgaatttgtggccttggaatccattttgtttctttattatctttttaatgtccataggattagtaatgatggttctactttcctttctgatattagcaatgtgtgtcttttttcttaacctgtataaatgtttgaaaatttatttatcatttcaaagagtcagcttttttctttatttcctatttccaatttcattgatttctgctctaattcttattatttcttttcttttcttctgcttacattgcatttatttatttatttatttatttatttatttatttatttattttctgagacagagtcttactctgttgcctaggctggaatgcagtggcacaacctccacctcccaggttcaagcaattctcctgcctcagcctcttgagtatctgggactacaggcatgcatcaccatacccagctaatttttgtatttttagtagagatgggatttcaccatgttggtcaggctggccttgaactcctgacctcaggtgatccgcctgcctcggcctcccaaagtgctgggattacaggcatgagccactgcacctggccacattgcatttaaattgcctttttttctaggttattaaggtggaagcttagattatagattttagatttcccttcttttctaatgtactcattcagttctgtaaatttccctttaagtactgtttcactgcatcccacaaattttgatgagttttattgtcattttcattgaagtacttttaaatttttcttgagacttctcctttgaccttaaaatgtgttgtttgatctctaagagttttcgggtcttccagctatctttttattattgatttctaatttaattccaatgcagtctgagagcatactttgtataatgtccattattttaaatttgttgagatgtattttatggcttggaatgtggtatatcttggtgaatgttgattgtgagcgtgagaaagaaaatatattctgctgtcattggatgaaatattttacaaatattgatttgatccagttaattgatggtacttttccattcaattatatccttacctattttctgactgctggacctgtccatttctgacaaaggggtgacaaagtctccaactataagagtgagtttatctgtttctccttagagttctatcactaataatatagtaactgtgaaaagtagattctcgcccatcttcaggatttactggtttttgtttgtttgtttgtttgttttggttttgattgttgtagactacctctgtgctgaaaattggccttaggtgtaaactttttttcccccataagttattagggtacaggtggtatttggttacatgagtaaattcctttagtggtgatttgtgagattttggtgcacccataaactgagcagtatacactgcaccacatttgtagtcttttattcctcacccccgctcccactcttccccccaagtccccaaagcccattgtatcattctcatgcctttgtgtcttcatagcttagctcccacatatcagtgagaacctacaatgtttggttttccattcctgagctacttcacttagaatgtgtccaatcttatccaggtcactgcgaatgctgttaattcattactttttatggctgagtagtattccattgtatgtatatataccacagtttctttatttattcgttgattgatgggcatttggttggttccacgattttgcaattgtgaattgtgctgctttaaacatgcatgtgcaagtatctctttctaataatgacttattttcctctgggtagatacccagtagtgggattgctggatcaaatggtagttctacttttagttcttttaggaatctccacacagatttccatagtggctatactagtttacattcctaccagcagtgtagaagtgttcctggatcaccacatccatgccaacatctaatgtttttgattttttgattatggctattcttgcaggagtaaggtggtattgcattgtggttttgatttgcatttccctgattattagtgatgttgagcattttttttatatgtttgttggccatttgtatatcttcttttgagaattgtctattcatgtccttagcccagtttttgatgggattgtttgtttatcgtgttactgatttgtttgagttcattgtagattctagatattagtcctttgtcagatgtatagattgtgaagatttcctcccactctgtgggttgtctgtttaccctgctgactgttccttttgccatgcaaatgctctttagtttaattaggtcccagccatttatctctgtttttattgcatttgcttttgggttcttgttcatgaaatccttgcctaagccaatgtctacaagggtttttccaatgttatcttctagaatttttatagtttcaggtcttaggtttaagtcctcaatccatcttgagttgatttttgtataaggtgagagatgaggatgcggtttcattctcctacatgtggctagccaattatcccagcaacattagttgaaaagggtgtcctttcccccactttatgtttttgtttgctttgttgaagatcagttggttgtaagtattggatttatttctgggttctctattctgttccattggtctatgtgcctatttttataccagtaccatgctgttctggtgactatggccttatagtatagtttgaaatcaggtagtgtgatgcctccagatttgttctttttgcttagtcttgctttgactatgctggctcttttttggtttcatatgaattttagaattgtttttttctatttctgtgaagaatgatggtggtattttgatggggattgcattgcatttgtagattgcttttggtagtatggtcattttcacaatattgattctacccattaatgagcatggaatgtgtttccatttgtttgtgtcatctatgatttctttttttttttttttgagatggagtctcgctctgtcacccagggtggagtgcagtggcatgatcttggctcactgcaaccttcacatttccaggttcatgccattctcctgcctcagcctcctgagtagctgggactacaggcacttgccaccacgcctggctaatttttttgtattttttagtagagatggggtttcaccatgttcgccagcatcttcttgatctcctgaacttgtgatccgcccatctcagcctcccaaagtgctgggattacaagtgtgagccaccaggcccggccccatctatgatttctttcagcaatgttttgtagttctcctggtagaggtcttcaactccttggttaggtatattcctaaggtttttttttttttttttttttagctattataaaagtgttcttgatttgattctcagtttggttgctgttggtgtatagaagagctactgacttgtgtacattaatcttgtatccagaaactttgctgaattcttttatcagttttaggagctttctggaggagtctttaggattttcaaggcaagcaatcatattggcagcaaacagtgacaatctgacttcctctttactgatttggatgccctttatttctttctcttgtctgattgctgtggctaggatttccagtactatgttgtaaagaagtggtgagagtgggtaaccttgtcatgttccagttctcagagggaatgctttcaacttttccccattcagtattatgttggctgtgggtttgctgtagatggattttattatattaaggtatgtccctttatgccaattttgctgaaagttttaatcataaaggaatactgggttttgtcagatgctttttctgcatctgcatctattgagatgatcatgtgatttttgtttttaattctctttctgtggtgtatcacatttatttacttgtatacattaaaccatccctgcatccctggtatgaaacccacttgatcatggtggattatctttatgatatatttttggatttggttagctattattttgttaaggattttagcatttatgttcatcaaggatatctgtctgtagttttcttttttggttatgtcctttcctggttttggtgttagggtgattctgacttcatagaatgaattagggagggtttttctttatcttctgtaatagtgtcaaaaggattggtaccaattctttgaatgtctggtagaattctgctgtgaatctgtctcgtcttggactttttttgttggtaatttttaaattaccacttcaatctcactgcttgttgttggtctgttgagggtatctaattcttcctgatttaagctaggagggttgtatttttccaggaatttctccatgtcttaagggttttctagtttatgtgcataaatgtgctcatagtagccttgaatgatcttttgtatttcagtggtgttacttgtaatatctcctgtttcgtttcttagtgaggttatttggattctctgtcttcttttcttggttaatcttgctaatggtctatcaattttatttaacttttcaaagaaatcagctttttgtttcatttatcttttgtattttttttttgtttcaatttcatttagttctgctctgatcttggttatttcctttcttctgctgagtttgggtttcatttttttcttgtttctctagttccttgaggtgtgtccttagaatgtcagtttgtgctctttcagtcttttcaatgaggtgtttagggctataaattttcctcttagcatcccctttgctgtatcccagaggttttggtaggttgtgtcgttactgttgttctgtttgaagaatttttaaatttccatcttgattttgtttttgagccagtgctcattcaggtgcagtttatttaatttccatgtatttgcatggttttgaaagttcctcttggagataatttccagttttattccactgtggtctgagagagtgcctgatataatttcagttttcttaagtttattgatgtttgttttatggcctattatatggtctatcttggagaaagttccatgcgctgttgaacggaatgtgtattctgtggttgttggatgaaatattctgtatatacctgttaagtccatttgttccaggatatagtttaaatccattgtttctttgttgactttctgtcttgatgacctgtctagtgctgtcagtggagtactaaagtctcccactattattgtgttgctgtctatctcatttcttaggtctagtagtaattgtttgatcaatttgggaactctagtaataggcacatatatatgtaggattacaatattttcctgttggacaatgccttttaccattatataacgtccctctttgtctcttacaactgctgttgccttaaagtttgttttgtctgatataagaatagctacccctgcttacttttggtgtccatttgcatgaaatgcctttttccaccccttaagtttatgtgagtccttatgcgttaggtgaatctcctgaaggcagcagatggttggtgagttattatccattctgtggatctgtatcttttaggtggagcatttaggtcatttacattcaattttggtattgaaatatgaggtacccttgcattcatcatgctctttgttgcctgtgtactttttttgtttgtttgttttttgtttttgctttttaacttgtatttttgctttataggtcctgtgtcatttatgctttaaagaggttctattttgatgtgtttccaggatttgttttaagatttagagctccttttagcagttcttgtagtggtggcttggtaatggtgaattctctcagcatttgtttgtctgaaaaggactgtatctttccttcatatatgatgcttagttcagctggatacaaaattcttggctgacaattgttttgtttgaggaggctgaagatagggtcccaatcccttctggcttgtagggtttctgctgagaaatctgctgttaatctgataggttttctttgtaggtaacctggtgcttctgtctcacagcttttaagattctttctttcatcttaactttggatagtctgatgtgcctaggtgaagatctttttgccatgaatttcctaagggttgtttgtgcttcttgtatttggatggctgggtctctagccaggtcggggaaattttcctcaattactcccccaaatatgttttccaaccttttagaattctcttcttcctcgggaacactgattattcttaggttcaacataatcccagacttcttggaggctttgttcatattttcttattcttttttctttatctttgttggattgcgttaattcaaagaccttgtcttcgagctctgaatttctttcttctacttgttcaattctattgctgagactttccagagcatttcacatttctaaaagtgtgtccaaagtttcaagctctgaatttctttcttctacttgttcaattctattgctgagactttccagagcattccacatttctaaaagtgtgtccaaagtttcctgaagttttgattgctttttctttatgcatctatttccttgaatatttctcctcttacttcttgtattgttttgtggattttcttgcattgggctctgcctttctctggtgcttccccgattagcttaataactaaccttctgaattatttttcaggtaaatcagggattttttcttggtttggatccattgctggtgaactagtgtgatttttttggggggtgttgaaaagccatgtgttgtcatattaccggggttggtttcctggttctttctcatttgtgtaggctctgtcagggggaatatctagggctgaagactgttgttcagattcttttgtcccacagggtgttcccttgatgtagtactctcccctttttcctatggatgtggcttcctgtgagctgaactgcagtgattgttgtctcttttctgggtctggccacccaggcagtctacccagctctgggctggtaccaggggttatctgcacagagtccttcagtgtgaactatttatgggtctctcagccatggataccagcacctgttctggtggaggtgagttggggagggggtgcaatggactccgtgagggttcttagcgttggtggtttaatgctctgattttgtgctggttggccttctgcaggaggtagtgctttccagagagcatcagctgtagtagtatggagagggcccagtggtgggcagggccctacaactcccaagattatatgccctttgtctttcgctactagggtgggtagggaccgaccaccaggcgggggtggggctaggcatgtctgggctcaggctttccttgggtgggtcttgctgcggctgctgtgggggatgggggtgagagtcctaggtcactggagttgtgtacctaggaggattatggctgcctctgctgagtcatgcaggttgtcagagaagtagggaaagccagcagtcacagccctcacccagctcccacacaaaccgaagggcctgtctccctcccaccgtgcccctgccaagagccccaagtctgtttctgggcatgggcgagaggggcttaaaaacttgccccaggctacctacttcccagctatgaaagaaaagggcttggtttttcccctccctctggagcctgcacaccggatttgcaccgtccccgagttctggccaggaggcttctcatccgttcgaactgttacaatgttcagctggagatttccttctccctgtgaagttttacccactgctcctctggctgccttcccaatggatccctgtggtgccagcaggaatgacctgcttgggaacccagtgagttcccagtgcctttctgctgcttcctctacccctgtattttgctcgactgtctaaattgactcagatccaggtaaagtcggaaacttctcccgcaacagaccttcactttctctagtgggggtgtgtgttcaggagaggagggtctccctttcccgcttctgcagctggggcactcacagtacttagggtgcctcctgagacctgcaggagcatttcacttccttcacagagtctgtgggtcctctcgggattgctggtttgttcttgcagtcaacctggagctaaaattcacaaatgtgagcctccacacgctgctctgtccagtgctgcaatctcaatctagtcctgcctcccatatgccatgatgattggccttaggtataaatgtaaggttctttcagttattttctgagcctgtgtcttttctgggtatgtgtgatgactttctaatttcccctacataggtgttagtctttgaatatccaagtcttcacactgtctgtatccttaaaaagggaaaagaggaaaataaggggggaaaaaggcactggccctttttatcccccagaagtcacttcagttggataaggtgggtcttgcagcaatgggcagggtgtacaacaatggccaccacctctttgcacctgtgactgggatcagtaatcaacaatcaacaatcaaagtgcagactcccaatatttggaggacagttccctttttctcactttggctcttgcaagctctgtgcaagctgctccagggacacatgctcagctatgtgccatgggcctgggggtggtggatgggtaggtactactgtactagagctaaaattgaccaaaattaactgtattttcctgtccaacccttatattgaagttgcaagccttcaatagaccccagagtttcaaaataattgcatcaaacagattctgccagtaggtaaaagttttgtttagctgggagacagatttcctggtgcttcctactccttcatctcctctttaccctatatctgtaatgctcttttttatccctgacaattttctttaacaattttcttgatccactttgtctaaaattaatatagctattccagctttattttcattggtgttagcatggtatatttttctacatcgctatacctttaatctgtatcttgacatttaaagtgcatttcttatacagaaaatatagttgggtcttgttttcttacccattctgacagtctgtgtgctttattttatttttaattattttaattttaattttttatttcaataggcttttgtggaataggtggtgtttggttttgtggataagttttttagtggtgatttatgagattttggtgcacccattacccttttcaattagtgcatttagaccattgatatttaaaataattattgatgtagttggataaatatctacaatatttattaccttttcctatttgctgctcttattctttgtttcatttttggtcttctattctttgccttctcttgttttaactgagcattttatagaattccatcttttcttctctcttagtatgtgaatcaattttttttctttttctttttttctttttgagatggagtctcgctctgtcgcccaggctggagtgcagtggcgcgatcttggctcactgcaacctctgcctcccagattcaagcaattctcctgccccagcctcccaagtagctgggactacaggcgtgtgccaccatgcctggctaatttttttgtatttttagtagagacacggtttcaccgtgttagccgggatggcctcaatctcctgaccttgtgatctgcctgcctcggcctcccaaagtgttggccaggctagtctcgaaatcctgacctcaagtgatccatctgccttggcctcccaaagtgttggggttacaagcatgagccaccatgcctagtcagattttctttctttacatcaaatattacaagcatttttttcaggtcattatatatattatataaaagtataattttgttaaaaaaagtcgcatagtactctattatatctctatctttcccagctatctctctcatatatacatatatgtacacacatacatataacataaataaatataaatgtaatttatttaataggaattcacatatatgtacatatatgtatgtatttgtattttatgtattcataaaattcatattttatgaactcctattaaataaattatatattattttgtgtgtgtgtgtgtgtgtgtgtgtgtgtgtgtatagatatatcctaatatcctagcaataagctagtgttaaacagttgagtttttttttttttttttttttttgagacagagtctcgctctttcgcccaggccggagtgcagtggcgctatctcggctcactgcaaactccacctcccaggttcatgccatcctcctgcctcagcctcctgagtagctgggactacaggcgcccaccaccgcgcccagctaattttttgtatttttagtagagacggggttttaccgtgttagccaggatggtctcgatctcctgacctcgtgatccgcccgccttggcctcccaaagtgctgtgattacaggcgtgagccaccgtgccctgccatcttacttacatttttttttttttttttttgagatggagtctcactctgtcacccaggctggagtgcagtgatgtgatctcagctcactgcaaccactgctacttaggttcaagtgattctcctgcctcagcctcccaaatagctagaattacagatgtgcaccaccacacctggctaatttttgtatttttggtagagatgaggtttcaccatgttggtcagactggtcttaaactcctgacctcaagtgatctgccagccttggcctcccaaagtgctgggattataggcataagccacagcacccggcctacttacattctttcttgtagtaattggtgcacttaaaaattttattcatttacttatttacttatctataatagcttatgtaaacaaagtaaataagtaagatacataagtggccaggtgcggtggctcacacctgtaatctcagcactttgggaggccaaggtgggcggatcatgaggtcaggagatcgagaccatcctggctaacacggtgaaaccccttctctactgaaaatacaaaaacaaaattagccgggcatggtggcagtcacctgtagtcccagctacttgggaagctgagatgagagaatggcctgaaccccgggaggcggagcttgcagtgagctgagatggcaccacttcactccagcctgggcagcagagtgagactccgtctcaaaaaaaaaaagatacgtaagtatcttatataagtaagataagtaaatgagaaaatttacttatcagaatttcttgggaatgatttatagccctgaaattacttaatgaaagagatgggttttttttccccaagactttgatacatactctcacattctacttcaaaaacattgtaccaatttataccaaaagtttctttataaagagttattaaacataaaagtcatgttaaaatagtgacttctactgaaagaaatgtaatggtgaaattgctggaagtgccaagtaatacaggcactaagaaatgactcattcattcattcattcattcatttgctaagaggaagtaatttacgattttcttaggagtttatttactagagtgtctgtgggtgaaattcagattccactgggcaaatgaggaaatgaaaaatgtgggaatggattcctttataaagaagtttgcctgtgaaggaaagaagagtaaatagtgccattgctggagcaagttgggccgagggagatgtgctgagagagagatttatctgtgcatgtgaaggagctggtggaggaggcagaagcacgaaagagaagactacacatttcattaagagaaacaaaatcaaattttattttctttgaggaagatggaaggaccaaattaatatgcctctgttggaattttgccctaaagaccaaaattccagaacattctgctgatagaagccacagatgtgggccaattgtaggtatcggatcagagaggagaatcacttttttgccgtagactgccccatgcaccggcaccgtaccagccctggaggtgtgtggcgagccatggtccctttcctcatggcatggttcttggtggggaagacaggtatgttcccatctccacgccatttgatgagaacaatgcatatatacatgggtagagggcgcaaataaacttcctagaggggatttggaaagcctgttgctgagagagaacacaggagctgtgtcaggggatatccaggcaggtacttctgggcatggtgcctttcttgttggagggaagagggctgcagcgtacagagatcagaaaagcacaggacattccaggaaatgcaccttgtttgttgtctttaactggcagccaaaggattgtaaagctggagagagtctgggccctcataggagaggggttggagcctgagccttgtctcactgcccagctgtgcccttgtggttataactgggcatgtgcataatgactatatgcgtccttctgggatgtagccacatggtcttcattatattctcaaaggggctgtagatcccttaaaattgaagacttgctgctgagggcaaggggcacatttggcagggtttgaaccagaaaagctgaatcattgcccttccatgaacaggcttggggcttgtaataaagtttccccttgtttctcaggacagcttgcttccctaatgagccagcttgataaggtcgggccacagagggcgatgcctgcgaggcacttacgtgagcacagagggctagtcgaaggggcaaggatgcagaagagaaggttgtgctgggctctgccactgcaggaagactgtgggctctttgagatggaggcctgaactgtcccctacccctccttccccctgcacaaatgtgattatgcctctgcagagcgcctggaatcaggttagcgtcattgagcaatgctgagctggagtaatcagagcctggagcggagcaggtgctggctttaaagtggcttctgagaattaggacaggctgacttgtagctcagccccacgtagacaagccacttagaacactgtccttgcagcccccaggcctcctccttaccacagcaaagtgcttgggtttgttggaggggcctctggcatggcccaggtgctgagctcgttaactgatgttcagggactggtgtcccaggggtcctgtttgcccagcatgtggcaggacaacaagagctaaccaagcctggggtcacatttggtctgctcctgcctatctgggtgtcctgggacaattacccacctcttggagcctcacataagtcaactgtaaagtgggaatcacgagcatatctaactcataaggtggtggcaattaaatatcatataggaaaggctgtcagcattaggcctgctgcagagttagccgcaaagaacatcacccctattctcaacctaggccactgccaggacaaggccgggttttattgtttctgcaaagatgtttcatactcagaacaaaaaaaatcagtaattacataagaatctaagaataaaggtttatgttaaccaaaatcttaagagaaatgcagtattactgtttggtgaacatcactctagatactcttctatgcacacattaatagagagaaaataattttaataagggcacatttaataaatttttaataatagaagttattggctgggcatggtggctctccccagtaatcccaacactttgggagaccgaggtgggtgaatcacctgaggtcagaagttagagaccagcctagccaacatggtgaaaccccgtctctactaaaaatacaaaaaattagctggatgtggtgcctgtaatcccagctactcgggagactgaggcaggagaatcacttgaacccaggaggtggaggttgcagtgagctgagatcgcaccactgcactccagcctcgacaaaaagagtgaaactccatctcaaaaaaaaaaagttattgcatttagtttagtgtttaactgaagaaagtcagatgaaacagaaggaattgctaaactagagatatgtcatttctaagatatgactctgggagttgagaaaataagtttcaagcaatattaatattgttaagtcattctttttcgctattctcttaaggataaagataaggcattctaagactctcatgctctacaaactgagtagccaggtgtcttagacaaagtgctttaacattcaattatatgtcaagatgaaattgcaaatagcagagaaaaacaacacactgacttcaattcccactaaatgacttatcttgccaaaatgaaacaaatgcggagaattattgatgcttgacatgaggaggggacatccagaggttaagaaaggatgctgacagcaccaggagaaacattgaggtatgcaagatgttagcccgttggcacctgatagaccgggcaggtctgtaagtgcaatacgttgctttgtaggtaagaaaaataaagcccagccaggtgccaatgtgacatggagttgggcctccagcccaggtctctgtgccccacatacatggtttaactatctgtattcactgtgcctttttactatctgtgcttctgatgctgtgacacctttgggtcttgctgaccctggagggactgcccttctcagggagaggggtttcctagagctcttaaaggactcacttgcaagttcacctttcttttcttttcttttttattataagttctagggtacatgtgcacaacgtgcaggtttgtacatatgtatacatgtgccaggttggtgtgctgcacccattaactcgtcatttacattaggtgtatctcctaatgctatccctccccactcctgccaccccatgacaggccccggtgtgtggaactcaaacaaatttgtaaaaaaaaagcaaattcacctttgaaatgcaaaatcatcagtacagagctcctaccccagcatctcctctgtggggctctcacactctgggctactatcctcctgccctgaccactcaagggctaggtaccagacatctagggacagccactgctccaaatgtgacctggagcagaccaaatgcgaccccagagcccactgaaattattcaaaccagccgatcctaatcctgctcacccttgccctgcctggttcttcctgtggaaaccacaacacaggcccttgccgctgtttttcccccacccctctgctgcccaactgatcctcgtgcttccccatgtccccctccccttggggactgtgaggaacaagctgtttttaatggcagtcatctcctgacttgttgggctcaccatcctgaacaagaagaaagcctacatttaaacagactgcccctcctgcgcctgagggtagccccttgggggactgactcccttgggcatagctcagtgacacagagagcccttccagagtccagccaggacctgttttgggcccacgccccggggtttggcatggaaaactctggtccctgagcaggcatcgctctgtctgagaagtaccttgtccagcccagccacctgtgagaggagcagggcaaagctggtgagacgaaccttctgcaggctgactctgtgctacctgggcatgaacactttgtctctctctaaaaggaaaagttggtttccaggtgaaatgcgaggcagtcataggtgaaatggagccacaaaggtctcgaactggggttctcacatacgagtttctgacctctctatctttatcctcaggacacatggcattgctaagactttacagggggctcaataaaggtcacacaaatttaattctattccacactcttgtcgcatctgcaaagaaatttcattatctagactgcatgacatccataaatcaattaggccctttggttttgtaaacataatgtgcgttttgatcctttggagagagctgtttcaattcagcaataggtttcagcatctatgcaatgtccagcaaagtgcaaatgctcagcccaacacaaaacaatgagacagggtccctggctttgggagcatcatgggtctggagggagagacagacatgtgtgtggggacaacacagtcaggctgtgccagtgcgatcgtggcaccacaaggtcctcagagctcgggagaggccgcagtgactcccagcccgtattttctgggttgtgtgactgacagcactcaatgctttctcagaacatcccttttaaaattattttcaatgtcagcagtgttttctcatgacctcctgaggatttaattaatctttgggaacagtatcattcagaaagagaaaggcagcggattaaagctggtaaatgatactcttgctcaaaatcctagtgtgactcttaactgatgccaaagtctgttctgaaagaagcattccatgagtgccttgggcagtctgggccctgctggagggagactcatctctactgcgcttgctctgctctgtgcattgcacatgggtgtatgcacacacacacgtgcacacacacagacacacacacacccccccaaactaggaaaaaatcccaggcttctgctccatagtagtaactatgttcttacattctctatatatgtatatatatacacacacatatatatatagaaaataaaatatatacacttgtgtatattttaattataacttaattataaatttaattagattataattaaattaaaatgtatatatggaatataagaacatagttacactaatgttacatagaacgttaattaaaatttaacaaaaatatacacacatacatatatatgtatatttaataaagtagaatatagtatatgtatatttactaaagtagaatataggtatcattgtccaggtggtagattgcttcatgtctgccccaaggcaccctggaaaatcttttgcaacttcccggtttctaacctcagagcttagttttctgtctgcaaatctgtttctcttaacctgttatgatgctttcacccaaagattcaatgtgcatccatgggcttacgtttccatgtagcagacattcattgggatctcggctcatggccccaggttggaccatggggcagcagttgcttgtgtggaggttacagcggtgactggcacctggggaataaaaggctgtctgctttttaccctctagatggttgccaccctggggaccacaacatgctgctcctttgacaatctcttagaagtcggtcctatctgtaagtatccgattccattttctttttggaaaatgttctctgtacacggggaatttagcaaaccttcctcgttgatctctttcttgtcgttaacttcatattgtgatggtttgcccagctcttctcgtatttgcaataacacaaacctcattagcttgaactccacaaactcagaatttgggctaattggaaaagaactgagcttagttctaccaacacactatttgtaagaaaaaaaatccgagcaatatagaagttatgtaaaattgcaggttatgttggccctgttgaggagaataaactcttcaaaatcttagagtaaccaccttcatatgtgggtcgtgcatacacctgatatgagaattgtccacacttgaatttaattctttggtatatccctttttcacctttttttggaattactgaatgcagttaagaaaattgctgaaggtagtttagcaaatcaacacaatgaaactggatttcgccaaggaataatctgtgcttcagatgttttcctggtcactctcacctcctcccttcctcattcagagatcctaggttttctcattgagactaggatgctgtgttttcaaaaggtgaatgtgaatgagcagctctgtttctagagtttcacctttgacatgtagctctgggaactcagcaggtcttgaagctgcttctgtggacagaagaaccctcgtagggcagggacactggctcagggggctccccctttctctgtccctctaggatgggaatgttctgaccgctcggctgtgagtggagctgcccaagtggggccttcagatcacatacctgtggcctgtgccagatcccacaacagctaccagggaattggcttcctccttagtctgcacaagccaagcacagttctcacctctcctaacccaagagtcacccatagtccatactcagaggagtggaccctcctctcctgggcgttggcctcccttcttggggtcagcagctggggaaggccggtgctgaaggtgcaggtgcctttgtgtgagctagacatgaaattggtgacaaggaagctagggtgcagcccaggatccacccctgaatcttacattctgagcttcatttatgctgtctgtaaagtgaagagaaaaaccccacttgtgctcataaaataacaagatttccccacacgattattcagaggataaattaatgcagggaaaatgcaccatcccaaaggtagagtgcattgctgcacagcaaggaatgcagtgctgggaactactgggaggtgggtggcatagacttacccgctctcacagggtttatgctccaccgtttatgctctgtggcacacagctgtaagaacaactggcgggaagtggtcgtgcacagccccgggctggggagaagggatagaactggctgactcaggactgcagccacagcattggcctcatcagctgcaaaccttcatcagctcagccaagcaacttggagtcctctgactcagatgtcaggctaagaactgaatgtcctggccagtagctggctgatgtaattccctagggctatcggatttaaagggccgaggtcttctgctggatagagcccacatggcctgctgtcccctgggccaagtgtgggctgcccgctggaccatggagatgacagccagcgtgtgtcacctgccagtcacagtcccctggatggatccagctcaggccttcctgctatctggggccccctcttctttgtagaggctggaggctgtgcacagagcttgatttatgatttgtttggtttgaaacactgaggttgcttttggggttgtgcagaaggagctgacatgggtgaatgccaaaaccctttcatccattggcagaatgcataggggaggtcagttttgacaattcctttttttttctttatttttgagatggagtcttgctctgtggcccaggctggagtggcacaatctcagctcactgcaacatctgcctcctgggttcaagtgattctcctgcctcagctttctgagtagctgggatcacaggcacatgccatcatgcctggctaatttttgtatttttattagagatggggtttcaccatattggccaggctggtctcagactcctgacctcagatgatatgcccgcctcagcctcccagtgtgatggaattacaggcgtaacccactgtgtccggccaacatttccatttttattgatggtgttatattactaactgttggtggtaccttaacaattaagtcagcacccttttacctactttccctctcctgctaccattttcctatcaccagatatttagcattctccaactccaagcgggactgttctgagatcctgagctgaccttattctatatatgattagaataatctaacataattcagataagttattcacccaccatcatttgacaaagaaaacaaatcagaagatggttttcttccaattgctgccttaggaaagacattttctttttattgcatttgaaatgatttgccagtgagggtattcagattggtctgcttggatggatcagttgtctggcaggttttactgagaagatggaatacaaaaagtggatagttgaagtcagttaggttgccgatggggaagtggggaaactgaggacgagggtatgggctgagttggggaggccatctcaaggtgtgaggaagggaatagcacagggcaggcagccaaagctgcatcctgaggtgccagcataactgagagaggacgtgcagctggaggggcagccaggcctgccgcaagttcctgggaagtctcagaaggaaagagtcactgacagcaggaagctggaggggtgtgagcctgtcccatccctccccactgaggcagccttgcctcagggctaggtgtgcccctggtgcatgcaacttctcaagctctggccgagggtctctgtgtctgcctggttcctagatgggccgtgctatgcagtgtgtgctgttagtggatcacatatgagatgcagaatgcagaatgcagaggcatgcccacagctccatgcatccccatggaaaccagagaagcccttcagagtccacttcctttaggggtctgtaagttcccttctgcaggagttgtaggccaactgcaagcttagagagaacacagtcctccacaaagctgataaaagacataaggcgtttcaaagctttgactcagtttaatcatcaggatgaaagccctcagttggattaaggtcaagtgtgtcctgcggacacggatatccaccccagggcatgggaggccaaaggtcacagagcagtgtggacctgaaccgaggcttaggggctcatcacttcccccagaatcagtctcacctggtgcttgcataaccccagatggatgcagcagtgagccaggaagagcacaaggccttaggatttgcagagtttctccctgaggagtcactcagtaatcatgggatgtccatgcctgtagctcagatcagcggtaaggttgagaaaaacctcagatcacatcataagataggtgtaaatttgaagcttgctgtagtctgaacgtttgtgtcccccgcaaagcccatttgctgaaattctaacctaaggtgatggtattggaggtggggccttccagtggtaatgaggtcagcacagtggagccctcctgattggaactgtgactaattagtgcccctgagagtctcacgcctcattgcacaatgagcaccatggatggtgagtgaacggtgaatccatggatccctacaaatgcatatgctgaccctgacacctaccccacggtaccctgacactggtatccaccctgtgaggtgagggtggctcgcgccctctctgtggtccttcacccttcaactcttactctcctgggtgcctagggctgagaggcagcaaccatggaagccacatttatttctcccctactcagtgctggggtcctggcaagcacattgtaaatattcccttgctcatcccttgggcctatgggtactatttcatctccatcttcctgggaggagagtgaggcttggagaagtagatagggccccttggctggggagcaactggaagcaggagttgagcccagatctgtcaaaattgagggagcatgctacatctgtggctctcccagctcctgaatgaggcagcccctgcccacaaggctgctatgcatggttggaaaacagaaccctgttcatgaagaaagcaggggatggtctaagatggtgtaaagtaaagaacttcacctggtggtggggatggagtggggcaggtagaggtcagcgtggactgtgtgcagacctccccttggatgatgtttgggggaggacttgagaatggattagcaaagggaaccaggaagggaattccaggtgggtggaaagggtggtgtcactggagagaaatgcaggtgagtaacatgaggctgtcacacgatggtcccttggagttacacttagccgccagggtcaggagagaaaaccaagtggtgcagtggcttccattttccctggtgtgtctggggccagcagcacacacactgccctcagctttagaccctttgaatgagggggccttttggggattcagccattagttcagcaaatactgttggcatgctctacccaagaaggtgctcagacagggcgaggtcagctggcaggctccgtggtgaggcatccatctggggactcacaagttgattctgaactttaggcaacaaggaagacatatggctgcacgttgatgcagcctacgcaggcagtgcattcatctgccctgagttccggcaccttctgaatggagtggaggtaggtgcacccttcgctctccctaaggctgttttcacagtgctctgttattgacctctcccttcatgaggagctgacgtccagtctcttgctattgaggtttgtttcagccaattatgtttgaaccaattccgacttcctcagaataggggctgagagccttccccagccatacagcctgtcctcctgaaatactcctgacacttacagttccatttcaatctacacaaatcccaaacagaaagaataaatgttagcttataaaactgtgggaaagtaggaacaaaataaaatcttaatgaacttaaactcaaaagagtaatttaaaataccaacccgcaattccatacaatctggttcaatatgacagtcatgttctgcccatacatctgaacatgatattcactttaaccaatattgaacgagaagctaccaatgcatttaaatgcccctaggcagtcttctggaaattgtaaagcatgatctttaatgctaagtgaaatgcctgcttcttttgagaagtagcaatcaaaattattgaccagcactccgcttctccaaaaagcaacagaatgtaaattggtacagacttaacacaaaaaaatgaccttattgatatactgtggtgtgttatttcagactcaagcgggatttcattgttggtggtggctcatagggtaggaagtctcttctccccaagaactcagctttgaatgccatagagggtcctgagaggcagtctttggcagtgtttccaagagaaggaggtagcaaagcaggggagctgtggcactggccaagaaagaaatgctttctgccaaggggcaggaggtgtcgtgagacctcacccatgtgtgatggcagatgaagggcacagtcctctgcattagactccttggtttgaatcctagatttatccttaagactagctgtgtacccttgggcgagttagatatcctccctatcctccagaaaatagatttcataagaatacatccggtgtgggattgtcgccaggagtagatgagttaatcatgttttaagggcttaaaaacagtgcctggcagacagtaaatactgaaattgcattaggtgcttttgtgattttctactacgtcttagaaaaactttcccttgacagcttcctctgcttgcatgtcaggtttgctaatcactattctaattacaactttgaattctcataatgctgtaataccagaaaagagggtaccagaggtatagaatacaaatgtccccatctttggaaagaataatcctcttactactaatcaatgaagtagtattctggtttatgtctgcatcacaatcattcactcattcattcaataattacttgttgagtacttaatacaacctaggacttacatgatggatccttgggggtaaatggagcttccaaagacctatgtacgcactggagagagggtatagtatatgagaagttctcataatgtgatgccagtacccagctgatatagttcattgccggtagctagtttggtgcgtgtttggtgctgggaaacgaagagtaaatctctgtatcatataaatgcatggcatgatggagataatctccattatttgaaacatctgtcctgggacagtttcaagggaggaagggctaagcagtcctctgggatttatgtgccctccccacggctggcctgagcttgatgctcttttctaactctgggtatcaggtttagggttcgtgatcttttcctaccactgctcttcttttccccaagaactgacaacttgaggtttcatctttcatagaagggtgcctcattgtcagaccaccacagcaatgggctttccagccagatcctatcagcaacagacaggatttcatgctgtacaatgagtcactgccatttttcttgcattattgctcccgactctttccatgcccagctgagggctgtgcgtctcagtggggcagataaggaggctgcaatatcctgttgtggccctgcccttggagataagagcctttctctccggttggcaggaggaaaatatcactgctgggtaatgagagaagtttaaacagatcagccccataggagggaactcataagactcctagcaaacagagctcctctttaaccttttgtctccttttatcaacaaatgaaacttgctgtaatttcctgtccttttctcaaaattacttttattaaaacctagaaggaaatgaacctgggtctccagagcagtggaaagttgtcatccaccaaccaaatgcctcccaggacgccccccaggtccctcaagcttctgctgcctcctcggtgcacatccctgaaaccaagtagacaggaggtgccctagggccttgggaagactgaaaagtttcccagtaggagagtcggccagactggcgcctcactgcaacagccacctttatttcggtatcaattatgaatccagccgcatggccaaatccctggccattaaggtggaccctgttcctgttcaccagtcaggtgataaaccaggacatgcatttgaaaaagaaagcaccatttatgacagctcagggaaaatgcagagtgtcctcctctgccactcttggtggtttaaacctcttattttctccttgaaaataaggtagcccctaacactgatgcatgcagccagagccggttgttcacagtttttacccaggatcttccagctacgggagcctgtagctgttaggaatacaatgaactttaaaaataaaggagctggtcggggtgcagtggctcacacctgtaatcccagtactttgggaggctgaggcaagaggacggcttaagcccaagagttcgagatcagcctgggcaacgtaatgagacacactgtctctacaaacaaaattttaaaaattagctgtgtgtggtggcacacgcctgtagtcccagctacttaggaagctaaggcaggaggatcacttgagcttgggaggttgaggctgcagtgagctgtgttcatgtccagcctgggcaacaaagtaagaccctgtcgctcaaaaaaaaaaaaagagagagaagcatttaggtaaatgaggagaattgttgatatgttacagcaatgctggcaaaagaacccatcaattaaatgaaaactgggtttacccctatctactgtagattagtaataaaatttcctctttcccactgtttatcatgacacgtgtagtctgagaactttgctagctcagcaagtggaaggaacttcaagcatgaagtattccacaggccaaatcagtacaattcctgtacgttgtgcttgtgaaggacaattctgatttttccaaatattccagtaatttaaaatataatatggatacattttatgtcacattagattatgtaaatttgaaaatgcttttcatttgggaatataaacttttaattttaaaattcttgttccattttatgagagtataatctagatatagcaaaacatacaaatcaactctaaatacatatacccacccccatgtacttaccacccagatcaagagtagaacaattccagcactccagaagactcccctacccactacaagttactactcccctgggcaaccctacctggcccctaccactgtggattagttgtgccataaacttttattatcatgtatggggtcttctttataattaaacatttataaagaaaatgttttctttttcttactcttgttctttggcagtttgcagattcattcaactttaatccccacaaatggctattggtgaattttgactgttctgccatgtggtaagtttccctgctcacagatgtcagttgcctgtccgaggtgacagtgaaagaagctggcagggaagatgccagagccaaaggggtgcaatagtcacttagctcactgcttgctgccttttctgaacccttgatggaattattgctaattcttagcctcactggaaacttttatctagggaatatcattgcaacatactggcataagaaatgagaagcctaaaaaggacaattttttatttgatttatccagcattgacagaaaacaaatgcaagtacacacttctaattcagtagcttgtgttttcattcttagattcgtaaccagtcttagtgtaatgctaagtttaagcaatctgagtccaaatgcttaaaagtatttgctaaggccgggcacagtggctcacacctgtaatcccagccctttgggaggccgaggcgggtggatcacctgaggtccggagttcaagaccagcctggccaacatggtaaaaccccgtgtctactaaaaatacaaaaaattagctgggtgtggtagtgcatgcctgtaatcccagctactcaggaggctgaggcaggagaatcgcttgaacctgggaggcagaggttgcagtgagccgagatcatgccactgcaatccagccttggcgacaagactctgtctcaaaaaaaaaagtattcgcgaaagaaaaataatagtaaccatgtttcctaagaatttccctggaaattcttttcttcctctcttttttttttttcgagacagtgtctcactctgtcgcccgggttggagtgcagtggtgcgatcttggctcaaaatcttttctttctttctttcttttttttgagacagtgtctcattctgtcgcccaggctggagtgcagtggtgcaatcttggctcactgcaagctccgcttcccaggttcatgccattctcgtgcctcagcctcccgagtagctgggacaacaggcgcctaccacgcccggctaattttttgtatttttagtagagacgaggtttcaccgtgttaggcaggatggtctcgatctcctgacctcatgatccaccctcctcggcctcccaaaatgctgggattacaggcgtaagccacggtgcctggccggaaattcttaataacagcatgataataccttggtgatatttagaataagaaaaagaactaaagcattaaagtgggtgatattacaccacctacacaatgtttaaagaaataatgatgatgggcagtgatacagggacactagaaactagtttctctaaagttttaaagtaagaagttgattgattgatcatagggccaggaggatttgcatgaattttgtacagtatgcaaaactgcaaaattttccaaatattcagaaggctttgcaaaattgttcagtatgtaattaagtgaataacttttcactttcctcctaagcatgaggaaagcagcttttatacaaaacaactaatgtcagctctcaaggttaccaaaatacccgtttgaccttttcctgtttttttttttaaggctaaccacatttctagtcctttacttgtatacaaatcaaattattttttgtcagtctttttccccaaacttctgctatataattttaaaaccagttggtatgtgggcatttcagacttaattttgtctgaaataagtatttatgaaagacatggccgttatgaatgtgagtattcttttgtattcttgtggttgtgtttttctgtttcacccaaggtggaacacagtgaggacagtttgcaccgtgtgccagaggtccctttattcgaggggtaattttgattgaaatgtaaatccgctctgctgaggtttttggtcagtggggaaaatcctctaaggtggctggagttcggaaggaccaggcagagcatccacaggctctggcgggaacaagtggctctccctacatgcttttgttttgcaaggggcaggcgtcctcagatgccttccacaaaggaagccctagaaccacccttgagcagggcagggctgatgggctgtccggaggaggggttctcgtgcgccctgaggccgtcctcaatgcctggatagaacagtgatatcagcaaggctgtttagtgactgcggataggtacatccaggctcccttctaagtccctaacctctcgtagctctctggacccccacgacagccctgtgttgagggacacagacattgccacgctctctttacagatgaggaaactgaagcggtcagggaccagaaatattttgggtccctaatcttggaggcaaatattgacacacgataagaaggagtgtaatgaatgcggcgtcctgccctcaggtccagacaaccagtgcgtatgttaaggctgaagaaaacctgcttagtcagtgcggtggtgagaaggagttgagcctttcgggacgtggagtgcctgccgcagagctgatgccccgaggctgccgcagacgctgcagagctgatgccagcaagttggcggctgtgcgctcatctctcccggacaactcttccccggcgctcggggttcagttcagccaccagcctgtgaggggaaatttgacaaagtggaggtgatgtagggaagagacacaggacacacagggatgaggccaggccatttggaaaaggccatttggaaaatttccttgtagaaggaattaaacgtaagccctaagacacaagagaggcctgcggtgtctggaagtctgccacaagagaagggtgatggggttagttcccatcctctggagtgggcgacagtggtggggcagggtggttgcaatacttgaggaacctcttaccttcctatgggcttgaaaggctacaaaatatgtttttaaattgcaatagagaatgtgctctttctctcctgagccggtgcgttctcgacagaacaagagtcaaagaatttggtgagatgctgtgtacctggaaaaatcagatctctccaaaacccaaggttttgtcccatgacactataaaaatggcatgaatgttgatagatgaaatctgatctttgaaagatttgtgttttaacacagaaattgctgatctttactgtttgggggcactgtgcctgcattagttggctagggctggcttaacaaagtgccatggacaagcggcttaaacaagagatgatttatctcagtcctagaggccagaggtctgagataaagccatcagcaggctggtttcttctgaggcttctctcctgggcttgcagatggctgtcttctccctgtcctcacatggtcttccttctgtttacctgtgtccaaattttctcttcttataaggacaccagtcacattggattagggcctgttaaccaaaaagtatctgagacaggtctcaatcaattcagatgttttattttgctaagcttagggacattcctggaagaataaacatggaatcacagaaacagggtgtgctttgtgcctttccccaaagatgattttgaggccggcagtatttaaaggggagggcaagctggaggggaaagagggagggaatggtcacattactgaatccacgtgttgtgagagaaaaggagcaggtagaggaatagtcaatgatatatttgtctcacgcccagtaaatcagctctttatataagataaggtgagcatagagtagctacctgtagagatatttaaccttttatctgtagctttctgcttaggaacaaaaggaagggtatcttcttgcatgaaagcatccagcttattttttttcctttggcatagtaaattgaggcaccaagtttttattttccgttcacatttcttcccctccccttttaaaaaaagtcttcagaaaatgcattttagaagaaaatgcgtctctagtcttggggttttgtctggtctcttgtgactaagacagtttatttctagacaggtcccacgtggttaggaaagctcatttttagcaggttgtaaagtctcatgacccatgaaggaaaaaaataggtggaggaagagagagagaaacaaacaaacaaacaaacaaaaataaagggagaacaatcctggaaaactgacataaaccgtattactctgaagtccctatgtcagtaggcaggtatgaaagtgatttacgtatataaataggttcctgttattttcttccaaagttgacgttgtctagcttcagtttacagggctttaagaaaagcatagcttaatatttagtgatttcaaatcacgattaaaaaggaaaagaaagaaggaaaaaaaactgacaacattattttccagaattgtagccaggaaaaattttagaattcagcccaaattgtagaaaataataaaaacagacaaacattaggcaaggctagactctaattacagatgtactatagtttattttgaaacataatttttctctttccagttccccaattgtattaaatacaagattataatagggccaatttatttgtaaaataagttttagttctattatgattggcttgattatttggataaagtgcagcaagaataatcatttgccatataggtttgctctctcgctctttttgttgttgttgtttttaaattggttttgttggaaccttttcataaagaatctaagatttagagcttttgttgttgttgttgttgttgttgagacagagccttgctctgttgtccaggctggagtgcagtggcatgatctcggctcagtggcatgatctcagctcactgcaacctccacctcccaggttcaagcgagtctcctgcctcagcctcctgagcagctgggactacaggagcgtgccaccacgcctgcctaattttttgtatttttagtagagatggagtttcaccatgttagccaggatgatctcgatctcctgacctcatgatccacccacctcagcctcccaaagtgctgaaattacaggcatgggccactgtgcccggctgatttagacctttttaaaagcctcagtcccagtcaaggatttttctgtgcctatagatacctgtatgaattggttgaatttttctattttcaaggtcccaagagaacttgaggttcctagccctgttagaaagtgacattttttacttaccataggtcaggaccctgtaaaggacaaggtatggggccagtttttctaagaggcttttactagctctgtaggtcacccttattttctcaaggcaatctgaaaatgtcattccaatcaaagccttggtaaaataaccaatgacagaacaggatcacacagaggccattgtaaaatcagtcattcatttagccaaagcgataactcaaagatttcacaacctttattctttgagagaagagacttacttttctaaacaataaactctaataaagacagtatgaggccaattaaatctctctcaaattttataaacaaatctattaaattttaatcatcttgaccaaaatatataatttccataaatcattttataaccttttataattttttaattaaagaatgggttaatgtcccaagaaaaccttgttaaactggcatagggacacagatgctggtcttgcatcagtgtacctttgatattagtgtttaatttatagagaaactaagctaattttatctgtcaatattagctcttccaatctatgtgtccacctcttctgtgatactctgatagtccctgggcctagaggggttgaatagttttaatttctggccctgtgtctcttgaacacagtttattttgattgtcatcttctcctgggtctgaagatgaggcttttaactgctgtcagtgtttaagatttagctggacttggtatcttttttagacccaggagtcaaagtcctgtaatagtacaatgactttagaagcaatacagaaagttatatggatataataaccttaattttttaaatctcagttttcgtaggactttaattagttagacataggaagagtgcatcctgtgttataagttttctatttcatagaagaatttagagaataatataggaagaaagcatttgctttaggctgcgtgtggtggctcatgcctgtaatcccagcactttgggaggccgaggtgggaggattgcttgaggtcaggacttcgagaccagcctggccaacatggtgagaccttatctctactacaaatacaaaaattagccaggtgtggtggcacgtgtctgtaatcccagctatcctggaggctgaggcacaagaattgctggaacctgggaggcagaggctgcagtgagctgagatggtgccactgcactccagcctgggtgacagagcaagactccatctcaaaaacaaacaaacaaacaagcaaacaaagaaaaccattcagtttagatctttaagttaagatatattttttaattaggccacaacatcagtcagaaccagaggggaaaaagttaaaggagctgataaaaagttgaaagagttactatctcgggccctcttgaaggggagagaaagctgaaaacagcgagatgaaattaaagttgaaattttggtttatgaaaattaaaatgtcttgtaattttattaagaataaaccagtaccttaagaaaatttagttgttctaacaatttttttagtttattagtgtatttttaatatcaaagcccaatttctagaaagactattataaataattttcttttaattatggccaacttgatcacataaatattttttcataaattctctttttataaaccttattatgacttacacaaaccatttactgaatacttggagtttctgttttatcccaaacatcctcttttttaaataaccagtgattttattttaggacaaaaaatatatcacacaacatttttgtcatgtaaaattgttttccttttaatctttcttaccaaaaataccacttaatatttataactttttttgcatctcttttatttactgtttccttttaccttgttttagaaacgacctttaagtaatctttgaattagacaaaaattatttctttttaataagaaaacattgtttttcagaaaaacattttcctatatttttttttaaattggaaatgacccagacatttaagcaatatctattattttgtttaatgttactttagattctaaattatatgtcgttttttaacaagcatttattctattatatttatctaattaattttttaatagattacttataaaaactgatggtcatcatttaaagttatttccctgctaaccaattttatagcctgcgaatttcaggtgtttacctatgtaaaaaacttaaggttaaataaatgtatttgttttttctttttgccaaataattcagtattaactgtttgctattaaaccaacaatattaaatgccttacttaccaaaagttacacaaagataattctcttttgggctgcatttatggctttataaccctcattccaaatattgacaccttataatatttagcaaacataaatataaaactacttgaccaataaatctaaacaataatatgtgttgacagtacttaagactttctaattttatttggccaataattttaaagccagcttatttattaaaagttaagtcatgtgaacttgaaaagcatttggattatttactaaatttatgagtactcctttatttttaagccaatttggtaccttgtggccacaacacataacaaaatgcatgtatgtatacataaacacacctaagcacacataaacagtcatgcaaataaagatcctatagcttttacttcagaactctagccatgatatatcaatacagactcatcagtttacaaaaaaaaagattaaatagaaacagtggtttttatctcaacaccagtagaaaggtcctctaaactagaaaaatacattttcttaagcaaaaaacacatcctcgcgtgttttataaactttaccaaaaacacatcctacgatacactactaaccctaattctccctgaaaaatcaaggattacttaatttaatataatatgactttaagtgttcaaattactggggacagttttgagactaactttaccaaattaatcttaccaaagattactaaaactatatgaactgaaaagcctctgagctagtttctattagtctgataaaaacttacttttctttaggccaattaattagaactctttcatataattggtagcaaaatattatttccacatgacatatctgaacatatagacataacagacccaggcagaggcagatcttatatatttaaaatttttcatttgcctgttttcaaaaatgttctttttcctacttaaactattaaagttgtctggagggaaagagggagggtatggtaatccacgtgttgcaagagaaaaggagcaggcaggggaatagtcaattatgtattcatctcccactcagtaaaatagcactttacaacagataagatgaacttagagtagttaccagtggagatatttaaccttttagctgtagctctctacttaggaacaaaaggaaaggcaactccttgcatgacttagctttaagcttaatttttccttttggcagagtgaattggggtgtcaggtttttatttgcctttcaaagtccccaccatatgacctcattttactaaatcacctcttaaaggccttatcttcaaatacagtcagtcatattctgaggtcctgggaggtggagcttcaacatgtgaatgaggaggaagggggacataatttggtccataacagcgctcacaagaaatcactagttaaagccataagcctcatatctaaggatttaaaccaggtcagcttattttaaactccataatcttaatgatcatctacttactgatttgtttatttgatagctatgaaacttatattttcatttgatctcactatacccaaacacccacatccctgttttttcctcattttcttaccaccaaaaacttattttcttcattccacagtggatagtcttcacattgccttgctgacacagtggcctgtgctgtatctgatagtatgcaaaccaagagtgcatgcacgcaaagcaacatacgttttacaaatacaaatacaaacaaaaagatgcacatagaacccactgggatcacttcttatggatatagaagctggagaatgagagctgttttttggtgtaaatgagccaaaatcagggtcacttttgttcaagctgttattgacttggttttcactgtaaacactggaagtagtctcgaattttagcccaggatgtacagcctcagagcaaaagacaagtaggtggaacacagcatcccttcctctagacaccgttacattaaaatggcaatcattacaagtacagcaagtatacttcataatgaattcattattctgttcataagctttttagggactatattattatcccatctaagaggcaggatccactgatcatgcttggtcgaggttggcttcccctgcctgtttgcgaatggtgccttgtaacgtggagacagggagtggggagagtgagggctgagaatctctactcagaggctttttcacactgtccagatatcatgaaataaaaataaatattttgacagtctaagagaagattacagtaacgtgatctaccttaacacaatagaacacagataataaggacacttgtaagaaccagaattcacaaaaggacaaatattcctctagattcctaagagtttaaactaagcaaaaaaatcctaagtggtgaatttttaaagtgtcttttaaaatttcactaattcagtaaacaacatataaatggattttttattgctttcactggtttctttgtattctttaaaattagaagtgtttctcttttgtttaatgaaattttactaatggttagtccataatttaacataaacactttggttgtactctttaaatactgaaatagacaaaataattgaagtttctgaaactggcaatcattataagcacagtaaatacattttataatgaaataattattctgttcataagcttcttattgttcatttgatattctgaatcttttatctgtaaatgtgagccattctgtccagagcttattgcctctttaatatcagatctccaaagaaagactcaaattccatacacacgaaaggcatatattatccacatttaaaagatggcctgtttttttttcccaaaatgttaaattttgccacaaattattttatagtgtttgtacacttctgttgcattgggaggtttttaaaaattctatttctctgaaacagttttaatcattctagtaatcgttgagacttgattctagaacttgttttaaaagtcttagtggatagttttctatttatctatttggattctttgcacttagatctgggaaccctttattatcttgaattttttatggatgttattgggaccaggaggtcatgtgagtgctcattcagtgagcactatgtagtgttgtagattttttaaaaaagaaaacgtaaggagccaggctttcaacccaacacaagggtccttttcctgatcccctaggaatgtgtctggttacagagagaggctttcctcaccaaaagtctcatgcaggtgaggtcaccatgtgaggtgactttggtgccacaaaagcatgtttctctgtgtgtgtgtgtgcccatgtatgtcctcaagtacacatacacatctgtttccataaaattctttctctttataatatccattaaatcttaacaagaaatgcaaatttagtacctaaatattgaagaggcgactaccacaggcccattagaaacatgggccaatgaataaagtataatgggaagctgcaaatactgagaattgaacaaaaagaaacatgcaaccaaacttgccacacacagctaaagcagcacctacaaaacagacatcaattgaaaagaggaaagccagaaaatcataagctaagtatcaaaattaagctagaaagcagcaacaaaataaacctccaaaaagtaaaaggaagaaagcaataagaattaagaaatgtaacaaaatacacaaaaaagacccaacagagaggatcgacaaagccagatgttggtagttggcctgcctaattacataaacgatctctggaaagataggtcaaaaataaagaaaacacagattaacttgtagtagaaaatacaatggcacaattacagatacttcagagatttccgaaaatagtaagggagcattatgagtaacatcatgccaagaattgcccataaacacatatattcaataactacaacaaaacatgataccaaaactgactcaagagtaaatagaaaacctgaaaaatcttattgttaatacaacatgtcaatagtaaaattttcttacagcagaaatacccaaattattattctttttttttttttgagatggaatcttgctctgtcgcccaggctggagtgcagtagcgcgatcttggctcactgcaagctccacctcccaggttcacaccattctcctgcctcagcctccccagcagctgggactacaggtgcccgccgccatgcccagctaattttttttgtatttttagtagagacggggtttcactgtgctagccaggatggtctcgatctcctgacctcgtgatcctcccgcctcggcctcccaaagtgctgggattacaggtgtgagccactgcacatggccagaaatacccaaattcttaaataatgagtatcctaaactgcaggaaacttatcagtccaatcctaagtataattcacagagagcagcaaaagaggccacactgcctcttatatcttgaagccagtctaaatttgattctaaaaccagatgagaagctgagacagaaaagctataaacaatctcacaaacttaaatgtaaaaattctatgtcaaacattagcaaataaaatccaatgagattttaaaaaatatagtataccatgtccaaactgtgtttaatctggatatggcaggatggtttaatagtagaagatttttaaagtgctagtcaccatgttaacagagaaggagaaaaaaagttatcatattagatgcagaaaaagcattagataaaagtcaacaacatttcaggacaaaatgtcttagtaaaatcggaacagcagagaacttcttaatctgataaaaggtaactaccaaaaaacatagtgaacctttacttaatggtgaaatattagaagcactccctttaaaatcagaaaaaaatgaggattcccataatctgcacttctattcaacactggactttcctaacctccataataatttaaaaaaaaaaagataaagaagtaaacatgtaaggatcagtatggaagacataaaactctcattgtcagatgatgtaacctcaataaaaagagaatcctcaaagtattattaataaaagaacccagcaagatgtctagatacactaacatttttaaggttgcatttttttacatctacattaaacagtatgtgtaatttttacaaaggtaacactctttataatagcaagaaaagatatgtttactatgaacaaacatatccaaacctgttcagatttatatggagaaaattctataattttttggaagtcattaaagaagtcctaagtaggatgatatgttcataaagaagactcgatattagacctcagcacaattctaataaatatcctggcataatatttatatgggccaagaatagccaagataattgtgaaaaaaaatatagtgaggaagttgcctccttaaatatcaacgtgtgtgtgtaaagtaaccacgactgaactcatgtagcaccagcgcgggcacagatgggtagagcacattagaagagagagccagaaacagactccacatattccaattagggcttctaatgtttacagaattgttgcaatccaatatgacaagataagcaatctaacagaaaaatgaacaaaaaattctttatcaaggaggaaacagatatgcttaataaatacaaagttactcaccctccttagtaatcagaaatgtaaattgaaatcccagtaaaacactataggttgtttacaatagtctcttcatactaaacgttgaccaggatatggaagaggagctcgcagactgcagaactgttgtggagactgatttggagctattgaatacggccgtagatagatgctttcctccaaccttaacatagctcaccttgtgctattccattggcagatgcatggccgacgggcgctgccactaggggctccaggagtatgcacagggatggtcccatgtccacatcagtgtagtttgtctatcaataaatgggaaatgatagaatgaatggattgggatatgtgcatgcactaaaatcccaggaggtcatacaaatgagtgagcaagagccctgcgcatgaatgaatgtgaaactcataggtctattttggggtaagaaagcaaattatagaaacatgcatggaattataaaatttaagataatacatcttaagtttatggtacagtatgtttagcagtgtgcaaaataatatagattgcttagggatttggagagaaaattttgtagaactatgtaagagtaggaacacaaattcagccttgtggcctcttgtgtgggacagggagaggaagtaggtgagggacaggaatatttaacttttattaatacttataatttaagttttatttcataagcagggggtggtgatttattctttacatcttttgtatggctttaattagtgcaaaattttttaaattaaaaaacagctggaaggcccctgctgagaatgagaagggaaagtgtgatctttgtggacaaagggcagagttctactgatagccataaatattcacatccctcttggtcccctctttttaagtctaggcacagagctttctctaatgcagagagacccaaaggacctccccccacaaccagtggctccccataaaatgcctatgatgcaagaaaattcctatacacacaaaaaattaggtgcaattttcttccacaagtcaaagaaagaatatacactagacagcttattattcctactgactttgtctgtctttaaccttaaaacaaaaataaaggctcaatgaccatttatagataaatccagcctctctctcacctccttggtaagccacatctcagcatcctattttgtgctcactgggttctgtctttcagggactctcacgttttatttgttttcaagcctaagctactgtcagattaacatttcttctctagtttgcccttaggatactttatttgctacaaaattgctttgtgatggtgtcaccacactgccaatgaagcagagcaatggcaattaccgtaaagcacaggcccttcaaaggccagcccagtgagagtttgcgtccgagttctgcagaatgactaccagtgtgagtgctctgtgtgcagacaggtgaaagaggacccctgtctgcagcccagggcatcctggccttctcactcattagcccttgggattttcaccccacacacacttactgatgccagcagggccagtcactgtgctgtccctggaaagagagagaggagcaaatgctaacctctgtggttttccctcttgacaccaattctccaactctgcagacaccagctgggtgtcctaaactcactcctattctgactgtaactacctagaggtagcgtcagactccacagggttaagggctcagtcccatcagccggcccccacttcaaatgccagttacagtgttgggtctccaggttacccacagttctgtccaccgtggctacaaactcaggggggttcccataacccttgccccaggttcagtaacttactagaacaactcacagaattcaaaaaagcattttacttaggtttacaggttataaagagtacaaacaaagaaatgcaatggcaaagtacaagtggggtggtaggtcacgtggcttccatgccctctctgtgtatgccaccatcccagcatcatgaagcatttaccaacccagagctctccaatcctgccacttaggagtttttaacggagtttcattcagtagggatgattgcttaaatcactggccaactcatctccagccccctaccctccctggagattggaagccatcgaggagaccccagctgccagctatcttattaacatgcaaaatgaacccttatcactaggagatctcaagggttttaggagctgtgtgccaggaactggtaacaaagaccaaatatttattttttattctaagacgccctccccaggtacttggagcagagacagggccgtgcaggcagagtggtgttcagggcagggctgggagcaggtgcctgagctgaggcaggtggggagaggggagaggtggtccagtctagggtacttggttatcagccctttcatttgttctctaaaaccagggtgaaaaagagaacagacttaacgggagcctttagactggaccccacttacctgaagcacagccatcaggattcaggtaagctgtgagcctgctttctgtggactgtttctggtcttgttcccctcagagctgccctggaggtccctgggagttaggggaagaccatccatatccaaggaggctttcacagagaagacggggtgctgtgcattcctggatttgcccttgtagcccactccctgtgggttggttaagaggcttggggaggctccctgggggaggctcctgctctagaagcactgagaacctgctgggctcattgcaggagcaggggcaggtgggcacagccatgggattttaatatgggcatgcataccacctgcagataaggaaacgtctttaacataatgacagccataatgtctacaaaaaggctttgcatcaccttccaccaataccatgagggggcaaagtaaatgaagaaggttgagtagggttggtgagggaagagaaaataagatgaagccaaggctcagatcagcacacaaaggtgcacctaagtcatttggtcagtaggcctgctctctgtgcctggcgctggtgacagccaaggaggctcagcacccacctgcaacgtctagcagggaggggatgagtgggcagttatcgagtggcatcaggggacacaggctgctctggggccacagcacggaatgcacaattcttggcttttgcacttcacctatgtcgtctcatttgacttgggccagtgtatctggctaattaatggtaggcgttgaactagaaccaaaataaatagaatttttttgataactgaaaattctgtcacaacgctggtgaggaggtaaagtggttacactagtcatgtaggctttgaagatgtattccttattattaaagatgtacatttggaaaatagagtcaacgctgggccagaaaattcctgtaatcccaccactcaaatgcaaatattgctaatatattgctgtatttcttaccagtcttgttcaatgcattgttcgctttaactctgcaccacttaccaattaccaatatacaagctgcccttcccacatgtacctcatgaagttttacatcttatgaggcacataagacctattaagtagtccacagttcaagtaaaaccattgtcagaggaaactactggctaagaggtttgtcatttctttatgttaacagtaaagaattgtgcaaggaagcttctaactgggccagttctttactcgtccataaggaagcagattcacggagaagcagataggaacttgcactaattagacaccgtatctgaattcttctactgaaagcctccagtttttctttcctgtagaagtttctgcaatgagggaaatttataattctgcaccacccaatatggcagccaccagtccgcatgtggctactgagtgcttgaaacgtggctcatctgttgaagaactaaagtttaatttcctttagttttaattaacttaaatttaaacgtcaacagccacatgtggctactagctaccgtatcagatggtgcggtaatagaaactaaaaaggtgggccattccctcattttcattcatgacaatcatctggttctttgacaattttttttttttgagacagggtttggctctgtcacccaagctggaatgcagtggtgcaaccttggctctctgcagcctccacctcccaggctcaagtgatcctcccacttcagccttccaagtagctgggaccacagacgtacagcacaaggcccagataattttttgtatttttttttttttttggtagagacggggtttcaccatgttgccaaagctagtcttgaactcctgagctcaagcgatttgcctgccttggcctctcaaagtgctgggattacaggtgtgagccaccacgcctggcgtcgacaatttcttactgagtgctttctgcatgcactctgttgagtgttgttgtttcatttgcagtggtttctgtgaatcattgccagatgctgctattgatgttatgtttgtttaacaagctcccttactaatgagaggccatgtgtcgtaaaggagagtactgtgtatgggttgagataggctgtatgactttgggcttccatctcagggtcactcataaaacagggggtggaggtcttgcatctcctcccagcactgccattttttatgctagtggagaaaataactattagggaatgataccaagtggtgacttcagatgttcttgtaaatacaatgtaggcactcctgtgcagtggatgaagtgcagggtggggcgtgggttgtattaggtggacagcttgtcccagctgagcatggtcagggcctgctatggccctgccacagcccctgttgactgcggaagtaggggacactgatgtgcctggtccagcccacattcgtggatctactcccagagcacaagactcccttttccaccgatctgtgcagcaggactgcagcatgttgtcataatcctcacctgatgtcttgtgcaggatcacttgtattaatagaaactcccgtctctgagcctgcattcagggttccttctcctttattgtcctggggtttgctgctttaggcatgaggggaggctcaaaagcaaatcatccatttttcataaccaatgtggagccaatgattcctggatgttaaaactgactcagcagatattcactgagtgtctgctctgtcccagatactgaactaagatctgctaagatccacggatacagagatgaataatcccaccaagagtttcattctcctttttaaaatattctaatcactccgtatatcacaaattcaccttcccatgcatgaatgaatgaatgatgaacgatttacgtgatctgaatgctaactctctactgggcactagatgaaacctcagatgttcatgctatgtaactgcagaaagcaaaactaatgggggtctattgagagtgtaacatttccaatttgtgttttgggcatcctgttctcgggacacacccttagaatatgttaccctgggaagtgccgcaaagaacacccagacccagcctttgggcagttttatttctggcttagaagacacaagaaatttacctggaaaatgaaaaggattagcgtgtgatcaacaaacctgtctaacgatttcttttttctttttctttctcttttctccagggcttatcactgactaccgggtaagtgggagattccactgtaatctcaaatgctagtggagtgctggggggctacgccacagctgtcacacatctcctcccccactctcatgatcagcacgcactggtgggcaccttctaactgggtcctaactgacaaattaggggggtcctgccaggtggcgggcagctctgctgaacccctcagtcagaggtctcaggttaggagggggaaacctggaccctggactttgctcctggggaggagaaaggagcttctgcccctcattcctctggaaggaaaaggcccttctgccctgggctgctgtgtgcctggggctgcactggtggtggcagtgggagagtgagggaggagtcagggaacagaaaaagctcccaggtggggccagtcatctcagcagcctagtctcaaatgcattggtcctctctcgtttttatttgaaacaagtgttgaatgaggcatactttgaaaatgccaggttgttctagtgttagtctggaaaggaatttgggaccaaaggcagtactgcgaagcttatcaaaagaatagaacccaagggggagggtgaaactcagggggaacagaggtgtggccactgagctggctgtcttctgccatcaagagatgacctgtggccaggtgctgtggctcactcctgtaatcccagcactttgagaggctgaggtgggtggatcatctgaggtcaggtcttcgagaccagcctggccaacatggtgaaaccccatctgtgctaaaaatacaaaaattagctgggtgtggtggcaggcacctgtaatcccagctaccccggaggctgaggcaggagaatcattggaacctgggaggcagaggttgcagtgagccgagatcatgccactgcactccagcctgggtgacagagtgaaactctgtctcaaaaaaaaaaaaaatgacctgtgtccacgtgtggtgggcaccagacatcatcaaagcagaggctgccatttcccgacagaggtgtgtgtctaagtgcgtttggagcaaacattgtcagcagccggtgtgataatgacccagcaggggcttcccctcaaaggcatgggtagcttgccttcttcctgtgacagctgtgagccaggaggcaggggggcagcagtaaaccttcccaagccatcaaggctggtcctaggacagttttggcaaagtttgcctgggaccacccagctctacacccagggagaaaggccagggtgtgtgcacataagggcacactgggaagatccatggatgatgccatttaaaactttcatataatcccattgtcaatctgacttatcttttggaaagttattattgaagggaaaatatgacaataatattaaaaataacctgaggaccagctcaccctgacctttcatcctcgcgcctctgtggcctgtgtttctgtctcctcctctggttcgtggcctttctcagacttcatgttgcatgagggccacgtgctgtacaaacgacattgcagctggttctcatggcactgaaactaaaattgcaataccttctccactcctccacagccttagtaagtacagaaaatctacacagaatcccatgttatatggtataattatttccctgttatttaactacttccctgggaaagtcccttgctttcctaaatgactatgcagtgggcatctggcacatccagctttctgctgaggatgagctgcttcctgcagcatgagactgaaaatggggtaacaggcacgaacacttcatgccttttattttattattttttaattttgctctttcccagcttagatatcattagaaaaaaaggcacaacaccatctctggttcacataaaataacataggctttgctaaaaactccgtattgactaacaagtcctctgggaaccaaagtccttttagataaacttggcactgtctttcaaaggcctggggcacaatccccagcaatgctggcttatgttacattgcccaagacaaaaaccagcccagctctgcccgcatctagcagctcagggaacatgatctcctcagacagtttctaccgttcaccaagaatcacagatctgtactggcacccgcctgcaggaccacgaaggtggcagggcttgcctgaggcttccccagcctgttcttctgctccatccagggccttccagtcctcagggctcactccttcttcccaaccctaggttcttcatcctactccctccaccaccagtccctgaccctcatggggtctttctgtccccttctgtctttagtgctgagcctcactctcctcagcacctcaggccctttccgcactgctaatccagaagacttgagcccaccattcaccctgccttgataggccaagcattctttgaaaagcgtttgtccttctgttacttcaactagttatctctactagttatctctactagcttaatgaaaggcattggcctcggttaaggaaaggtcaagcatcagcaacctgtgctccagccctactttcaaagcatcctttgatcagcccctgtactccccaccctgttggtcctgctgtgagacctgggtctctttcaccccatctcaaggcagccccttgactggcactccctttccaaccaggagctatgagctgctcctgcagctactcagaggtgagtgaggcccaaagccacctccaagactcccaggccactgagggagacagaggcgcagaccacgcaggccctgatgcctgttctgaaacacacctgagacacctcgatcctccagcctgccctttgtggcccaagaggacatgccccaagtccttagctagtcctctgcctgccagctctcctcttgccgcttgtggcaggcaatgatgctgagatccctggcactatggctggcagtgcatgagtcaggagccatgtggggacagtccttgtttggctgcctgttgcttctaaaggaacccaggcagatgggaagcaccacagcagcccagtcccactggcatccatccaccaggcttgggaggctctctggggtgattggccttctgtgctgctgtgttcctagagagggctggagatggcacatcatgtgttcacagccaatgtttcatggctgatgaggggacaaacgcatgaaccttatgaaagatggaatgcagaaggtgaaagctgttctggagcagaggggcttctaaatgcgaagcacaggcattaggcctcagcataccagccccaggaagcaggagtggccatgtggggacagccccgggcagccaccgggaaagcacacacaagttggccgggtgtgagtatgggagcagcctcagggccctggtgtgcagagcccccagggcacctctcagcccagctttgctctttctatcccttgggtgcaggcacaagtgtcactgcctcttactgaaccctctccatctgccacaacccagggatgtccctggccgtatttcccggcatcttctctttgctgctattttagctacaatgcagtgacctctttccctctctgtgctcacatgcacctctcaggctcctctatgattcccaccttgaatgtgaattccaggcaaatgtccccagagcatttgctttgctgggctcagcagggaatgggaaggaatatcatagacattctcattttgttcaaagaggctggaaacccaaacctaaggcggtctggggagaagatccatcagtctggggagaagatccctggatggtgggctgcctactgggccagtgagaaagtgtggggtgaaaaggatgagcagaccctggtagttctatcccccgtcagtagatgagggcacgaggacagagtgttagtcccaggaggaggctgttcaggacgcgaggtatggcaagagagctctgtgttctttctgatggtgaacggcacactgaagatgtaagacagcaccatttgcctccagtttgcacggtcctgggtaaagtgggcatcattatgcctgtttcataggggaggagacagaggttcagaaaagtttgctgaacctattgaaagacaggaccacggacctaggtcacaagccactgagccatgcagccctgcatgctatttggatgaggaaactgcatcttctggaagatgttgatggcttatcaaaaatgggacaaaatacaggtttaaaaatgatcaattgtggaggaaaaagtaccaggaaatagatcatttgatgtccgggaagcatcaaatatgaattgacttctacataaagaatcctttcagatgacccatgaatgagggtcaaatgggttttactcctgatttatttaagtacgtccatcaacaatcttccacaaaatgtgggctggccgcgccatgccaagccaggtgctgggcttggggctgggactaaaaaggcaaatgagacagagtccctttcctctgggaacttagtctggcaggaggtgaggctgggtacacaggggtcacagctgtctactgcaggcacccaggagcatattgggggaggggacagtgcatcgaattcagtctctggagagaacatgacaacatttggagccacatttgagtgagcattcaattagattgtgtgcattttcactccgggaccacagaaattaagtttaccttggtattcttccaaatgttagactgaaatctaacattttaatttgtaggaagttgaccagtcgaggaatgattttggaacacagcgcccatgctgaaccatggcagggaagcgtcgttttactgactgttagatagtcagtcagctagtggtgggataaggggttcttcttttagatttcccaaaagacaagttagcttagttcttgagcagcccaacagcttgcaaacagtgctgaccagcagacaactgtgtgtgcaggttcggctcaggctctgctgcatgctggcttggtgacattgggcaagtcactctccatacctgcttttgctccaagaaagtggggatccgaacccttgtttacagtgctgctaggaagctcaaaggagataatgtgtcaacacaccgggcagggcctggtgtgcaactggggggaaccacactgaatgcctgagtcagaggttgggtccctgtttcccttttgacttgagaagctcctgcagaaccatggctctgggcccttgagctacttctcttgtgttcagaagcagttgccacctgttcattccacccacactttattttatttatttatttattttgagatggagtcttactctattgcccaggcttgagtgcaatagcgccatcttggctcactgcaacctccgcctcctgggtcctgcctcagcttcccaagtagatgggattacaggcatgtgccaccataccaggctaatttttgtatttttagtagagagagggtttcatcatgttggtcaggctggtctcaaactcccgacctcaggtgatccacctgccttggcctcccaaagtgctggggttacaggcgtgagccaccgcatccggccttcacccacactttaaaaaacacctgcaagccctcctactggggagcagtgcgggactcaggactccggctaagcagtcccacccggcagatggcccagctgcgctagagtgtcgcgcctggctgcactgtgtcacccaggcccagtagggagctggctcagctctcctcagtgtctcctttatagctgaaatagaatatgactgttaagatgaccacacagtgctgctatgctcacttcccagcagtctcctcgtcccagtccttccttactcacttcaccacatctccatccctcagtgtgtgggggccggtcaactgactgggtctgggaaaaccagaggaaggacagggaaagcttctggagcaccagcatggagacacacattgtgtcttctgatgaggggtcttggggtcactccatggtgatcagtaggaccaagagggaaccagtattgctctagaaaacagtgccagaacatctggggcagaagtggcagacaagagcaggttctggctccctccttcctcgtaggcaaggacatcaatgaaaattacccccttatccccactggatggtgagctcactgggggcagggccgtgtcttccctgtttgctcaccacggaaccctaggggacagcccaaggtctggccctgctgtgcatgccgcaaacacctgttgagtgaaaacaatgaacatcactggctcccaggtcaacagtccccatctgtgttcctttctcttggagatttgcaaagaaagcctctgcccacatcaccgagggccctgccatccaagacaggccatggcaatgggagcaggttggccaccagggaatcggctgcctccaagagaaataggcgagccggtgagccgaaaaggaagccagcttttaatatcttcctcactgatggtctgtttcatgtttcatttcagcattggcagataccactgggcagaagatttcgctctttgaaaatgtggtttgtatttaggatgtatggagtcaaaggactgcaggcttatatccgcaaggtgactttgtttttattatttatcacggtaaaattgcggaggtctttcgggactttagaaataaattcaaattttttttctttttttttttttgagacagagtttcactcttgtcccccaggctggagtgcaatggcacaatctcagctcactgcaacctctgcctcctgggttcaagcgaatctcctgccttagcctcctgagtagctaggattacaggcatgcgccatcatgcccagctaatttttgtattttaagtagagattgggtttcaccatgttggtcaggctgatcttgaactcctggcttcaggtgatccacccacctcagcctctcaaagtgctgggattacaggtgtgagccactgcacctggccttcaaatgtcttaataagcaaatacatggcaagagaaccagactgtagtttgggttgttgagatgaggttatttataagatctgttaagtcactttcgttaagattgcaggttatcaggtccaggaagatggtcacagtagaaacatcacataggttgtgctttagccacatctagccaagaatgaagttcattgagcaatggcaattatgagaacataaggactgtgtttttctcccccaaaattgccagaataagatagatattccctagtccagtggttctcagacatgcttccagaccagcagtgccggcctgcagtggggcccagcaacctctgttttaacaagcaaaccagacaccttctctatgcactaaaatttgagaaccacttatcagctccaagccccactcccctgcttttttttttttttttttttttaaaataacaattggctgggtgtggtggctcacgcatgtaatcccggcactttgggaggccgaggtgggcagatcatgaagtcaggagttctagaccagcctggccaacatagtgaaaccttgtctctactaaaaaaaaaatacaaaaaattagccaggcatggtggcaggcacctgtaatcccagctactcgggaggctgaggcagaagaatcacttgaacctgggaggcagaggttgcaatgagcagagattgtgccactgcactaaagcctgagtgacaaagcaagactccgtctcaccaaaaaaaaaaaaaaaaaaaaaaatgaggaaactgagtcctgaatatgagcctggatctgcctagagccacccgtttagccagctgcagaaggcctgctgctgttctgctggctctctctgatcctggtgtccttcctaagctgtggcctcatcttgatggacagaggtccccaggcttcatgggaacaagcacacttatgatattcagccttagtgatggtaacagccctccattttaagtcctgttgccacttcacaaccaggtgtgcaggggcaggtgtccccagccacctcctctgtggcacagcatatataaacacatccatctgcaagcttcatagaatgcctaggatgtgccatgaactgcctactcccaaagcttcggtgaggacagttccaggagctgccgagcactatgaggacctgtttgggggcgagaactgggaaaggagtatgtatatgaattcctgggtaggaaatccccctctacccatttgagacgaattcagcttttttggggaaagaaagccaaaaaataagggatttatctccccacaatgatgacgtctttaagctcaaggacaactagttatgatcatgctggctcctgtttaaaacacactccacttctttcttaaaggggacccaatcctgccttaggagcagagtccagcgatgctcaaagcctgtctccttgggcgggaaccggctttcgggatcgcccatgaggccgaggtctttggcgctctctggtggcatgacgaggaaccactcgtatgacacgtgtttttgtcccagccaccccctgcccgcgaggcgccgcgtttccgcaggtcctccccagcacctgcaacatgggggccctgctgtatccgcgggcttagaatgagcaaggcacgggcctacgccacggagggctccttctcctaggatcacatgctgtctgaatagcttctgagttctataactatttggaagtgaaataaggtcagtgtgatattcaatgagaggaaggccgtttctgaatgtgacagagcggacaggatgcccagctctaggtggcaaacgcggaggaggagcaacagctgtggcagccacagagctgcagctccatcaggctgccttagaatcctagctcagccaaggcctccgggtgcaccttgggcatgtcgctcaccctctcccagcctgttttcttatctccaaaatggggataatcatgatatcttctgtgttgtgggctgtcctgaggatgccgcagtggtgagcgctggcacctcaagcacagaggagcaactcgatgggcattagccattgtctcttccagaatgatcaaatacctcctcacggtgtttattctaacattataaaagacagtttgggtgggataagaatagtcccatgaacagaagaaaatgacaattggtgttctgaggacactagacctgtgctaatgtagggaatgagtttcttagcctgcctggaaacagctggtcagtgaacggtaaaagcacttgaggaaaattgccaagagcgtctaaatgaattatacatgggcagtctaataaggttttctaggtagttaagttctgaattaaatggccatgagaaaaacagattttccctttcctctttgaagcatgtccagctgtcccatgagtttgagtcactggtgcgccaggatccccgctttgaaatctgtgtggaagtcattctggggcttgtctgctttcggctaaaggtttgtctacatctattccattcttcattttctgtgaatgtgacagaggggaaagtgttgttcattacctccatgctcaaacactggcactggctctccagagatggcagagcaaagcctgcattctttggcccaccggcctgccctgccccatgctacacagccttgtttccacgcacagcggctgttcccgcttcctcaagcctgccatgagacttctaacttacatagcttattggccgcagaatctttaccatttttccttcctcaaggctccatcccacacctctgccactggccctccttggaggacagcggcctgtccatagcctcactaatctgagtgtcttctgtggatcaacagcatcagcatcatcagcattgtctgggagctccttagaaaagccagtcttgggccccaccctagagctgctggctgcgcacctttacaagatgcccacacaggagtctgtttgacactgtgttgtggcgtgctgttattttgctgcctgatgctgtgcattcaccaggtgagggcaggctggcccacacgggttggggcataagccatctctactgagaatcatgatacagttctcaaaaaggctctaagatgcactgcacacatgccccttggtaatctcccttgtgtacacagagccaggtgagaccaaatgctctgtttggtttataaggttttttttttttttttttttttttctttttggagacagagtctcccactctgttgcccaggctggagtgcagtggtgtaatctcggctcactgcaacctctgcctcccgggttcaagtgattctcctgcttcagccttttgagtagctgggattacaggtgtgcgccaccacgcccagctaatttttgtatttttagagatggggtttcaccatgttggtcaggctggtctcgaacttctgacctcgtgatccacccgcctcagcctctcaaagtgctgggattacaggcgtgagccactgcgcccggctgaggtagcttttaattcacaatcatttcaagcctttccaggaggcttccttgttcaaattaaagacagcactcaggagaaggagcaggctggggtcagtgtcattgtcaaggggctgccagtcagagtgtggcactgccactccacctactatgtccttttgcctcacctgactcttggagctctgaggcgaggaggagctgcagccgtgggaaagcctgcaggtagcagagcaggagaggagacttgagcccttggaagagcacaaagtgatgagacctgggaggtgcacagaggaccgagagggcaagacacgctctggatgtttgtgggaggagcctcagtccatccatgtccaggatgtgtccagtcaaccaaccttagtgttggcatcgtgcttattagactcatctgctgtcaagcagttgttttcattcttgtttttgttgacagttttcttctaggacttttatattctatttttttaacagttctattgagatataattcactttgttcatttaaagttaacatttgggctgggcgtggtggctcacgcctgtaatcccagcattttgggaggccgaggaggccagatcacttgaggtcaggagttcgagaacagcctgaccaacatggtgaaacctcgtctctactacaaatacaaaaattagtcaggagtggtggcacatgcttgtaatcccagctactcgggaggctgaggcaggagaaccacattgaacctgggaggcggaggttgcagtgagctgagattgtgctactgcgctccagcctgggcgacagagcaagactctgtctcaaaaaaaaaggctacgtttgagtatttttagtatatctacagaattgtgcagccatcaccacaatctaattctagaacattttcatccccctaaaagaaaccccacacccagtcatgccactttccccatcctcagggctactaatctgttttctgtctctgtaggtttgtctattctggacatttgtataaatgaaaacatacaacatattgccttttatgactgttttcttcacttagcataatgtcgtcaaggttatggcttttattttatttgcataatttgtagatgccaccaaacccatctgtgtactggtttctgtccattcttctctcatgccatatagtgagtcctctcatgaaggaagtccaaggcatttttcagctgacaaatgtttccttttgtaaaactttgcttgtgcctccagtctgcaaatccagtttctggaggaagcgcgttagtcaaacactgtggctcacttttctgcctccatatctgccatcttggcctcactctctcctggtctaatcctctctaatctgaatttcaggtcctctcatgctgaatgcttcagtgtgtcatgtggctctttactaaagcagaagtgatgttgctatggcatcacggtccctctccctccatcctcattatggccagaacttgcttggtctccatctgtgtgcactcagcctactttgttcattgtaattgtcccacctctgctaggcttcttgcctctacttcatggaagtactgccctatccagtctgtttgaaaatggcaagcacatttttcctaaataatttgcttccattttctgtgctctatactttgcagatgtttgctctcatactgagtctttttggtaaaattccattcccttggtatgataatttctttttttctctatcctcatccttgagtcctcatccagattcacccagccttggtgttcacccacggtttccaaatttcctctggcccatcactgtctacctgggcacaacaggagcagggcactcaggcccatagctagaggccaggggatttgcacagctctatggccaggtgccaacatccagcaggtgctcgtctgaggtggttccatgcagtggatagaactctctccttcccactcatcctccctgcttctccactctgaagacagggccacgaagtgcagtcctgtgaggtttgggtgactaggatgcagtgtcccacattcagttccttctatttaagactccatggcttagaagacatggagtcactgcctgcaaacagaagaaggacagaggagcaaagggagatggaggtgaagtgtcagaagaccggctgctatggaagcagggcccaggcaggacagcaagggcttcccattggcttattgataccaggcttccaactctagtgtagtgggaggggtggggcctctgcgcctaccccaggctggtgggccgtgcttgtctggagaggcaccagtggttgctcggtcctgtggttcatggacattcttctcagattctagcactagcttgaccgttatgcttcattttctaggttgctgagactcttctatgtttccgtgagaatttagagactcctcccctggtgccatcagaaaccccaattctgctgtttaagctcatatatttgtagattacatatccagggatccttattttccttaaaaaaacttagaccatggaagggtcatcttttgatggcacatcagaatatagagaaattgtctgtggggagaagatgcatgcagtcttttagggtgcattactattattttgttgaattttgtaacatcgtaaacgcaagggggatggttagtcggcttcttcctgatgtacggtagggttgccaagcactgtctttcctacatgaccagttgatttttgagtcctcagagacctgagcacagttcctctctttcaatccctccagggttccaacaaagtgaatgaagctcttctgcaaagaataaacagtgccaaaaaaatccacttggttccatgtcacctcagggacaagtttgtcctgcgctttgccatctgttctcgcacggtggaatctgcccatgtgcagcgggcctgggaacacatcaaagagctggcggccgacgtgctgcgagcagagagggagtaggagtgaagccagctgcaggtaggctgccctgggctcattttctgcctgtctccttgtcccgtggcaagagtgtcctcctggagtccagacccagctacaggcccagcccggccactcaatgctgccagagtgcatttccctcaccttaaaataaggaagagaaggccgggtgcggtggctcacgcctgtaatcccagcactttgggaggccagggtgggcagatcatgaggtcaagagattgagaccatcctggccaaagtggtgaaaccctgtctctactaaaaatacaaaaattagctgggcgtggtggcatgcacctgtaatcccagctattccagaggctgaggcaggagaatcgcatgaacctgggaggcggaggttgccgtgagccgagatcgcgccactgcgttacagcctggcgataatgcaggactcagtccaaaaaaaaaaaaaaaaaaaaacaagaagaagagaaaaccatgttaattctggagaagtagaaggaatgatacattgtaataattcttttaaaacttagatttttactttttattcttacatcaatctctataatacttcaggtttcttcaaacagcatttgttgagataacttactatcataacaagctcatataagaaactggtgacctttagagaactaatgaaaacaataaaaagggaatttattatgactcacgacttgccgtccaaattcttgatggtttgaagaaaggatatgtttcgactaccgggcttcttgcagttgtgaggggtttacccctcatagttaaaccctggagacagcatgcagttaatttgtaaaaacaaagcacacattttaaataaatgcagtgttggcaacatggagggtatttaaaattatgtttgtgggaacctagacaaccttagaaagcctcttcattaggttatcttaagaatgtcatcctgttggggtatgtctacctttttctgtttattttcttttttttttttttttttttttgtctttttgtcccatttggtggaagaatctgtgatccctccttagggtctgcttctctttctctctctccctatcctttttgcaatggctcgttcattataacccgtgggggatttagaatctgtggatcatgtaatgcatttcctgattgcctacaatttttatcttctttgctgttgattttaattgtgaatatctgaaaaagtatagtgctcaacaagtcagaagttgaaaatcatgtttggtatatgtgatagacctgtccatggctcctgaaagttgaagccaaagggctaccttctgagtcaaaatgtgccctgagaaccaggtcctttccctggtgcaaccagggccttcccctactcataagctgagaaagacctggggtctgaggaagaactgctgacccagagcaactccaaagtggtatctcaagcatctctggaaggtagtggggagaggcttatatgttgaagttattccattgctctcagcataagactatgtgaggggagggaaagtaccgctgtaagctctgtatgaaacaaatccctatcaggcaaacgctcccgactcgcatttctgcaaccccacgtttgcatctgtctcataagcatgtatcatatcaggatcttattgacatacgcccagaagaacatatgtggagagtgtagctctgaaaatttatcagcaaaggtgtgtttccgataggagtctcagttcctctggagtcattatatttgctgtagattcaaaaggtaaaaatgaaattcaatttttaaaaagatatgtgatacaatagtaagtcctaatgcatgtatgttgttttggacagattagaacaataaaaatcttaatatcttgattttacttgtacttatttgagtttattacacatattcatgtggtcatagctctgagagaaagtaggaactattcttattttacagagggtagaaaattaggcagagattctagttgacactaatacagttttcatcagagaagccagattggcaataaaaattcctttatttaagttcaaactctttggcattgcacaattgtctctgtttcattggagaaattatacgttcgttctttatattcaaataagaagtacatgcaattcttattctttatttttttaatttttatttatttatttatttttttttttattgatcattcttgggtgtttctcacagagggggatttggcagggtcataggacaatagtggagggagggtcagcagataaacaagtgaacaaaggtctctggttttcctatgcagaggaccctgcggccttccgcagtgtttgtgtccctgggtacttgagattagggagtggtgatgactcttaacgagcatgctgccttcaagcatctgtttaacaaagcacatcttgcaccacccttaatccatttaaccctgagtggacacagcacatgtttcagagagcacagggttgggggtagggtcactgatcaacaggatcacgaggcagaagaatttttcttagtacagaacaaaatgaaaagtctcctgtgtctacctctttctacacagacatggcaaccatccgatttctcaatcctttccccgcctttcccccctttctgttccacaaaaccgccattgtcatcatggcccgttctcaatgagctgttgggtacacctcccagacggggtggtggctgggcagaggggctcctcacttcccagtaggggcggccgggcagaggcgcccctcacctcctggaccgggtggctggccggacggggcggctggccgggcagggggctgacccccccaccttcctcccggatggggcggctggccgggcggggggctgaccctcccacctccttcctggacggggcggctggccgggcagaggggctcctcacttcccagtaggggcggccgggcagaggcgcccctcacctcccggacggggcggcaggctgggccaggggctgaccccccacctccctcccggacggggcggctggccgggccaggggctgacccccccacctccttcccggacggggcggctggccaggcagaggggctcctcacttcccagtaggggcggccgggcagaggtgcccctcacctcccggatggggcggctggccgggcggggggctgaccccccccacctccttcccggacggggcagctggccgggcagaggggatcctcacttcccagtaggggcagccgggcagaggcgcccctcacctcccagatggggcggctggccgggcagggggctgacccccccacctccctcctggatggggcggctggccgggcggggggctgacccccccacctccctcccggacggggcggctggccgggccgggggctgattcccccacctccctcccggacggggcggctggcctggcgggggctgacccccacctccctcccggatggggtggctgccgggcagagacgctcctcacttcccagacggggtggttgccaggcggagggtctcctcacttctcagacggggcagctgggcagagacgctcctcacctcccagacggggtcgcggccgggtagaggcgctcctcacatcccagacggggcggcggggcagaggcgctccccacatctcagacaatgggcggccgggcagagacgctcctcacttcctagatgggatggcggccgggaagaggcgctcctcacttcctagataggatggcggccgggcagagacgctcctcactttccagactgggtagccaggcagaggggctcctcacgtcccagacgatgggcggccaggcagagacgctccgcacttcccaaccggggtggcggccgggcagaggctgtaatctcggcactttgggaggccaaggcaggcggctgggaggtggaggttgtagcgagccgagatcactccactgcactccagcctgggcaccattgagcactgagtgaaccagactccgtctgcaatcccggcacctcgggaggccgaggctggcggatcactcgcagtttggagctggagaccagcccggccaacacagcgaaaccccgtctccaccaaaaaaatacgaaaaccagtcaggcgtggtggtgcgcgcctgcaatcgcaggcactcggcaggctgaggcaggagaatcaggcagggaggctgcagtgagccgagatggcagcagtacagtccagcttcggctgggcatcagtgggagaccgtggaaagagagggagagggagaccgtggggagagggagaggggggagagggagagggaaagggagagggagagggagagggagagggacttctttattttttttaatgtagccatatgctcatgctattttttttccctgtaggaatcaaaaattgaagagagatatatctgaaaactggaataagaagcaaataaatatcatcctgccttcatggaactcagctgtctgtggcttcccatgtctttctccaaagttatccagagggttgtgattttgtctgcttagtatctcatcaacaaagaaatattatttgctaattaaaaagttaatcttcatggccatagcttttattcattagctgtgatttttgttgattaaaacattatagattttcatgttcttgcagtcatcagaagtggtaggaaagcctcactgatatattttccagggcaatcaatgttcacgcaacttgaaattatatctgtggtcttcaaattgtcttttgtcatgtggctaaatgcctaataaacaattcaagtgaaatactaa

SEQ ID NO: 634 - DNA, 37759 bp, Homo sapiens
gcacacagagcctgtagacctgagtggatggacactgcctcttagaactagaacttagaactttatcttgaaaatgtaccactgttgcagaagctcctcacagagtatgtgtcaggtaggaaccaaatttatgattgttatattcaaactggttttctgttccttgaaaatggtattttttctgatcaaagcctatttaggagttattatgttcttgagtttattccatgtgtgtgaatattttgaatgaatccactaataagatatgcatgtatgtctggagcgctagcaatgtagaataaatatttaagtagactttaacaagtaaatggttgtaggcatcattaagtcttaaatagccttttcaaagatattagtgttcttgttttaattattcagataattcctttaattctccactcaaatctgactttatagatagattgtctgctctgagggttggcaaaaaaaaaaaaaaaaaaagcaagctttaaggaaagagtttctccaggagagagaatcacctactagaaaggattcagaaaggccatctggtcccagccaggcatagggatatgtatctatagtcctagctactcaagaggctaaagcaggaggatagcttagcccaagagtttgaggtcagcctaggcaacatggcaagaccttgtctcttaaaaaaaaagggagggggtaggggacatatggtctagaagtgagagatttatctgctagacatcctagaaagtccaagactaagggaaacacggagagaagaaaaggcaatgagagtaagaaggatagagactggaaagagaagagagatggggagaaaatggtcactggaaagtagcagaatgccctatgccacaagtagtataatataatataatacattagtaatgtatgggtacttatcccatacattactaactctatcaagataaaatctattttattctttaaaatgtcaggaaaagattatacaactttctttatatatgcaagtgaggaacaatttatcaaattattggactaaataattctcttttctgaagtaagttagtcatttggaaaaactgtgtcatgaaatttgactgcataaagatcattcctttttttttttttttttctgagacggattctcactctgtcgcccaggctggagtgcagtggcacaatctctgctcactgcaacctctgcctcccaggttcaagtgattatcctgcctcagccccccaagtagctgatactacaggcacgctccactgtgcctggcatttttttttttttttttttgtattttcagtagagacggggtttcgccatgttggccaggctggtctcgaactcctgacctcaggtgatcctcccacctcagtctcccaaagtgctaggattacaggcatgtgccaccccatccggccaaggattattcctaatgaaaatttaggaagcaactaatttgatttcagaaacaagaaaaatggggtaacacaatacatactttgccttctccctctggataagggaataagtaagtatataaagaaatgaacaaatgtttaatacctcctaaacagctcatattcgactaagaaacaaaatcgttcagaaaatgagaatgaatatttttcaattacaagaataaatatgtaataacacagtctggtgcttctctacaataaaggtctttgattctccaaagagaagagaagaggctcctctagcctctgtgtcactttgttgagaagcaaggggaagaataaagcaagtcacctcaaggagatttgtccccaggccaccaggctcatgttttgtgttgtggatattgagtgtaggagtgtgaggctttcatgctcaaaagcaaggaccctgatggtgcctcaccttgttcttttaccttgtctctcttgggggtaggggctgagacccctgacattgaatatgtagcagagaagaagacgtagtggagagagtcagttattcactagatgtggcttctcatcctggctctgggaagttgagaaagtcatttatcttctctcatctccatttcttcatctgtaaattagcgacaatacagcctatcttgtctgcctccatccacagtaatactcaaggaagaaaagtgaaagtgctcagaaaatctcaaagccttacagaaatggccagggattctcttttgcctgctgtgagcctactgggtgtgaaatcccttgctatggtgcatcccaacatttctctaatggtttagcctatgggccaacaaagccttctgtttcagtgtttggaactctcaataacctttcacatgatttgcttattgcccactgctttgtcatcacccctgccaaacctatctgttctttaaagtctaacacaagactcacagttccttcacaaaaccttcctaactccaacccacatttacatcccttcttccaatttattatctgcaccaattattttgggcacttctcctgtgtatgtaaactttggagtttaggtctacgtcatttatatatcttttgctcatagttcagtttatttcaacaaactttcttgtatacttactatgtcataggacctaacaaaagagggaaaaatggttaagatttgggccttgcccttgggaaactcagtcttaaagggaacagaaacataaacaaataatgtatgacatggaatagacatatatacaaggtacttacaagaaggaaatgatcaactctatctagggattccatgaaggctttacatcattttcttatcttctacaactgtgttaggaactgagttcctgacaaataataggctgatacatgtttgttgaaggaatgaagaaatgaatcaatggtcagctgagttgtgttttgtttgtttgtttgttttagagacagggtttctttatattggccaggctggtcttgaactcctggcctcaagcaatctccccacttcagtctcccaacgtgccaaaattacaggcatgagccactgcacccagctgtgctgagtatttttaagaatgaattggaatctaccaggtattggagaagaagaacacaaaggaaatcatgtgtacagagatacggaactgttaaatatcatagcgtgttaggaacctgctgcaattgtgaaggaggagtgaagaagcttgtgagatagaccagagccaaaacatgaaggaccttgtatgtcattctaggaagctcggatagctagattattttaaaactatgttaaaacaaactgggataaaaatggaaaactgctacttctaaagataagctcagagtaaacataaagtcatagaaaagttggcagcactaacattttccaacaggttccagctgacttttgtggaccagttgtaaattccaccaacagtcaatatttaactcacttctgagactgctacctatgaacttaaggctaagaagtctccctttgtataccctgctttcagttttaagaacagccctagaaggaaaataatggtctcctccttttgctttaaggaaattgaagccttgggccgggtgctcacgcctgtaatcccagcattttgggaggccaaggcaggcagaccacttgaggccaggagttcgagaccagcctggccaacatggcgaaactccatctctactaaaaatataaaaacttagctgggcatggtaacgggtgcctgtagtcccagctactcgggaggctgaagcaagagaatcacttgaacccagaaggtggagtttgcagtgaaatgaaatcgcgccactgcactccagcctccaccctgggcgacagagcaagactctgtctcaaaaaaagaaaagaaaagaaaagaaaattgatggcttgaatcactggcttatagcaaacatagttaagatatggcaaggcaaggatttgaaacctggtgtgcttagttgccaaagtctcactcttttctgttgtacctcccgattaatttaggtttgacttccttcttcagcatcttcggcaatgtagtaatagaattgatgaaaaatagtagtaacaattattgcccacctcagcctttgaccccttctgagctctcttaatcaacctcagtgctgagacccctcccctccattcaccactccagccctctcccattctgatgccatcatctccctgcttctatccagcctcacgctaaccagaatgtggagctttttgtgagcttgatttctgattcctctggctgccgatggagatccctctgaaggtgctcactggagcaattattctgcttgttcccccatctctcacccactcccccaagtatagttatcaggacgctgctgtatttcccattgtccaaggactaattcatgaaatagggctggcttacctctggttttgcactgactggctcagagatattttgagatccatgaggtgagttgtgttttcagcagatttcaggcacagtgtggcattttcagtgatgtctctatcgaaggccttcctcagcttgaacagctatgaaggggtgatgctgctaggagctgccttgtccaagagtggaggcatctaatgtgactgcggaggggctgggaagtgttctgcacccttgcttgtctgctggtttcaaatgaccgctaattaaagacaaatcctagcaccgctcatcagcatcttggttcaaattagttgtttcccagcaaaaagggcagacctctgaaagactaaaacacagaatagataaacactgagtggaaaggtcagggccaaaagacacttctcagcagagcggggcaggcagagtggaggttctcgtaactggaggccagtctgcaggttggaaatgggtggaacttgaagtggtggggaggtatgtacatgacaatccctagaaatatcaaaaagttattaatacatgggaatagttaaactgagaaactgaacttcagaaattaatcccaggattaaatttctgctcaaaaagaaaaaaaaaaagcagagaacaacaacgtgtatgactaagccacagcaccaagatatgtaggtatatgaatgtcttcatgtgtgtgtctatgtatgtaatatatatatcataaaggccaaaaaaataataaaaagcacgtcgtagggaagcaaataaaagtggaaatatatacaaacaaggcttgggattctataattagtaagaggaagggactctgtgaatgaatttcaatccccaaatccactgacaccctaaggaactcagagatccatgaagatagaacatgaaaaggcttttacattaatatgggcgtaatatttgaaattggaattgtgattccaggaaccagaaaaaagtgttttccaagaatttctggcaaaaatgtaacttgttcaggtgaaaaaagagtttaaacaatctctttttaattcctaattaaagatgagccgagatctcgccactacactccagcctgggcgacagagcaagactccgtctcaaaaaaaaaaggtcctgctcaagaatctcagaaatgatgacatggagaatgtcattaatttatgactatctggaacatctcttcagcagaggcaccattggggtagttgattcagaggcccacattgtatgttacacatggaggcatagcttttggaagcggggatgggtgcaaggggaaaacagaaaggctggaatgtggccctcaagatttctctctaaagtctggaaagatttcttttcttttctttattttttgagacggagtctcgctctgtcacccaggctggagtgcaggggcatgatctcagctcactgcaacctctgcctcccgggttcaagcaattctcctgtctcagcctcccgagtaactcagattacaggtgcccgccaccacgcctggctaatttttgtatttttagtagagacaagttttcactgtgttggccaggttggtcttgaacccctgacctcaagtgatcctcctgcttcagcctcccaaagtgctgggattacaggcgtaagccaccgcgcctggccggaaagatttcttaagctcccctgattcctaccctgagcagggcccttgcaggcagtgcttgggtatgaggaggaggcttttactggcaggacagccagagttcaggctcttgatccagctggaggtataagaaagcccactaaagagacagccatagccatcctcagagaaggaaactgattagaaatgaagttatatttctcccatcactgtcatcggcaaaaaaaattaaaataaaaaaaatacaacagccagaagaataaaagtaccttcaagatcttttttggggaagacaactaataaatttctgtgaactccttgaggaaagcatgagtaaagcaagcaaagagcagaatcttttttttttttcctggccatagcagcatctgacagaagtacaaatgcacagtgctgaagtcttcttcatcctaaggttggctaggttggttccttcaaaggattaaagctgttcttataagatattccagataccctttgtgagaaatccaagatgtcagaagtgattgaccatggattagatcttaattattattgccccaaccatgttgttggtaatcagccaaaaaaagacaaaaatccatgctctgcacagcaatgcacaagtcacctccactttgtgagcaagttcttctgacaatgggaagtactgtctagttagtgggatttgacccctgaagtgtgggtggagagatggaagagggaatggaaacaaaagagaaaacaagcacttgggagtggcaggggaggagaggcccagaaagaatagcaaaggaggatctaaatgtcataaccgaggccctggtggtgcacctatcagcaacttgggaggctgaggttgaaggattgcttaagcctaggagtttgaggccagcctgggcaacatatgaaagatccctgcctctactgaaatattttaaaaattagcagggcatggtgggccacacctgtagtcccagctactcaggagacaggaggaccgcttgagcctaggagttaagaggccatagtgagctatgattgcaccactgcactctaccccaagcgacagtgagatcctgtctctaataataataataataataataataataataagggagtcataactgagctcaaaggaactcaaattctggagatcaagccagagatgtggggcagaagcagtatattgtggtcaaaagtgagtacagaggactttagaggaaactagaaaatgggatgggagagaaaaatgagtgatcaaagagaggtcaagtggggccagcagtagaggccagcatctgattcctggttataacttgagctctgcaaacatgctgaaaatcccataaggtatatgagggcacggtgtaacaagatactatctagtgtgagataattcaattaatcactgtgattgaagctgaggaacaaaacttgggcattatgagtagtaatacagaacaagattagagggaaaaaatgctagcagttagttggaatgttcttcgattatgtttatattgaacaatagagaagctgcatgacatagaaaagagagcaaagaagtctgaaaatgcaggtaccatttctgccatgttaacaagctgtatgtcccaagaaaaagtatttccaatttagtgtgggtttggagtgtgtgtgattattttatcatttgtaagaataaaataataataataaaataataagggtaactgcctcaaagaattgtgaaggctaacttggtaatgtgcatttaaacattttgtcaaattgatcttttaagcataatagaaacaggattgagataagaattaaaaacttaaacattttgtgtaaaaaatgctaataatcaaaataataactaccatttagtaaatgcctatagtgtgttggatgtaaaccagatgctttggaaaccttatttaatcttcacaatcacctgaaacttgaatatctttatccccattatacaggcaaggctcagagaggttaaggaacttgcccaggatcattcctttaaaaagaccttattactcacaaatgaagtaaacaaataatatttagtttgtttcatagtttccttaactataaattgtaaaactctaactcccagaaacaataaggaaataactgaaataggcaatacctttgaatttcacaattttttaattttacaaggtaaaaaaaacaaattttaaaattctgttgggtaaattggaacagtctggactggagttggggcaataaaaaaactttaaatctaacctgtcccaacacttaaatgccttaactttggaaatatttctgggaaaaaaagttgatgagaatatcttgccttgtaagtaaaaaattgactaattgattcataaactgagtcaattttgttactttttggcaaattaaaaaataaagctcttgtttacttacctaaaagagccacgtccagctcactggaataaaacatcgctgtcgcaaaacacaatctaggtcccttaatcctgccttttttgatcttaaaaggtggtaacattcagttcggagctcactcatctgtaaattgcatcacattatctctgagttatttaagaagcaagctctgtttggtttcaggcatttttaacctgctaaaggcaagaagaagtgttcaccacatagttgcaaaggtcttcaacttgccacagccaacagaaaaatcaaaatgattgaaccctttgggaatcagtatattgtggccaggccagtgtattctacaaatgcttttgaggaaaatcataaaaagacaggaagacatcataagacatttctggatcatctcaaagtgtgttgtaggtaagatattttttaaggtattggcattaggaatacatttttgaagcactttcccctaaattttctaactttccaactctcctttctggctctagtccacagcctacagtcctttcctctttagtttccaaacctcctactccctgacagagttggaaaggtagtgtctaaaatgaaccccatctcggcttatcaacacggtctttccaaatcagacaactaacagatggggacagaggaaaattctcatttgaaatattgcatgatttgagctgaggatgacaaataggtctattatggttaaagaaaagcaagcattttaaaaaatcctttgttggtgaccagagggcagctgattatgggtaaagaatgttactgggagtgaaattactagtttaatctttagcatattaccatctttaccaatttcccaccgacaggtactaaacttaaaatttgatattaattgactgacctgtggctttccatgttttcagctgttccccacaaaaggccaagagaattgtcctctctttgttccccatagcatcttggttgccagcataccggcttaaagaatggttgctcagtgatattgtttctggtatcagcacagggattgtggccgtactacaaggtaaaattttttttaagtataatttatatacaataaaattcttcctctgaatgtgtacagctcagggacttttcgtatattcactaggttgtgcatctgtcaccactatctaattctggaacattttcaccaccaccaacccctaaaaatcccttacccattaacttcacatcccccctaccctttctctgtggatttgcctcttctgcatatttcatgcaaatgaaataatacaatacatggcactttgtgtctggtttctttcactcaccgtaatgttttcaaggttgatccatattgtagcatgtattggtacttcattccattttatggacaaataagtattctgttgtatggacatatcacaatttttttatctgctcatcggttgatgaacatttgagttgtttccacttgggggctattatgagttatgagtaatgctattttgaacatttgtgtacaaatatttgtgtgagcatgcttcaattttcttgggtatatcactaggattgtaattgctggatcatagggtaactctatatttaatcatttgtggaactgctaacttattttctaaagtagctacaccattttacatttccactagcagtgtatgagggttcagatttctccatatcatcaacacttgttattgtccatcttttttcttttagctatcccagtgagtgtgaagtggtatctcattgtggtttgcatttgcatttctctaatgactaacaatattgaatattttttccaggtgtttattggccatttgtatatcttttgaaacatgtctattcaaagtttttatccatttttaaattgggttatttgtctttttgttgtggagttgcaagtgttgtttctatattctggataccagacccttgtcagatatacaatttgcagataacttttttattctgtgaattattggttaactttcttgatagtatcctttgaagtacacgtttttaaattgtgattaagtccagtctatctgtatttttcattgggtgcttatgccaggggtccccagtccctgggccacagaccagtacaggtccgtggcctgttaagaactgggccacacagcaggaggtgagtggcaggtgagcaaatgaagcctcacctgtatttacagccgctccttattgctctctttacctcctgagctccacctcctgttagatcagcgacaacattatattctcataggagtgcaaaccctatcgtgaactgtgcacgcaagggatctaggttgcatgctccttatgagaatctaatgcctaatgatctgtcacggtctcccaacacccccagagggaaccatctagttgcaggaaaacaagctcagggctcccactgattctacattatggtgaattgtataattatttcattaaatattacaatgtaataataatagaaataaagtgcacaaaaaatgtaatacacttgagtcatcccaaaaccatctccccttccctagtcagtggaaaaattaccttccacaaaaccagtctctggtgccaaaaaggttggggactgctggcttatgccataggtgtcatttctaagaaaccattgacaaatccaggtcacaaagatttatacctatgctttcttctaaaagttttatagttttagttcttacatttacatctttaatacattttgaattaatgaggtaacttatttttaggatccaattctaaataccataagaaccaaatgagaatgtctttgattcctcttgcacagagtaagggctctgctgcttgtgtgtttacaggtttagcatttgctctgctggtcgacattcccccagtctatgggttgtatgcatcctttttcccagccataatctaccttttcttcggcacttccagacacatatccgtgggtaagtcagttactgagctgattaatgctcacattgttttttccttatgaattttattagccataccttctatcaattccaaatttcacataatccaggagaagagtcatggtctcctgtgagaattaggaccagggtttgagatggagggcagggtcacagatggcagccattttatttatttatttatttatttatttatttttatttattttttgagacggagttttgctcttgtggcccaggttggagtgcagtggcacgatctcagctcactgcaacctccacctcccaggttcaagcgattctcctgcctcagcctcccaagtagctgggattacaggcatgcaccatcacgcctgactaatttttgtattgttggtagagacgaggcttctccatgttggtcaggctggtctcaaactcccgacctcaggtgatccacccgcctcggcctcccaaagtgctgggattacaggcgtgagccaccacgcccagccttgccagtcattttatatggtcttattctgtggttgaaagacaatgtgctttagagaggcatatactgaccacgattcacccactgttaattaggtccgtttccgattctgagtatgatggtgggactagcagtttcaggagcagtttcaaaagcagtcccagatcgcaatgcaactactttgggattgcctaacaactcgaataattcttcactactggatgacgagagggtgagggtggcggcggcggcatcagtcacagtgctttctggaatcatccaggtgagcaccttctcatgtaacttgcccacctcaatctgttcatcttgactgttacacatctctctatttttcctcccccctgccactcctccccatcttccctttggtttgtctctccctcatggcccataggaaatactgtacgaagggtcactcaccacaaccagagggagaggagtgggtcaacagtacaaaaacgaatgaatgtgggtctagacagaaggaagaaggggaatggagaggcacaaacagtgacaagcgaaatgcttcaacatatatctgggaattgatagagtcaagaaacagcatatctgggaattgatagagtcaagaaacataactgtatacaagaaatcgtcatactggtggctttggaatttttttctttaattcttcagcaactataatctagttggaagggatgggggctttgaactgttcatgtcaattttggggaaaactgacgaggattatggtggagcctaaagtctcacttccaagccgtatgctgacactcctgctgaatactgaaaatgtcatggactttttgagatgttgcctaagtttatggataatgatattattggttaagaccatttcttaaagaaaggaaaagtcagtttctacaaggacataagcatgcgtcttattgacaatttggttagttatttctaatacatttctgaacttagtatagaaatggaacccaactgggctttgggcagccacagctctggctgcgttctggagatgtgagcagaaagacaggccaagtatccaagggaaggagaatccatccgattcactcgattgcaaaacaatgatgctttaggggggaattaaccatccttttcccccagctagaaccaagcacttctgatgtccaatatgcagttatgtatttcttaagcaagttgagcaactttgaggaaataggatagacactcgctcatgcgtgctccagcagctagaaagtataacttaaaattacatcagcaaatttatgagggctgatgctaggtaagattctactagaaaaggcctatgagtcttccaaagacagcacacttaaaaataaattaagtgcaaataagcctgttacttcttgggggcaaactagacttatatcctatgtgaataccatgtgacgttccacctggatgatgcggtggaagggaaggagagagaggagccctgggtgggaggcgtcccaggaggcagggacatttgcttcttcaaggcatgtacatacaggttgagcctttacgttttgtgtaatattatttcagttgcggatccttgagtttgctgaggtatactcctaatctatgctgacaaaggcttttgttctctttccagttggcttttgggattctgcggattggatttgtagtgatatacctgtctgagtccctcatcagtggcttcactactgctgctgctgttcatgttttggtttcccaactcaaattcatttttcagttgacagtcccgtcacacactgatccagtttcaattttcaaagtaagtatttctttcacctaaaaaatactgaaatacatgaaactcactactgtgtttttagagagctttcctttaatgcctttgccatggggtttacctacagtttgtaaaattttttcatattaaaaaagaaagcagcactttgggaggccgaggcgggcggatcacgagatcaggagatcgagaccatcctggctaacacagtgaaaccccgtctctactaaaaattaaaaaaaaaaaatagccgggcatggtggcaggcacctgtagtcccagctactccagaggctgaggcaggagaatggtgtgaacccaggaggcggatcttgcagtgagttgagatcacgccactgcactccagcctgggcaacacagtgagactcttgtctcaaaaaaaaaaaaaagaaaaagaaaagaaaagaaaaagaaagtaaagccaggcatgatggctcatacctgtaatcccagcactttgggagcctgaggtaggaggatcacttgacacctgaacccaggagttcaagaccagcctgggcaacaaagtgaaacctcacctttacaaaaaataaaataattagccgggcatggtggtgcatgtctgcagtcccagctttttggaaggctgaggcagaggatctcttgagccagagagttagaggcagcagtgagctatgattgcatcactgcactccagcctgggcaacagagcgagacatagtctcaaaaaaaaaaaaaaaaagaaaagaaaaaagaaaaagaaaagaaaagaaaaaaggaaacgaaagaaaagaaaaagtagcaagggaacaatactgaaaatcaaccacatctaccatacagctaatgttaacaacaaaattaagtaacacttctcttagatttgactcaagtactttccaaaaggaaaaaaaaagtctatgttttaaaagctttaccattttgtcccaagttttaaactgtttcttaaaatcttattttgaaagaaatttgctaattgagttatgatgttttcctgtttcttgaaaagcatgtctcattcttttagaattgaagttcttgggtctttttgcatcctgtttagaaaacaaaagaacatttaccactatgtagatagggcagcagttctcccctcctccagaggatgcaaagtagaacagatagtgttcttagttttaaaacttgggacaaaatggtaaagcttttaataacatagattatttttttgaaaatacttgagtcaaatataggagaagtgttacttaatttttgttgttaacattagctcgatggtagatgtgtttgatttttaacgactcccaaaagtttttgggagttgagacagaacttgctccaaattggaaccaacactctctttcatccagaggtattccaaaagtggagtgttctagaagcaatttgggatccagttttggcctgcttgagctttttggggtaagtggatatggaacccaactagcttcaagaagtatgtgcacatgcatagtgcacagttagccagaaaactattttccaaaagtgacatagagagtcagctaagaaatatgagggggtgtaaaccccccaagagggccaggaattgagcatactaagcaaaactatcaaagatcagaagttattccctggacagagtagtgatggctgtgaaataaaaaatgacgaccaaagagacctaataagggcagaagaccagtggtaaaaatgtgaaaagtatccaacaaaatttgacactagccaaagagattcccagcaaaaatgccagaagcattcttaaactagtgtgccacctacactatgctaacttactcttctcatatctccatcgctactctctacaatttcacattcacaattaaaccggggcaatacaggaaatcactatcagtctctatcagtctttttgcttccatgtttatttttatttgtttggagatgcgttgtatccaaattgtgcattaatatagggctttggtggtttttgtttttataattgtaggtactatactctgtattctcacaaatagagaagactaatattgcagacctggtgacagctctgattgtccttttggttgtatccattgttaaagaaataaatcagcgcttcaaagacaaacttccagtgcccattccaatcgaattcattatggtaattgatcattttcagactctgtcatagctactctactgtttatatgttgtaagtccttcaccatttgtagctcaggaagttttagtggggcagaggccatctctgcagttttcgggcataatgtttagcatggttttattttcattcagaatttaataacttcctcttatgattttgagttaattttttccacgtgagacaaggatagtgcagagagcaagacccttgacaaaatgtcgtgttagagccatttgaatttagctgtggttctcaatcctggcggcatgttagaattgcctccgaatttcttaaaaagtaacaaagcctgggctggagttcttacttaacaggtacagaagtgggttttggcaatttatttttcttcaaagcaagactcttacttgcatctcacatttctaacttgggccatttgcaactttgcagaccgtgattgcagcaggtgtatcctacggctgtgactttaaaaacaggtttaaagtggctgtggttggggacatgaatcctgggtaagtgtgtcttcgatgatggcatcaccatgcactaagcagagagttagcagtagtgacaggagaggtacaatccgaactgcagttcagcctgcaggtaaccctcatcagaatcctccctgcaccctgcatccctaaggaaggctcactgctttccttctaggaaggtgctacaaagaaaggcagggtgtgcagttctttttttttttttttcgcctccccacagtgaatgcagttcttaatatcagaaggcttctccttgtggaagaactcacaaacaagacaagcagggacacagaccagtagaaactcacaggaaagtaaaagttagcaaagtagtgaaagtctaaaaataagcaaagtaaggccagacccggtggctcatgcctgaaatcccagcaatttgagaggccaaggtgagaggatcacttgagcccgggagttcaagaccagtctgggcaacacagcaagacccccatctcttgtttttttaaaaatatataaataataccataaagaaaaataggcaaagtaaactgcttctcctcttaaagaaacatcaagtgaaaccagatttccttgtccataaattactataaacaatatgtaatgctttgtttgaagttactggagccaagttctgaaagttcaaagaagacactgaaggaacacaggcactccacgtgagcagtccagataggcacactctgtcctttctcccgatcagattcaaaacaagggcagagcaacttttcccactgcaaaaggatgagaagtccagtttgtacaagaattttaaaatgtatttcattacattcagtggattgagaaggaagatcattttgtgttgtttcttctaaccacagaatcagtttcttccaacttaccaaggaaaaggtgttttcctgttttgttttgttttgttttgtttttttaaaagacttctctccctctctatgcttaagaaatatttgagaattcgagaaatcagcatttatatgtattttttttactttaaaacagccaaattcttttaaaggcaaatatatgtactttttatttttttaaagaaaaaacattttttttattaccagatcttcgtgtgttacatttcacgaatctcaagcatcacttttaatttttaaagttttaaagtggaaattaggctgaaactgaaagactgtttctagggtttccttctattctgccactttgaagtgatttcactttacttaaatgtcttgggagacataaaccaaatagaaaaaatgaatacttgcaaaaccaaacaggatcttgtcagaagggcttggaaaataaaagataaacttaagatcactgagttacaccttaaatacctcaacaacagtcttatttagtgaatgtattttcaatgtcagtgtacctctctccacagtgtgtagggtgtggcaacgggtaaccattacgttcaatagagtggcagtgtaacctagtaggtaagctccagtgttctagaggcagagtacctgagatttgattctgactcactttttgagcttgagcacattaccaaaaactctgtgcctcaatgttcttggctgtaaatatgaggctaaaaataatagctatcaagtaggattcttttaagagttgagtgagttaatacatgtaacatgcttaagtgcctgacttacaataaatgttcaaattacactactattgttaactagtttaacacctaaattaggtagcaagcacttgagctttttatgctccatttttttttctgggtgatgattgagtaggtattttaagtttttgttgattgcaaatagactataactggaaggtagtgattattaattattgctaacctactgttcatgactatgccaccttagtagttattttgcaaagtctcatacactaaatacaaataatttggctgaagaaaagtgctcattgaaacagtaaaggaaacacaaggagtatattcagattccagagggatcctataataatagctaacaggcactttgtgttttacagtgtgtaaatagtatttgcatttattatttgaccctcccactaaactgtgaagaaaagagaacaaggacgggcgccatggctcacgtctgtaatctcagcacgttgggaggtcgaggcgggtgaatcacttgtggtcaggagttcgagaccatcctggccaacatggcaaaaccctgtctctactaaaaatactaaaattagctgggcgtggtggcacacacctgtagtcccagctacttgggaggctgaggtggggagatctcttgagcctggacagtggaggttgcagtgagctgtgcactccagcctgggaaagaggagaccccatctcaaaaaaacagagaacaagttttattatcctcactctacaaatgaggaaattgtgacttgggaagggcaagtggcagagccaggaaatgaacccaagtctttagactgtaaatcttcatcacatcattctgtctatggtgttcagagaccagaacaaaagaataataagatcctggttattaaaaaacaaaaacattccaagctaacttttggatttataatggcatcagatataatagtacttcttcaaaattatggtataatagtacttcttcaaaattagagataaaaatgtattaccatagatattcacaaaatgtggaacagcaattcagaaagagttgattggacctaattaacccacttccaataagtctgatgtcagaaatatatgcttataggagtggaacattttagtaaattgatgttgagtttaagatacatgcaccttttatgatacaattagtaaatataattgaactggtctacattcatgaggcttaagcacagaagtacgccctgtgagttgaaggtttctctgacatatatcaccttaaagagaaatccactctccattagggtcatggttgtctctagcatttctgtgaagtgcagggcagagtccaaggcccatctctttgccaggagttttccatgaaaggttattattatcaatggaaagaagacttttttgctttccttgtctcacaattgtgtttgctcaaaggacttcatgtatggataactattgggagcattttgagtgatgctttgcagcccagtgtaacaatacaagtggaatagaagacattttgcaggaagcttataagaatacacacgcacattatagtgtggttttactggcaaaatcatatctgatttaccactatccttggattgaatttgcagtcttttaccaaattcaggcagtgttgcttttcagcattaagaaagcagattgcaaaattgttagtggagctaaattctcgttaatcatactccaaagtgagacacaactcagcctagattgcattcattcattgatttgcccaatggttatatcagtttataaattggttggtgacattcagacttgcttaatttcaattttagatttcagccccctattacacctgacgtggagactttccaaaacaccgtaggagattgcttcggcatcgcaatggttgcatttgcagtggccttttcagttgccagcgtctattccctcaaatacgattatccacttgatggcaatcaggtaagtaaacaaactacactgggtctcactgggcaactttaaataatattttgcacacataatatcaatggtgccacttctgaaaaaggttcattcttgtcttcctgtcaggagttaatagccttgggactgggtaacatagtctgtggagtattcagaggatttgctgggagtactgccctctccagatcagcagttcaggagagcacaggaggcaaaacacaggtatgtcaagatctttgctgcaagcactgtcctagcgttagtaactaggaaattcaagccaggggaaaagttgagttggtgatgataatttttttatcctcacagattgctgggcttattggtgccatcatcgtgctgattgtcgttctagccattggatttctcctggcgcctctacaaaaggtaacactgtctttggatagcatctctacttttagtggtaaatcaaggaccccggttcttaaattctgaaagcacaaactaaactaggggaaatgaggtaatgacaaactctcaagtactcttcttagccaatactctgtatgagccaaaaatatttctttttccctggcaacatgttctgaatgttaggaacacaggtgcccaacctgccttatctcctctacactttgcatgtgcatagccccaaatagaattaatgttgaaataggagggcaccctggcaccacactttcaacacgcatggactgagtagaggttttcttaaaggttaaggtaatcaggccctctatctaattcagagaatggccctaccagccacacaactcgttcttaggaacacaccctgaagcttctagaactttggtttaactccaagaccaacactgttggattgtgggatgggagtgaacagccagcacagacctcccagccctactctcatgctcctctgcctataagcttgagggtttagtttaatactttgtaaactgctgcagcactcagatataaaacataccatcagaccctggaaagcaaaggctctctaggaaacaagatgacagtaaatacattgttccttgtggttttaatataattttgaggtggtacatggagccctgttgacctccttctaatcctggctctgctacttattatctgtgtgattttgggcaaattacttaaccttgctgaacctcaagcgccacatttgtaaaatagaaagggaaataatacccactacacagagtgactataaaaataaataagatcatgtatgtgaactacttagctgagggtttggcatatgataaatacttgataaatgatagtcattattgttaataatattattattctacattgtattacactcctggctataaaagacatagagatatgatacagcccacaaatgtctattggctgttacctaggccttttttccttgttggttggtagccgaacggtgactgtggtcccaggttgctggactcccagtgtggtcatctcaaaaagctcaatggccaaatccatcttcaagcagggcagagaacaatttgccaaaaatatgcattctccataggctatacttctgatttcaaaataagtggcataaaaggaatgaaaaagtcaccactaaagaaatagaagaatgttatctcaataaaaataaacgcacacacactcacccctacagagagaactccaccctctcatgcttctccccgggtgtaaacttgagttctacctagcccacatcaatttggagacactaaagaaataattaccaaatcttgtccaagatttaatcaaagccccttttataaagggtcctgtgatatgttctttttaggccattgtggtcaggaatgtctttgtttcaaacacccaaataactatttgcttctttttatcatatgaaggcaaaataacccataataaaagctcataataggtatttattgagtgctcactgcatgtcagcagagctctaagcgttttctcttcatttaatcctttatatcaaatgcagtatggataccagattactgcggaaattatccccctttcctttctatgatttcttaatgctctgtaatctttactttaaaagtaatctgttgtatatgtatgtcatcgtaaattacttcaaattgtttttccgtagaatactgactaggtgggaaataatgcccaatggaaaaaaaaagtctcttcgcacaggtgtctcttgacatattttatacttagagaattaaaagtcctgcaaaatggagaggcccgttgtacagtcctctgacttctttgcctagctaccacaatggtgacatcttacacagctgtagtacaatatcagtactatacattagtatagtatgttaagtagattacagactttattcaattttcaccattttttaactggcattcacttgtgtgccaaattttttaaaagtcacttaagaccatatttcttctaaactgtgacctctattctcacagttagtaaaattaattgcttagatattatattataaggattacctgtgaaaattagaaataggcagatcagttcaactgtcctcaagatataaaaataaaaactgtatttggcttttctttgtacactgtgttttcatggtatagcagtatacaaattccatactccattcagaataaaataaattggcagggggaacaggacggtgaggggcatgttcctacaattacgataaaatccaaagaatgaagagaatatacttagctattcagcatttttcaccttaactatcacaattcctgcaagataaaagatcacattctggctgtggaagaattggaagtctgaagcttggctgtagggattagtactggcctgggaaatattcattcattggctcagccactcattcactgactaattttaaagcccctcctgtatgcatttaacatagtaggttctggggatatagcaggaactagatagatatgtttcatgctgtcccagaaagcccgcctcaagtcatctcattccaggacctcaagcttcccaagctatttttttttttaacaaagagcaacccccatctccttgactccaataaacaaacacacattagactgtctctgcttgggaggaatttattccaaatgttagtctgtcataggtctgaaggtctgcctttctctgtcccaaggtgcaggctactaaacgccatcagatcatctatctcataatcacaagagcagcctaggccttgtcactgttgtggggacaaagtcattcataggaacaggtcagagtcccagttctggtgtgtcttgcgtggcatcgcacaccggaaaagggtgtaatgctttgatttgctttgaggccctttaaagcacacacttatctatagccttcacctttgcttccctgtggtttatttcattaacttaaagtacatctgatgtttgtgtttttcacagtccgtcctggcagctttagcattgggaaacttaaagggaatgctgatgcagtttgctgaaataggcagattgtggcgaaaggacaaatatgattgtgtaagtagaggcaatagtatttgaaagagagataaatcacaatagcattttaatgctaatgtgaaatgcatgtttatattgtaaactaagtgaaattttgtttctatatatctgttcaaaaaaaccttagtttgttttatttgctatttttaaattgcatattctaatggtcattttctgggactttaatttttttaaatggctacttttaatttaaaagaatgggctccatgaaacactagtctagaacttccttaggcctattctaaaagttcttgcagtaatcccaagtaccacagaaactctctgaatttagggtacgcatggcttctgttcttcattacataatgtttttgtttccacgaatctgtgaagaacttaatttctgaacattgcttttggaaatactctcatttggaaaggctcccccttgctctcacatgctttgctattttaacagggtcaaagtctgtggtgtaaaaatgcctgttaacatacccttaggtatttaaagatcataactagtaaactacacttggtttacttttgtggggcgttttaacacccttttggcatgctaaaattcttataaagatagcaaccattaattaaatcaacagaccaagagtaaaacattagtataagctctaccagttaatttgctgatttttttttaagagataggatctccctctgtcacccaggctggagtgcaatggtgccatcctagctcactataacctcaaactcctgggctcaggcaatccctctgccccagcctcctgagtagctatgactacagctgcacaccaccatcctcagctatttttttttattttttgtagaagcagattctcactatgttgcccaggctagtcttgaactcctggcctcaagtgatcctcccacctcagcctcccaaagtgctgacattacaggtgtgagccttcacgcccagtctaatttgctgattttaatgaacagcagctggttctattaggttggtgcaaaagtaattgcagtttttgcaattataattatcactgtgacagataattccatttcctaaatgagttggagatgggattagaaataaatacactttctttgaatcctcttatatttgtgtgtgtttttgtggcccagaacctgagccagcagaaatgacctcttgggaaaagtgtcttctgtgcactttgctccctggcccaagatgacaactttcaacttccaccacgtctggcaaatttttaaattttttttatagggacaaggtctcactgtcgctacaaaaaaaaaaaaaaaaagtctttttaaaagaccccgtctcgacattgtactttaatcaaagtaaattgtagtgtatgtgttgctttcttttcacagttaatttggatcatgaccttcatcttcaccattgtcctgggactcgggttaggcctggcagctagtgtggcatttcaactgctaaccatcgtgttcaggacccaattgtgagtgctcaaagtgctctgcatcctggcaggcttggacctgcccaaatcagaagaggaaaaaaaatgtcactggctaaaagaacagtagttggttgataggtgtgcatttctatcaggatggggcagtttatcctccctccagttgctcatctcaaggcctgaagggcaatagcacggcccagctttagaacatcagcccagggaggagacttgctgttggtctgcttctggctttgactccagttcaaataaatcatataaatctctgagtctattcgcccagctataaaccagaagtaattctattccaagcaggtttaatgtctttgccttgtacttgttaaacatggaaatgtgttactgagattgtgagattgtttccatctagtggatggatttcctctttataggttgttagattgccctcgtacctttaaaatatggagctggattagagaacttctcaaaggcccctcttaccttaaaattccacaaaagccatttggaattcttgatttttaataatcattcagtccaagcatctttttaatttttatttatttatttatttattgtcttttgagacagagtttcgctcttgtcgcccaggccggagtgcaacggtgtaatctcggctcactgcaacctctgcctcctgggttcaagcgattcttctacctcagcctcccaagtagctgggactataggtgcctgccactggctaatttttgtatttttactagagacagggtttcaccgtgttggccaggctggttcgtgaattcctgactttgggtgatccgcccgacttagcctgccaaagtgctgggattacagtcatgagccatggcgaccagccttgattttttaaaatctctgccatgtaacatcactaccatgtggttgctcagcctattttgaattacatggtgtgacagaaaaagatgcttcctggggaactaaggagttctacaacagaaattgttatcacaaagtcaatccctgactgatggaatacatccatattgaaatactcccgaactctttcatttatttatatttcattccattttttactgggaacccatcaaacatagagacaaactgaatggtcataagcaagtcattttacttttccatgttctcatccatacaactgggtaatcatatccaccttacctcatggaataactgtgatattcacaatcaaaatggcaaaagcatatggagtgctttgtaaactgtaacatgacaaatgggaggcacttttcaggtgctgtgagaggacacaaagataagtaaaacaaggtgttcaccttccagagtctctgatggcatgatgattccccaaccttttacattttgaaaagtgagcctgctttggtatgctggaaaaagtcagtgttagccttataggcttaacaaacatacatgaatgatttacttggtgtttttctccctacagtccaaaatgcagcacgctggctaatattggaagaaccaacatctataagaataaaaaagattattatgatgtaagggagattcatgtttttctttgacttgctaaatgatattaactatggatctaatgggcaacacctaacaatgcttctctgccttacagatgtatgagccagaaggagtgaaaattttcagatgtccatctcctatctactttgcaaacattggtttctttaggcggaaacttatcgatgctgtaaggtttggggttatttaatttttttccttgtaatcttactgaattctgggaatgtcattgttctgtaaggtcattgttgagactgggttgtgtcacatatgttgaggtggggttgtgtcagtattttttgtcccacgtcccagaacagatgaaactaccttatggggagtttgttaataggttgggaaataagcctcttcagatgacatctaatatagaagaatccttttctcaaattctgatgtagagtaaaagaaatttaccaagttttgggctgctagcttttagtagatgtcatcctacagattttctttgggcatcaacttcagaaacaatgaaggagcatttaatatttgaccacatcctcaaagagattcagtataacagttgtaaatgaatagttaatactgaataacaatacatactgagtgtccctggcaaactggagagatgatgacaaggaagcagtcttgacagttaagaaaaaaagctcagtcctccctcttgaaacatgcctttggtctactctgtaccttgcatacagcctctgccttaaaccttaactattattattagtttgatatgcatccgacatttttctaccgagttttttgttgttgtttgcaaaatgagattatattgtatatttggttttctgtactgcccttttcgattactctagtaaacttccatctaactatattttttgtcaaggatttttttttttgagacaaggtctcgctttgtcacccaggctggcatgatcacagctcactgcaacctcaaactcctgggtttgagcaatccccctacctcagccccccaagtagatgagactccaggcatgtgccactacaccccgctaagtgctaagttttaaatcttttgtagagacgagggcttgctttgttgcccaggctggccttgaactcgtggcctcacgcaatcctcccacctcggcctcccaaagtgctaggattagaggcttcagccaccacgcctggccaaggattttttattacataatttgatcctcctctcttacttatctgtaactaaatattacagcaataagaattcattagtgttgaaaaaaacaaagattagcctcaaatataatactaaaattataaaataaaattgtacaataataaataacataccattataaattttaataagataaaaattacatacaagcagaatacttatgtaggtgcaactcgtactcaataaatagaaaataagtaaaataaaattccctaagagttgtgtaggttccaaacacaaacagattcaaatagagtttatgtccattcatggataatttatggatgaatcctggactgtgttatacaaaagcttttgactgttgataactgcatacaggtggagcagaccatgggtctgacccaatgttctggctgatattgtttaaaccacttttaaattttgtcacaaatatttttattatctgtcccaatccctcaaatcactccagttaaagttgttagaactatgctatataaataacagaatattcagtactcttgtaacacagcaatgggtttctcaggttggctttagtccacttcgaattctacgcaagcgcaacaaagctttgaggaaaatccgaaaactgcagaagcaaggcttgctacaagtgacaccagtaagttccttgaccacatttctatgcattatagctaaaagcttagtaaaggatgattcaaggtgtagttccattcctttaaatgaaatgccagataaacaagggatttcatgtgtcaatgagtgttatattttaaaatgacatccttctgagggtctccctaaaatttttattctcctgggaaaagtaccaaacacaattgtccacaatcttgttgttgtttgagacagtgtcttgctctgtggcctaggctggagcgcagtggtgcgatcacagctcattgcagccttgacctcccagactcaagcgaccctcccacctcagcctcccaagtagctgaaactacaagcacatgtgccaccatgcctggctaacttttttattttttgcagagatggagtcttaccatgttgccctggctggtctcaaactcctgggctcaagtgatcctcccacctcagtttcctaaagtgctgggatgacaggcatgagccaccacacctagtccaatcccatcgtttggctcaactcagaatcagtgcttctgaaactcactggctatctctgacatacacaatgtttttcttggtcacagttttcatacttgttatcctctcctgcagaaaggatttatatgtactgttgacaccataaaagattctgacgaagagctggacaacaatcagatagaagtactggaccagccaatcaataccacagacctgcctttccacattgactggaatgatgatcttcctctcaacattgaggtccccaaaatcagcctccacagcctcattcttgacttttcagcagtgtcctttcttgatgtttcttcagtgaggggccttaaatcggtaatttctttgttcttaatggaaacaaccaatcaatgactaaaggttaaaaaaaaaattgtatttgtgggctgggcacagtggctcatgcctgtaatcccagcactttgggaggccgaggtgggtggatcacctgaggtcaggacttcgagaccagcctggccaacatggcgaagccccgtctctactaaaaatacaaaaatcagctgggtgtggtggcgtgcacctgtaatcccagctactcgggaggctgaggcaggagaatagcttgaacctgggaggtggcaattgcagtgagccgaaattgcaccactgcactccagcaatacagtgagactctgtctcaaaaacagcaacaaaaaaaactgtatttgtggaaggatgctcctttaggtaacatgcatttaattagaagcaaatgataatcttagagtattccatggagggaaaggtggtgttcagtggactcttgaaagggcatttttccatgagactgggtactatattgaagggaatcaaatctacagttctaacgtatgctgaatctgctggtggacaactatgctcacattcctttcaaatttcaattctgtggtgttctcaaatctttgtgggcattgtgtctaaattattctgaaatcagagaagatctggaaaggtcctgggaaaaaatgtaagagtggatccttttgttttatcctcatccattataagctgatgaaatttcacttggctaaaacccaaatagatatatgaaagaataaatgtcacatgtgatttcaaaacacgactgaaacaatcagattgcagtgtgttttctttccacagattaatcatatttctaaaataaattagtttctaacagaaatgcagaaacatataaaaagaaaatttaagaaattctacatctttctctctttttcttgggttttcacaaaaaatctgcccaagtgagagctgacctaagataagacctattcagcatgggtgaactggatacaaaattagaaaatggaagaattttttttaaatgttaacatcatgtaactctcaagtctacttgcgttttcttttcttttttggttttggtttttgtttattttagcttttgattactttagcttttgtttctgcattttcactcacacacacacacacatttattttttggttctagcagtataacacaaaggacaggggctctaattcttagttaagtgcctagaagaggttctgaaagtgtttactgatgatggcaatgacattaatgatcatctaacctgatcaaacaatataagctacttttcttactttacatgatcttactcatatcactactggtatttgttcttagcctagagaccagaaaaatgtataaacattcattggtgctagatacatccattcattgtggacaaaaataattagcaactcatggtccataggttcttttttaaaacttttatgtagcaagaaagctctagttgagatcatcccaaagaagacactattttaaaattaaatcagagttgttcttatgagtttgagacagaacattttcccataatacttccttcaagaatgatcatttttaacttcttactgaggagaagggttcttttgtttgggtttatttctgtcacagagccttgtttttaactttagtatcttctgacactattatctcttttcaaaatgttaaagcttctaaaaggaatatatcacccgtaaggtataattctgattgttttctttatatttctgacaagtgaaactgttccctaaggaagatatacttttctttttaacagattttgcaagaatttatcaggatcaaggtagatgtgtatatcgttggaactgatggtaagtggctttatttttgttttatgttctgacaatcacttcaggctcactgccaactctcagtctagacagcctctccaaagaatgagtattttatataatcatgatgaaaatctaatatgcagccagcccaataaaaatccctatggaaacagcatctttgtattttagttatgttgatatgtaattaaatacattctacaatttgaatcctgatttcataggcaacaaaggaggaacatgttaactatttttcactctaaacttcctgaaaaggtagccttgttttctgtctctcttcctcccttcccttgcacaatccagcccataacaatttggttgagcttcacctgctgatgagaccatccttgccaaggttatcagcgatgtccagattgttaggattaacggccttcatctcaggtccttctgcagcagcttacctgagcatctggcactctctctagcatttgtctttgaaactctctccctccctgactctggcaggacagttcttattcacctcctacctctcaaacatctcctcagggtctgacattggttcttctcccactttcagtctcccccaagcttcaaccgtacactctataccatagttctaattccacagactctttctagtcaatttcctacatgtttatgatttcatgtgcatctacttgttaatgaatccccaaactatacctccagcccaggcctttcttctaagctgcagaccaatggactcgactgtggatgtccccaggcacctcagatacacgcttttagaactacgtatatgattccccctcccaaaaatacttctttcctatcacaatcactgcatcactgcttacctagttttccagatagaaaccctgaaaccatcaccaatttctgctctccttccctctagtcaatgaccaggtcctataaatatttcctcttaaatcagtctcttcctctccatttccagaactttaatctagacccttctcacttctcaactaggccttctagaaggactttctaactaatatccttgcccatccctataatgctctcccatcccattttctgaaagaagccttcttcaggaatttttccgacaataactgaaaacatccttgcttccccaggcagagcaccgggtcttcagactgtttgtatctacagagtacgcacgtatcacataattttgcagttcagtttctgtccctactagactatatctcttccagggcaggtattgttcctgcttaccttcttcctgtctcttccctagatcctaggacatgatgggcattcagtaaagacttattgaatacctactatttatcaggcacagttctgggtgctgggaatatagcagtgaatctgacaagcctctgtcctcatgaagcttatagtctcatagaaaagccacataataaacaaacaaaagcatatttcaggtagtgataagtgctaagagaaaagcagagttaagaaacagaggctgggagcggtggctcatgcctgtaatcttagcactccagaaagctgaggcaggcagatcacttaagccccagcgtttgagactagcctgggcaacatggtgaaacctcgtctctaaaaaaaaaaaaaaatgttagctgggtgtggtggcatgtgcctgtagtcccagctactcaggaggttgagatggaaggatcgcttgagcctgggaggtcaaggctgcggtaagctgtgatcgtgccactgcacactagcctgggtgacagagcaagaccctgtctcaaatcaaaaaaaaaaaaaaaaaaaaaaaaaaaaaaaaaaaaaaaaaaaaaaaaaaaaaaaaaaaaaaaaaaaaaaaaacccctttttttttttaaaaaaaaaaaaaaaaaaaaaaaaaaaagaaagaaaagaaagagagaaagaaagaaagagaaagaagaaagaagaaagacgaaataagaaagaaagaaagaaaaaagagagaaagaaaaagaaagaaaagagaaagaaagaaagaaagaaagaaagaaagaaagaaagaaagaaagaaagagaaaaaaggaaggaaggaagggagggagggaggcagaaagaaaaactggtgatcagggatgtccagcaatatgacattttgagtacagactagaacgaagtgaggcagtcaaccttgacagtacttagggggagctttttagggagaggagacaagtggtacacatatccttcgaaaagtataaaattggcatccttaatctctccctttctactggatcctgtccctaaaatatacagacatattctagtttcaagacttttaaaaaaaacttttaagttcaggggtacacatgcaggtttgttacataggtaaactcgtgtcatgggggtttattgtatagattattttgtcacccagatattaagcctagcacccattagttacttttcctgatcctttccttcctcccacccttcaccctccgataggccccagtgtgggttgttcccctccatgtgtccatacgttctcatcatttagctcccacttataagtgagaatatgcagtatttggttttctgttcctgcattactttgctaaggataatggcctccaactccatgtacctgcaaaggatattgtttttttttaatttttttatatgtttttatatagtattccacggtgtatatgtaccacattttctttatccagtctatcactgatgggcatttgagtccatgtctttgctattgtgaatagtgcagcaatcaatgtatgcatgcatgcgtctttataaaagaatgatttatattcctttgggtatatatccagtaatggaattgctgggtcaaatggtatttttgtcttcagccctgtgaggaatcgccacactgtgcttatacactgttggtgggagtgaaaattagttcaaccattgtcaaggcttccttataattaaaaacatccccttgatcccagaaacctttaatttactaacaattttaccctttcctcatcatcccagatattttggaaagtatctgttcctgctgtctctgctgcctggcattcttttcagtctttatcaaagattatcaccttccttcccattgcatgccacccactccatcccagatcctggtggccacaatgccctccacgctccctctccctctgtcactgaaagctttctgtaaacagaagaatccatcttcataactgtgtaccttctcttcctccacttttctgcaaatcctaggcacgtttagacggtatctgctcaagttttcccagatacccaccaagaggaaaatttctcagaattttcatagtacatgatctatatctctctcatatattcaacaaaaaatatgaagacatactatgtgctgggaatttttttaaaactaagaaaacaataaaggaaaaaaactagattgctcctttccctcattattataccacacgttttctgtcagtactacaggaatatataaatgttctatcttccttgagggcaagattcaggtctaatttatcttttgatctttcttattactcagccagagttttgcacatggcagacataaggtaatagttggttgagtcatctatgtaaatgaatgctgcttagtgcctacaaaaatgggatttctcaaagatgattagagaggtaagtggtaaggaagatgttttcccataaaacccagcagctttgggaaaatgggctacaataaagaaccacagcatatcactggtccataaacatatgttccattttggcagaatcccaaactttaataagaagccacacttgatactctaatcattaagcagggagatcaattcactaggctcctgcctaaatgaattttcttctaggaactactgtttttcatttgctcctttgccttcctcctttttacattagggcattaaattttttttattagaaaggtatttgttagttccaaaagacattgtactaaagatagactggtattataccactgcaacccacacacacttaaccaaatgtcaatgaaacgcacatttgcaaatggaaggtgaaattactagcctcaaggggaaaccggtagccaaacaattgtttcttcctaaaagttactgtttttttctcttcagatgacttcattgagaagcttaaccggtatgaattttttgatggtgaagtgaaaagctcaatatttttcttaacaatccatgatgctgttttgcatattttgatgaagaaagattacagtacttcaaagtttaatcccagtcaggtatcagctctttggtgactttcacaattgcataagcagccatctgcactccttaaatttctctttttcaacattaaaaaaaatcagcccctaatccatatttccattctctttttctcaggaaaaagatggaaaaattgattttaccataaatacaaatggaggattacgtaatcgggtatatgaggtaagattcttcaacaggtttatcttcacctagacatcacagcaaaaaaaaaccttcaaagtagtgaggccacttcctgcatgtggcagaaagtccagcacttgcttgagcctctgtgcctcatccctagaaaactgaagcaatgctaaccaatctcacagggagttttcaggaaaagaaactcagacccgtacaaaaacaggatgaaaaaatagtgataatagatctccattaatgcaatattgagcatatcttcttttgtttttcaaaccacttacaacaatgctcttattctggccctgtaataatccacgtagcagggaaggtattgctctttccatttacaggtgaattagcaatgaaaatgataagctaatacacacctcccaatagccagatgcttgagaagtccctagcacagtgcccagtcaagcaatgaaacaagtttctatccttccttactagagtgagttgccaattcagcatttaactggagagtcccatttcattgtagatgttcatttctagaacattcagtcctttaaagcaatgtttctagtttgggaaaagtagaatcacaaattaaaatgggtttctgctgtaggccaggtagatggcaggtgtattacattcattatctcaatccttataacaatatacaaagaagatatcttcattttccaaatgaaaaaaaaaaaaggaaacaggctcagagagcttaactaatctgcttgaggtcacataccaagtgaccccaacaggactgcactaagatctttctgatgacaagacctgtcttctgttctagtacaccatctctatcctctagtgaaagacaacggattgagggaccagagaaagaatttaatgattgtcttcaagcatggcaggcagctggtggtatttctcttagttgaaaggtctcaaaaaaggaatttctagtcaaaatgaaaaagaaatgtagagcataagataaatctggaacattattaagagtggtatcaagtagcaaaggtcagatgaaaaggccattctagaaaattggatagacctgaggtaagaggcgaatgtacataagcaccatgattctgtctcccaggactagattccagagaaacccaataaaactggcaccttgcctgagtaccttataagaaaagtctcacaccagaaaccctctcctcagtaattgtattcagaattgtcaccaagtattggaggataaagggtaggaatagcatttacctcatgtctgacccaaacactagaaccaattgtctaacaaatctagctagcacagtggtggaacttggcttccccatattaaaaaaaagaaacatttaacaccagctctttggtctcaaggaaggtaaatcaccagctgtggataggccaccagtggtgactggggtaacagctgaatataccaggccaacacacatagtcctttggaataaatgtgaagaaagatattgctacaacacactgtaccattactttaagttaagttaggcctttgaattacaatgtggtatcacatagatctatgttaaacaagcagtgatggaaggtacttgatcattaaaattcaagacaaaaaaaaaacctgttaactctggtaaattctagctcctaagatgtgattattgtaacagaacttgacgagtattttaaaacaagaactttctgtcttcttccaggtgccagttgaaacaaaattctaatcaacatataattcagaaggatcttcatctgactatgacataaaaacaactttatacccagaaagttattgataagttcatacattgtacgaagagtatttttgacagaatatgtttcaaactttggaacaagatggttctagcatggcatatttttcacatatctagtatgaaattatataagtattctaaattttatatcttgtagctttatcaaagggtgaaaattattttgttcatacatatttttgtagcactgacagatttccatcctagtcactaccttcatgcataggtttagcagtatagtggcgccactgttttgaatctcataatttatacaggtcatattaatatatttccattaaaaaatcagttgtacagtgga

SEQ ID NO: 635 - DNA, 118972 bp, Homo sapiens
gctaacccgcttgcagactgagaaatgaaaagtttggaacccagaagctgcagcctgcggaaaatgctggagccgcagccgacaccaagttgatgtctgtgagcagctgaccttctggacctccatcagcggcctgcagccaggagctgaagccacagagacggtgtcttctcagctatgataacctcagtgcaaatgtaattgattgacttttgaatgccaaaccaattttgcttctatggtataaatgctacttggtcataatatattatcctttttaatatattgctagattctatttgctattatattgttgagagtatgtgtttttcttcatatgccaccatcatcaccaacccctaaaacatctgttatgtcttgaatgatcagctttctttgcctcataaagaaaattgttgatgagagtcatagacatccaaaggcctttcacttctttgacggttgtgaaatgccacaaactgctaagcatgaactactcctttgtagctgctaagtgatgagctgatgactccccattcatggttttgttatacaagtgtctgacctggcataaatttagttttctaacaactttaatatgcacatgcaaccatgttgtccacacaatagctactaaaagctgaaaagaaataattcagatttcctgctggagaaaaacttgaaaagttaggcttagggtattgtttgctagggttgccataacaaaataccacagactgggtggcttaaacaacagaaatttcttttcttgtaattctggaggctggaagtctgaggttgaggttgatagggttagtttctatagaggcctctgtccttggcttgtagatgaccttcttctccttgtgtcttcacatggtcttccctttgtacatgtctgtgtcgtaattttctcttcctagaaggacatcagtcaggttagggcccatgtatctactctaaagagctttagcttagttgaagacatagacattttaaaccataatagagtgtgatatgtgcaatactagtgatgctaataaagtgccagggagaaaaggaggaaatacaaatttttctacagaaaggaatttagaaagatacctaggggagtttgcttagattgctgtgaacagcatactataaactggggggtaatttgagtctgagcaaactgaaagctgagaattcaggcttcttgttccatccttgtcctatcaggatttagagtgggggactaaagagccaactggaaactctgagcagctgggcagggcttatcaactttgagcatctttatagtgtgttctggggacattgtttcttggagaatccccaaagttggtatcatcaggtctttccccttaggctggtctgaatcaccaaggaagatacatctaatctcttacaagtgggtaaagttctgactggctgccaaccttcttgcagccaaaaggaacaagaagcctgatctcttacaagtgggtaaagttctgactggctgccaaccttcttgcagccaaaaggaacaagaagcctgagttctcagcgttcagtttgctgagactcgaatcaccccagtttatagtatgctattcacagcagtctgagcaaactcacgtagatatctttctaaatccctttctgtagaaaaatttgtatttcttcctctttcctcctggcactttattagcactactagtattgcacagattacactatattatggtttaaaatgtctacttcttcaactagactaaagctctttagagtagatacagaaattaaacatgcctgcatttcctaacacctggcataaagtctggtacttggtggtgctcagtcattattcattactttgggtagaataaaaacatctgaagtgcctttattttatggacaagacttcctctgaggtaatagctatttctggaatgctggatgtagagaaagatttggaacacctacaaagttatacctagtaaagttattataatttataacagttgggttcactggacatttatgtatgtggtagcttatacttctaatgttatttctgaaaccgttacaaaatttattcagcaagtgttcattgaatgtcttctaggtgttggccactgtgctagacactagaacaagactgtaagctcaaactgacctagttcctgccaccacggagttgacacggcagagaggagtttaaaggtttggggaaataacttggttcatgccaggtttcagagatgtaaacagtacgtggcctgtaccttctgcttcatggatgggcaccgtgggagcactgtgacactgagctctacctcggagagcccaggcagcatggttgttttataatgtctcttctggagacatctctagaatttgagtcataaatgaggccctcatgagtacactaaaaatgagaagagcctatgaaaacctggaaaatgtttggaaatccaaagatttctgagtttcaaaatgaacaagaaagggctcctagaaatctaacactactagggaatatttctgtacttgagacaaagtaagagaaacagtcttccatgaaccagagacaaccttaggaatgctgatcgttcagtagaaaacaattgctacaccacaggagtcatcacatcaggtttctcatctccaaattgattatagatgttcattgtgctgatcagtaatgagatttttacttatttagtcagaaaatatcttttcacacacataggtactggcaaacagcggtatcaaactgtgaccattgattctactttgccatagtcattgtttggaggactagagctgggctctctattccatgctgggtgtctgctttgtctcctggtgtgtaccattgcctctcagacctggtttggcactgctgacatcagtctcaccaagacagccagttctcaattcagcttcagtgttggatctccacttgctgaggattagcttctgtccttcctataccaactgcctacctggttagctttctgattgctttgtgtgcttgtcaatctccttgtaggtttttctgctttttcctcatgactggccctccctgaagttagtcacctgcccatctatctctggcattatgttattatgtgaggtctcccttcctttgtggactccttcttccttttgctgttggacctgagcctagcatccgcctcacctctaccaccctcctcagtgcgattagtttctctgggctctcccagtctagcttgtccacctatcacccaagatctagcactggaaccaggaagggcaggttcctgagacaaagaagttgatgttggcaggcccctagggcttttctgagacaacaacaacccatttgttgccagaattctgtggacactgagaccttctgtaacatgaggaatgtttacggtttacattgatgggtgatgtaatggtagctgcctctcagaatgcaagcgttctaagccattaacttacttacaaattactctgaacattttaatgttcagagtaaagtttcagaaccaagaaggtacaggttgttctgaagttgaagaagaaaagaagagaaggtacagattgttctaaagttaaagaagaaaagaataggcaaactttcaaggtccagttaacttagaaagtgtaggttcagatttaagtgacacaggcagtctattccaaagtctaacttgcatggaaggtgtggttttggcttgtgtctattgatcaggtgaactgttaagtttctttctttctttttttctttcttttttgagatgatggtcttactctgctgctcatgctggaatgcagtggtgccatcatagctcactacagccccaaactcctgggctcaagcaatcctccccatattctcccacctcagcctcccgagtagctaggactacaggcatgcaccataactcctggataattttttatttttcattttttgtagagacagggtctcactatgttgccctggtgggtcttaaactgacataagtgatcctcctgcctcagcctcccaaagtgctgggattacaggtgtgagccactgcatccagccaggaataagtttctagaacttgaaagactcaaaagaggttggggtttagagttcagttagagaaattgttatagccaaaaatatggctagcaacttggcaatgccaaccatcttcactatacctacttgtattatacataggtagattccttgaggtttattcatcttaggacctgaaggactaggatgtgtccctattatcatatccaaaatttagtgacttagagataatctaataatctctgataattcttaaaaatgaagaattcaatgtccagaatcacttaatttgtaacacagacagtcacttacaagctaagcctttatcagaggccccctgacttccccacctaggatttttttgtgtgtttttcagggttgaaaggggatagggatatactcactatgtacccacaatttttttaattaaaaaaagagaaaagggatgagggatgaggatgaaggaagagagaagtgaaattctggcagtgtagaacataaggaatcacttagtaaagatacagagtaagagtcagtagtatgttggtgatatggttaggctttgtgtccccacccaaatctcatcttgaattgtagtctccacatgttgagggagggaagtgattggattctgggggtggtatcccccatactgttctcataatagtgaattttcacgagatctgatggttttataagtgtttgacggtacctcctatgcacacattctcttctttctcccgccaccacgtgaagaaggttcttacttctcctttgctttccaccatgattgtaagtttcctgaggcctccccagccatgtggaactgtgagtcaattgaagctcttttctttataaatcacccagtctcaggtagttctttatagcactgcggaaacggactaatatacttggtatacaaaactggtatagaatcaagttacattttggagaataccaggaagaagcatctgaaagggcaattggagtgtcagaaccaggttaagagcaggctctgtggcacaatggatagttcattggacttttgcctacattgaaagaatgaggttaagctcaacaactaatgctgatgctttcgctggttaggcctataggtggaattcatgaagttgggggaatacctcactaatttttaatttttctaattctgaagcccaggctcacctgattgtggcagtggggaatgtccaaaatatgtaggaccgggcaggccggcaactcaggctaatgctgctgttttaggagtgaattttttctctggtaagcctgtttttgctcgtaaggacttcaactgattggatgaggcgcgctctcacattattgaagacaatttccttttttaaagtcaattaattatagttgttaccatatctacaaaatatcacaacatcaccctagattagcgtctgattaaataacaggataatatggcctagccaaattgacacacacagccaatcatcacagcaggaaggaaaagtaggatccccagcaactagaggtaaggcagagtcagtgcactgctatgagtgcaagtaggcaatcagaacccagaaacccataaaaatggaaggcacataacaaatgattagataaaagccatagatcctaggaatcccctaaatttgagacaaattatgacataggtttggtctttgtttttaaaaaatcataatgattcaacagcaaaatactttgaagaaggaacctggtggtatttcacttctgagatatcactaaaagaattgtgcgtaagtgaccaagtccctttggtggtcctccgaccttatctgtaaaatccaaaagtctgattagaataatgacaggatgtttgcagaaaagaatttgaatgtaaagtgtttagactgctctgggctgcatatcaaatcactaagagggatatttatttatttatttgtttgtttgtttgtttgtttattttgagacagtctcactttgttgcccaggctggaatgcagtggcatgatcttggatcaccacaacctctgcctcccaggcgcaagcgattctcaagcttcggcctcccaagtacctgagattagaggcacctgccaccatggccagctaatttttgtatttttagtagagatggggattcaccatgttggccaggctggtctcaaactcctgaccccaggtgatccacctgtctcagccttctaaattctggggttataggtgtgagccaccatgcctggctaatttttgtatttttagtagacatggagtttcaccatgttgactaggctggtctggaactcctgactcaggtaatccgcccgtctcagccttccaagcctttcaaagtgctgggattacaggtgtgagccaccactcccggccgggatattttaaaaatactgctgccttagccaaaactacagaagatcattaaactgaagtggagcctgggcttcagaattagaaaaataaaaacttaaaaaaaaatacttctctgagtacttctaagttcatccagtgtggagagtcaggtgcccaaattattcaaatttttttttattctggtttttaagcacataatactccatgtgattcctggaaagaaatctgcaagaacctggatttggttgtctttatggcatcttctagttctaaaatgaattccttctgtaccaacaactaatgctgatacttttgctggttagggatataggtggaattggtgaagtgggggtatactggaccaagggagtgatggaaaagatgagcacaaacccataacgccagaaaaggaaacgtggctctcatgctgcagatttatattttatttatttttattttttcatttttttatacttttgagacaggatctcactcttgttgcccaggctggagtgcagtggggtgatcatgtggcaggccaggtctcacaaacaggcaggcctccataataactgtttcagcactgactgaatggttaggttaaatattaaaggctgagagagccagtgcccttacacaaagtccagaacaagtaacaaaggcccaccaagactctttcccaggccttcctgggccttgaagcatgacaagataacgaaggaatactcacactccttgtgacaagacagtcttcgggagattcccagcagctgccgggtgaggttttcctggagactctccccagggctatcccatgtgcaaaaccacacgtccctctccctactggggaataacggagatcggggtggacgcgctcaaagggtaaaaccagatttatgccaggagcctattattttcccatctgggcttgttaagccatttgcctggtactgccagggaagcaatagggctcgcttatacacctgctttgcatttggttaagatcaggttttgagtgggttttgagtctgttctgcccgagtgcaccccctctcttgtctttgtctgaaatctgtctctgcttgtttgtgtatctgtcatggctcactgcagcctcaaactctggcctcaagggatcctcacacctcaacctctccagtagctgggactattggcatgcaccaccatgcctggctaatttttgttgttgttgttatagagacagagtctccctatgttgccccggctggtctcaaattcctggactcaagcaatcctcttccccctgattttcagaaatagtgtctaaattctatgatttagacatgtttagttagagtagtgatgcagtcattgtatttatattagaatacattcttttcatattttttttctcactgcttttagggttggaagagtttagttagttagagtagtgttttccaaagggtgtactgcagtctacaggattttgataatcttttcattagaggagtattcaagctttatttaaccaagggggttgtcatagaactcatgttccatggaaccaaactttgagaatcactgccttagggtcactgaaactagaagagtttagcatccactatttgctaaaattctctttgaccaacactattattaatttagcttctttcatcaccaaactgtaaccccttttcagcatggagtacacatgctaggatgcaccagtctagatacataagaaaatagtgaatttaaattgattagtgaaaattgcttggatttggggagttagaagtcttgggtatcagttctagttctggcacctagtaaataattttgagcaataagtcatatataataacttaatttaaataatcagagccttaatttgctcatctaaaaacaagaataaaatgtttataagggatatttttaagtttgacttgagctaatgtgtataaaaacttgtcaaattgtgaacactgtaaaaagcaagatataattatcacagaactaagtactttatattggttcagcagagtttcagaatttctactgttgtcaaagcacatgttttgctatgttgattttcagctgctatgaagtttatagaaaagcggaaagtctgaaatttctgtgacaaggctttttgttcggggttatttttaaagaaaacagaagatcggattgcattaaaatttgatgattgtgttattcttgttatatatgtcttgactagtatttagtaaaagttataaggaaaaaaggagcagttgtctgcaatatactagaaatgaactttaatcttttcacacgattcttattacaacattttttcctctctccagattgcccaatcactgaagagctgtgatcttcctaaacagttaaaagtcaggcacagctatgtaactcatacagtttctctttgccagactagactaaagaaggagcactaatttattctgataaaacaggtctatgcagctaccaggacaatggaatctacgttgactttagcaacggaacaacctgttaagaagaacactcttaagaaatataaaatagcttgcattgtaagtacaattcttatttttagtctttctagttttgtgacaaatgttaaaagtatatgatttcccatttacatttctttgtgttgctattaaaatgtaaacttttaagtaactgtattcagtattatcccttatgaaaactctaatgcaaattaatatcttaaatcatattttacacgtaagaaatttgagtaacaacaagttaacattacgttaaactcaaaagttggaatccatgacagaacgctttgtggcgctgattttttgcatgattataactacctctcaatcacttttttattgcatgagtattttaagacaagaaagtgagaaattaaaatcattgtaccctattatttgctgaaccaacaattgtatcctattttacttcactcctagagatagtctcttttgcctattttctctctcttgtcatttcatgtggtaagatctgccaccccccctcaccccccaaataaattttccttgattttattttcttttttcttttttttaattttaaatttttttctttttctttttactccagaaatacgcttatccatttccttgattttattactctctcttttccctttgccatcaaacttttggggtaaagagggctcatttcattgcttcagttttctcagcccccaaccattcctttgtgctctggctttgtttctactgtactgagtccctgactcaaaagtcagtcctcctcgtccttcatccacttgagtgttcataacaacaataacttcctggtactttctcattctgaattattctctccccttgcttctaccatgacattgacattttcattttatgacttttttccttatctgcattcttagccaacaatttatctttattctcatgaaaattacaacacaagcttcactaaaccctatctaagatctcttaagaaatctcatgttctctaatagtctttttaattttaattttatttttgagacagggtctctctcctttgggatctcacctcaccacaacctctgtttcccaggctcaagtgatcctcctgcctcagcctcctgagtagcttggaccacaggcacatgccacaaggctcagctaagtttttgtgagtttttttctttcttttcttttttttgtagagactgggtttcaccatgttgcccaggctggtctcaaactcctggatcaagtgatctacctgcctcggcctcccaaagtgctgggactacaggcatgaaccactgcacctggcctctagtgttttcctcagccaagaattccaagtaatccaccagctctgactttttgcccagcctctgtcacacaatttctttttttttttaattttattattttggtaatatgtgtatttttagagactgggtctcgctatgttgcccaggctggtcttgaaccctgggctcaagtgatcctctcattcagcctcttgagtagctggggactatgtgtgtgccccagtgcactagcctgtttcaaatgcctgcttcctgactcctgactcagtaccttacaccaaaactaattgcattattttttcacaccaatcttgccgcagcttttccctatatcccatattttaaggtcaccgctattctctgtctctccagaattgtttcaagaagtaaataaaataatgtaaaacaatgtgtgtaagtattaagcctagtaacaaagtaaatcctcaatatattccatttattctttatccttctgagaatttcaatttcagagtgctctttatagctcttatgctaatatatatatatatatatatttttttttttttctctctctcttttttttggagacatgttctcgctctgttgcccaggctggaagacagtggcatgatcatggcttgctgcagcaactcaggctccaactttggctcaaatgatcttcccatctcagcctcccgagtagctgggacttcaagcatgtttattatatttatcctagcttatcaattcaggaaattataaaatcttccacagcaaaatttgtgcatcattaatttcccttctttgtatctctctagtggtttttgagtatatataatgaagttcaatatttttaaatcattgtttcaaaagtaccctgatgtcttcaaacttttactaaagtttcacttaaacattttgaaggtatctgctgtgtttctagcactctttgtttagcccagttaaagccaaatgatgtgctctcagcagtttttgatgttcagagtattctccccactttgtgcacagtgtaacatagtttaagatacatgtgcaccccaatatcaagaagcttttttggaattacatatttatagtaaatgattataaaggcttaaaaataaacttcttaggcggggcacagtggctagtgcctataatcccagcactttaggaggccgagataagaggagctcttgaggccaggagttccataccagcctggtcaacatagtgagacctccaactctaaataataataataataataaataaataagccttttactctcaaggagctcacagaataatgtagaaaacaagccacaaatatatggaacaaatacaaaaattatgaagaaacagattctaacattaaatattgtgaagttttaaagcatcttaagaacagctagatgttgttgatttttctagcaagtttgaacagcaaaagtaccacagataaggtgtaaaccaaaatatgttaatttgtaagtctatgatgtgtgaggtttaccagaaggagttccccaacgttgtttttctgctttgtagtcactctagtttcagtcgactgtgtcttctaagcaccatgacaagggaggaactgctaatggtgttatttagtaaatgcttatgttcattttttcctctccatcctctccactgaatgaacatgtactgaaaggtcactgacccttgagctaactttgagacttcatataagaattgttttcttagtattgtaacatagcttcccaattgttgaattcacttccattgtaaacattagatgtgttaattttccagttgactttcagaatgaaaacaatcctcaaaaaaataatttatgtacttcttaattatctaagcaaaatctgatgtttttttcttttgtgaaagttattttttgtgtctgaaactataacaaaggttattgtaaaatactttcctaagtaatttgattacgtgtctttctgccattctttatgacaacatacagtattcaagccctgtcatccagcatgcttatctctggacttcatggaagaggaaagagggcagctagaagaattctttttaattatatcatagtttaatctaatcatagcataaagttcgttacaccaaagggctttgtcagcagagcgataatgaatgacataaacaatctttggtcaggcagtttccaaattatcctaagtggtttgtatgagtggaagaccaaaacagattatttgctagttaactatttggacaatgtatttttacgtatgttaaatattattatcatcctgtgatagagtaggaaaaaaagccctgctcccttagaatgaggcagttaaggatttaacagttctgcaattcttttcaataaatgatcacaaatgggtgcctggtttaaaaaaaatggcccagaaaaatggttttatggttttaattcttaactttaactcaatttgcagttaagttcattgcatttgaatggtaaatgtgtttgaatttgaagatctgtaataaatggtatctttaaattctgccaaaatattctttcttaatttcaagcattaaataaaatactatacctccagttaggccagatactagatcattgttggatctggtatctggcataactagtacgctgcaggtacttagagagaatactgagaaagggtggttatttgtatctttgtaattttttaaaaaattataaaagttactttttcctttttgcaataggttcttcttgctttgctggtgatcatgtcacttggattaggcctggggcttggactcaggaaactggaaaagcaaggtatacccctcagccttttctcagaacattcccttatttcttctctcttctggccttaattcattaaaatgtatctcccatcccaagcctcctctgtcctccatgcagcattctgcttctagacatctccctttccccactctacttatcgggagtccacatctgaggttggcattgctcactgtactttctggactttactttttcaccctgctcatttgagactcattatcattccagtgtttttctcttacctttctccaccctggttttttttttttttttttttttttggcaagatctcactctgtctctcaggctggagcacaatctccactcactgcagttcctccctgccctcaggtgatcctcccatacttgagcctcccaagtagctgggaccacaggtgtgtgccaccacacccggctaatttttgcagttttagtagagatggggtttcactacattgcccaggctggtctcgagctcccgggctcaagtgatccacccacctcagcttcccaaagtgctgggattacaggtgtgagttgccgcgcctggcccttcttcatctttataatggactttggtaagtggatcacagccttttcattctgctcccactgtcattttcaacatctgatgacaaagtatctagccacttagtcttgaaagtctttgttgcttcattcccatgacctcctgccaccaccctgtaccttgacaccacgctagagttgttctacccctaaaatctcctggttcttgattggacagtgccaaattcttgaaaagtagtgcataataatatcttcaaaaatttttttcttataagaagcaaagaaaaataggagaaatatgtcccaaaatataaaatacctcacattccttttgctatatttcattattatggagagtaaatgcaccacttacaaatgacaatataaaaagaattacctataatctttttacatattgttttgttacttttactaaggtgaagtatgaagccagttgctagatcattcatgtccccccgctttttgttgtttgttttttgagacaaggtctcactttgttgctcaggctgagtgcagtggtgtgatcacagcttaccgcagcctcgatctcctgggctcaagtgatcctcccacctcggccccccaggtacctggtatacaggcatgcactaccacacgtggttaattttttaattttgtgtagacatggggtctcactacgttgtccaggctggtcttgaactcctggatgcaagtgatactcctgccttggcttcttttaagcattgggattgctggtgtgagacactgtgcccagcaccctcaccctatttttgcctttgtaaaatttttatgagcaataatcatacctcaaataaacctcattggctactatactgccaatgcacaaagctctggccccatttttaaatttgactaaaaccttctagtgtgactccagtggagtaagtctcattgctgcagcattaggaagcctcagtaaggttaactgataattttccagtcatgtgtctacttgagaaacactcagcttccctagtatgacctaggagcacagtagaactgaaaagttgaataattgctggaagattactatcttctcttgtcacttggctgttgtgtttctgggccatagtgccagtccttgatcaaagaaatgttgacaggccatttcagtggtattgttttgatgttagtacacacaaatgggcatcacttcttggctattttaccccctaaatcacataaattgattgcagaaggcatatctaatgtctgaacaaaacctccttttgttccagctctttcattcactttagtacacccattggctggcttcccggagtcatttttccttgtcctcgtcctttcatctgagttgatcagccctatgtggcagcatgctcttccctctccctggcagggcattggtaattaactccagcccctttttgccagcatccttaacatagtcatcctctttattactcatttttccaccgcatctattctcctaaaccccaaccctgggtcattttcaccattttccactccagttaactcaccttccataggcaatatgtattttttctaatgtgagttttaaaatttgtgcatgttcttacagatttaccgtcatgactacacgtattttttgattgaacattatgtgcttggtattattacaattactggagatgaagtggtgaagacaagagacaaaatccttccaggagtttatattttagcatgcaagacagacaataaaaatataaataaacaaaatatgtatataataagataaagtgctaagaaataagtaaagcccaaaagaaggaatcagggtcgtctgtgtgtgtgtgtgtgtgtctgtgtgtgtgtgtgtgtgtgtgtgtgtgaaataacttttgagtaatgactgaaggaagtgagacagaaacatagggataggttggggaggaacattccaggtcagaaggactatcaagtgcaaaggccaaaggcaggaccttgcctggcatgttccatttaaggaataacaaagaggccatgaactagaactaaaaggactagagggaggtggtcataaaatgagatctactaaataaagaggaacccgatcaagtaaaggttagtatgtcaaagcctggtcttcaactttcattctgagtgtgacaagaactgattgcaggatttgggcagaggaatgatatgctctggtttgctttttaatagaatccctagggctgctgtgttatgaatagatagtagagtgagagcagaagtagagagaccaatcaggagattattccaataatctgggtaagccttatgtcttaaaccagggcagtagcattgtagctggtaagaagtatttggattctggatctattttgatggggtagatagattttattgaaagactggatttagagtaagaaagaggagtcaagaatgaccccagaatttttgtatgaacatctggaaacatgaatttccataactgagttggggcagattgtagaaggagctggtttggggagaaaaatcaggagctcagttttggacctgttaaatttgctagttctattggatgtccaagcgcagaagtcaagaatgtagttgaacatatgaggctagctttagaggtgaagtcctgcctggtcatgtactgtggtgcttgtcagcatatgtgggatttaaaccatgagactggggtagaacaaccttaaagaattggggaggtgaaggggaaaagcaaagaaaactaggaaggagtagccaggaatgtgagaggaaagccaggtaactattgtgttctagaaaccaagtgcagaaaggttttataaggggagagtgtatgaaaaaacgtaaagaccatttatgtaaatggttgtgatgtatctaaatctacatattttttttctagtttttcattgagcactttttgagacccatcagaattgccatgcatacatctgttctcatgcttctactgtgtgttactctttggcatgtacccaacttgccaaccaacctatgccctctcttggtgctgagcacccaaattggctttagttcctcacaatcacataaatactgcaggttcccttataaacctgtgtgataactgctttgccatagatcaaggaatgaagtttcaggaagttagggttttcatcttcttaactcaggtatgtagtcccaggttgctttctagaatggctgcctcagcctaccctaccttccttcaacttacctctccaccagccattgccattattcagctctctaatttttggcagtgtgcagttgggtatagaataaagtctttcattttagtttctatttctctgccctgttgctctaatccatgttggttgctctcttggtctggtggatggttgatatttccattagcccatctattgtgttagatcccatgattttaaaatctctttcttcttgtttcattttctcattttgttgaagaacaacttgatagcttcctaaaacaggatgcatgagagagataacttgaatctttgtctatgtaaagacgcatcattctaacctaacacttgacagtttggctaggtgttgaattctaagatggaaatactttgtttttctagaaatctgaaggtattactttactgtcttatagtatccagagttgcttttaatacatttggtattttaataaatttctgattagtgatcctttgtaggttgctcatgatctctctgtggaggctttcaatatctcttaatcctattgatctcttagtgtgagttttgccctgggaaacttggtgggcaactatggtctaataatttacgctcttcaattctgggaaattttataatatgatttctttcataacatcaactccattttctctttcactttaaggcctcacctccctgttctaagatcagttaattagtagccttagttacatctgcacagttccttggtcatgtaagacaacagacttgaagtctcagcaattaagacttggaatcttcttgtggaccacaattctgcttaccatatctctactgaatttttctttacttccctcatatttttacttacaagaccaccctgaatgtggggtcttttaaaaaaattatagttctctttcttattttgttgacgcagtatcttctctcttttctgaggctctcaatactctgtgtgtgtgtgtgtgtgtgtgtgtgtgtgtgtgttgttattttaactcttttgctccctgcattatttccttttcaatcaagtttttctttgatgttgtttgttcagtgtttgtctttcatgtaggttgctatcctgctatcctcaaatgtctggggaccatctgttcattttcagagtaaggcttgttttttcttatcatagttaccctcctgtatgtctgttgtctctgtgatgaaagccactccttattcctccagattatgagcctcctagtctggagtgggaggcagggtgagtagtgactgctccacatccaagcttttaccaattctcctatatttagctttgtgcctgttcccctcttctcttacctaatgacaccctgtttctcttacttaatgaccttttttcttacctaacgacaccctgggacctcccttctagggtcctaggggaaagctcttggctttttttttttttttttttaacttttccaggactccttcctcttaggcacctagttgttgcttccttcattctgctatttctgtgtttcaaaattctttttctgcttctatcttcgatttgatttagagtattcatatacttttataaactgttttcctcttctttttgtgaaattttgtggaatttgaggagatggaagaggtaaatgagttttatcaaccagctactttttttttttttttttttgcctcttgagtagctaggactaaaggcacgtgccactgcacccatctaatttttgtatgctttgtagagacggggtttcgccatgttgccaaggcttgtctcaaactcctgagctcaggtgatctgcctgcctcggcctcccaaagtgctgggattataggcatgagccactgcaccaggcctcaaccagctacttttaaagagaaaactgtattctattttgtagtttgctgttttcaaataataacgtaagcatttctcaaaatcattaaaaccatgaacaataatgtgttaaaataacttctactggcatccagaaatgcttataatgttattttatgttgatataataatttaataaatcctccctttaatgtacattaagactgtttcagttaaaatatgtttgtaattatgtataacactatggagaatatttctcaacatagatctttgtatgtttctttagtataaagtctggaagtgaaatggctgaaatcaaaggatgtaaagatttttttaattaatttaagattttaaacatacaaaagtaggaatactaatttaataaatgtctatgtattcatcatcccactctatcaattcatgaccaatactgttttatttatacctttctccataacctcctctacatattattttgaagcaaatacttgacattatttcatttctataaacatttcattgtgtatttctaaaagataaatttttttaatgtttcataatattggagataaatattttaaagaaaatgttctccactttgtagatagacttttcaaagtattattagttttgcatgggtaatataatctcattatttatttaaaagggtttcttccactgccgtataatagctatcatgtttccctcctcagaaatagctaagattatcatcacattattgtatattcttgtagaaattttataacagcaactttgtatttgtgttttcatgtactccttttgcctttctgtctttctttatctctttccttaaaattcacattttacagcttttgcttcatatcgtcaaataaccttcctgaaagttgtgaatttatactacgaacaactgtatatctcattgatttgttagtaaaaaatgatcatatttttcttatgttcactaactttttacagtgtactttgaaaatcatctgagtcttctgcttgatgttttttggggtcaaactatagtaggatgaattcaggagatctaatgctctgagaattatcacttttagtgcctgttatgtcagtcctcattgtccttaacctttcttgcatattttgaaaatgagtattctaaaatactgtccttaaccacttcactcctgagacatttctgttttgataagcacctaaaattttttttgtatatgttgtgaggcaagaatatcaagagattccttaccctatatagctggccagttgtcccattactatgtgttattcactgttactttgcagttaccacttaaaaatttttattatataaagtctctacaattatatctgcattatttatcacttcatctgcaattcccagcacagtgcctgaaacataatgatgctaaaataaatattcatagaataaataagtaaatgaattaatttaaaactatgcactggttttcaagggatagaaacaagttgtgcatagttgaactttcctagacacactattataacctccttgccttcaaacgactccttcaggatgcaaagcagaaagcaagtatcatagggaattatagataattttcaatgggaatgcatagcaaggagaaatgatatttagctgggcacacactcctcgcacaataagaactacagaattcccattgcttcttattcctaatatgctgatgactccaagtcagtatctttagtttatgtctctctttcctgagcttcagactcaaatattcagaccccctcctaaatatgtatttgcttagatatatggaaaactgaacttcccttttttcagtgcctttgccttacattttggaagtcatccttggctcatgccttttcttcactctttatataaagctgaactgaaactaattgcactttaatttctcttagctctatttacatcttccttatgtctactgctactatcttccttcaggcccttatcatttttttggggcgggtaaaaatttcttgcttagttcaggagtttccatccctaccctactcacctattttccagagtgactttctaaaacacagatctagttcattactctctgcttactctttaatggcttcctgttaccaaaggttgggcttcaagcttcttagtatggcatatgcaactttcctcgctctagtccacctctacctttgaactctaccccttagccatcataacccatctgctgttctccaaacatgccttccttagcttcactgatttttaaaaccttgatcctttcccaagactcaatggtgtccttaatccccttgctagtttttgtcccacccctgtgtgctcccatgtactccttgtacatatcaatgtcattactattattattattattgagacagagtcttgctttgtcacccaggctagagttcagtggcacaatctcagctcactgcaacctctgcctcctgggttcaagcaattctcctgcctcagtctcccaagtagctaggaccataggcgtgcaccaccacacctggttaagttttgtatttttagtagagatggggttttgccatgttagccagactggtctcaaactcctgacctcaagtgattcttctgccttggcctcacaaagtgttgttattacaggcatgagccatggcacctggccatatcagtgtcattatttattacattgtattggcagatcctgcagcaccataaaaatcatctagttgtctgtcatagtctgtgctgtgtacttcctgtgtgcttccactgcttaggtatgagatattgaatagctcctaaatgttcgggccctatttcctttactttgtaggcagctgcaggaagaagtgctttgatgcatcatttagaggactggagaactgccggtgtgatgtggcatgtaaagaccgaggtgattgctgctgggattttgaagacacctgtgtggaatcaagtatgagttctgagaataagtttattagcatgttgcttgtgttactattaatacatgtcaaatttttttcttttctttccttttttttgagacagagtgtcactctgttgcctaggctggagtgcagtggcatgatcatggccaactccagacttgatctcctgggtccaattgatctttccacctcagcctcctgagtagctaggaccacaggcatgcaccaccacacctggctaattgtttttaatttttttgtagagacagagtctcaccatgttgcctaggctggtcttgaactcctgggctcaagcagttgtcccaccttggcctcccaaagtgctgggattataggcatgaaccactatgccagggctgtgtccaaattttcacctacataccttgtgtattagtttcctaaggctgccatgacaaagtaccacagactgggtggcttagccaacagaagtctgttttcttacagttttggagactggaagtccaacttctaggtgttgacagggttgggtcctcctgaagactccaaaagagaatccgctccatgcctctctcctagcttctggtggctgctggcaatctttggcctgtggcagcacagctccaggctctgccttcatcttcacataatctgtgtctcttcacatagtctttcctctgtctgggtctatgtttaaattttcccttttaataagaacaccagtcatacaggattaaggtctaccctaatgacctcattttacttgattatttacaagtaattttttttttttgaaacaaagtctcactttgttgcccaggccggattgcagtggcacaatcttggctcactgcaacctccacctcctgggttcaagcgattctcctgcctcagcctcccaagtagctgggactacaggagtgcactaccaagcctggctaatttttgtatttttggtagagacggggtttcaccatgttggccaggctggtgttgaacttctggcctcaagtgatcccactacctcggcatcccaaagtgctgggattacaggtgtgggccactccacccagcctcggcaagtaatttggaaccatttctaaataaggtcacattcacaagtaatgggggttgggacttcaacatatttttagaggacacaattcaacctataagacctatacacagtcttattatcatttcctccttaacaatgctaaatacagaattcacactttatttaaccgaggttgaggaataacaggctatggtaaatgaaatgctgtatcattacatatgtttcaatggagttttactatggcttaagttcaacatcttgtttgtttcatttgcagtggttctcaaacgtcgaggtgcaataaaactctctgggaaagctggtgattcttgatcattctgatgccagtattccacagggcacaacttgagaaatgctgttctctaggtggaaaagacagcttacaatgtttaattccctaaataatctgggaaggtggtggtgggggggtgtccagtggttggaggagagtgaagattagaatagtagagttccttccattatgttccctgaaaagggcaagagggagaggataacccagtatagatagagatctgtgttccctttacttaatctccaaaaatcttctgtttctatgtaaatgagaaatgctggggaaggaagaaatctatatgtaactgaagtggacaaaagttacctattgagaatgtttgtctaagcacaaggctaacattgattttagtcactgtttcctggcaggtggcagtgccaagccacctgcctccagcctcttgctgtttttagcaatgggatttattgaaactgttctcatcctaagtccatagcctgggagaacccctgaggcatgagtgggagctgctctgtcactgctgtcactttccactgagaagtaccttgatctgcctacattctcaaagacatgactgtgctcctgttacttctgttgtcaccttttcttccttgctgcttgtccttagacaaggctgggcaaagctgcttttgggtggcaataatcagtcagggctagtgattcttcaccttggggagctcctgctcttgggtcggaataggagccatgttcagatcttctccaagctcacagtgtacctgctaagtaaacctgggttgcgatttataaagctgcatttctctctgccacctggctagtgaagaaaagtggtggtttgcccctcatttggtattatgtattttcatttattaatacagataaaccaagaatttgattgtgttattataatataggaataaataaatgaaatttgtatattttatactgcaggcttaaatgctcagaactgaattgtatcgttttacagctcgaatatggatgtgcaataaatttcgttgtggagagaccagattagaggccagcctttgctcttgttcagatgactgtttgcagaggaaagattgctgtgctgactataagagtgtttgccaaggtgagcaggaggatgttgactcatttgcccctgcgagtttagaggaactccatgagtttcctagagccatgctaggctgcaaaaatcaaaacacatcggagaatctttagttactctgtctgtgctgcagcaagtatcaagattttgatcttatgcttttcaggagaaacctcatggctggaagaaaactgtgacacagcccagcagtctcagtgcccagaagggtgagcatgactgatacagggatttttatcctcctttaacaaaggtgcacataagaatgtagttagttgagacgcagagaggaatttcccccaattcatgtacatttcaaaacagaatagtccacaaaggattagatttcttgtggcttccaagttctaatggacttttgtttgctttattttttcacaaagcccttttatattaatttattatattcatgtcttacaacgacgactttattttgtttttgtctttgagacaaggtcttgctctgttttccaagctggagcgcggtggtgcaatcacagctcactgcagtcttgacctcccagacacaggtgatcctccccatctcagcctcctgagtagctgggactataggcacgccaccatgcttggctaattttttatttttctctcttttttttttttttttgtacagatgaggtttcactaggttgcccaggctgctctcaaactcttgagttcaagttatctactcgccttggcctcccaaaatgctgggattccaggcatgagccactctacccagccacagtaatgactttaacaaattgattggaatattaaataggtaatactccaaagttcttatggtcaggattgaaacttagcttgaaattacttctgccagaactccttttccttttttaaataacttaattcctgtcttctttttttaaataaagatagggtctcgcaatgttggctaggttgatcttgatctcctggcctcaagcctccctcctgggcctcccaaagtgttgggattacagctgtgagccaccatgtctggccagaactcttttctattaacatcttggcacctcaaatttcttccttttgagagcagggaaagaggtttgtgcaggccttgaaatgaaaggaggtccttgaagggtgaatgaggagagctttgtcagggggcataggtgatgaacacgtgaggtgacactcctaccccacccctcccatgcatcttttccacatgtttatcagggctgctccgctgactgccagggcctggaaatgtgcatcacttcaagccagcatggattccccatttctccatccacccctctgcccttcacacttttctgggccaagtaatgggagaatggtggaagggtggatgaaaaagaaaggaatacctggctttaggaggaattggtagaggcagtttttaaatttaagttttattattattattattattattattattattattattacgagatagggtctcactctgtcaccaggctggagtgcagcagtggcacgatcatagctcactgcagcctcaaattcctgggctcaagctatcctcccatctcggcctcgtaagtatttgagactacaggcatgggccaccacatgcagctaaacatttttttgtattttttttgtacagacaggggctcactatgttgcccagactggactcgaactcctgaactcaactgatcctcctgccttggcttcccaaaatggtgggataacaggcatgaactactgtgctggccagtggaggcattttttgtttcaagacaaggtctcattctgttgcccaggttggagtgcagtggcgtgatcatgactcatagcagctgctacctcctagcctcaaacaattccctcacctcagcctctcaagtaggtgggactataagcatgtgccaccattctcagctaattcatttattttttgtagagacagtgtttttccatgttgcccaggctggtctcgaacttctgggctcaagtgatcctgccatcttggcctcccaaagtgctgggattacaggcaagacctgctgtgtctggcccagtggaggcatttttaaatagtgttatttcattttaaaaatgagtataaataatgtgcctgtttttttcccatgctgctttggtttgtagctcagattcagctgctctctttgcaccttgtgggtggaagagtaaaggattagaataaaatgagaggagtttgagtcctgattttgcctgtaggtcttttgcgctagtcacttctctgagcttcctctatgaaactgaaataataacaatgccagggtcagacgatttcatgtgagaattaaatgacctaaagcgagggaatatgcttggtgagctatcaaacagtaggttaattttagttctagtgtatggtacatagtaggtactcaagaaatcgttaatatttttctagtgaaatttttctatagtcacttgctttattagatgaacctggtacttgaatctattaaggtgtgcccatggcctcttctcatggttcaaattacacagtcaattcatctctgaaaagcatactaataccagctaacattcatatagttcttattatttaccaatttgtactttacacaatagtcatcttacatgttagtccttataaaaaccctttggctctattatctccatcctcattttacaaagaatgaaatggaggcaaaagctgtgaaatcacttgcccagtgctgcattcctagtggttgctggaagcaggaagcaaacccaggcagtaaggacccagagtctctgtggcataacactccctcaagtcataggctgagcccgtgatgctgtgcaattcatcagaagaacgggtaaggggctgaataaggggaagaattgtttgaggcaccaagactccctcacctgttgataaccgggaggagagagacattaggtgagaaggaaggtttccagtaaagtctttgtaaagagtctcaacaaacctagatgactaagcccaaatgattagttagaatggccttctccaaactggcaaatcactgtccacctgaggatttgagagctggagcagcatcccagagaaattacaggactgatttgtcaatcttgatgcaaggcaagactagaaaggaacctggtgaggaaaggggtggtggtggtggtcagaaggacactgaccatttcttacaatcccctcattctctttattccattgaagtcattcctgcctataccttccatccctgcatggaaaatggacaatgatgattctgctcactatgaataataagtgctgctaaaaattttagtggctgaagacattacataaaatcctcttgccagacatttatgctagtgttctctttgcctgtttgccttactattttgctagtgatcatagtatagtaaggagcttagactcttaaaccagacagatgtgagccaatagcctagctctgcccctactggcgggggacaccttgggtaaactacctgatcctggtgaaataatagatctgagatgacagttcttggcatgtagtgagctcttactcaagcttcatcacaggcagtaaaaataatatggatgcaatgttcaagttttttagcaatcggagaaataaaaatgaaaaaagatacaacttttactccatgaaatagtcaatacatcatgatttgtgtatataaagtcctagctacctgtcttgtttatgaaagtactgtataagttaatatctactgttgggaaagaattgtggcaatattttggtctcctttgaaagtttgtcgtaggccgggcatggtggctcacgcctgtaatcccagcactttgggaggctgaggcaggcagatcacgaagtcaggagattgagaccatcctggctaacacggtgaaaccccgtctctactaaaaatacaaaaaattagccgggtgtggtggcaggtgcctgtagtcccagctactcgggaggttgacgcaggagaatggtgtgaacctgggaggcggagcttacagtgagcagagatcaggccactgcactccagcctgggcaacaaagcaagactccgtctcaaaaaaaaaaaaaaaagtttgttgtaagaccaggaaatgtgatctttatgaatttatctttaggaaataattaagggtgttttagctacaagaatgttcatgtcagcagaatgtaaaatgcactctctagttagcttggacaggcaagctggccattaaaaaaggggtgcattggatgtttggattccactcttgatcccagagacaagtgaccctgtctttaatctcttccaagttattttaatggcatatttatgaatataaagtttttaatcagagttatgttaatgactttatgaaaaaaagaagtattttctcatgcgaattgcagtaggccactttaatttcttcatgaattttctgtacactgcagttcaaacggtcccagttttccatttttatttttaaattgaggtatcctatagttcatactataggatgaactatggtatgaaatggtcctatcttaagtgtatagtatgatgcaatttggaaattcactaagctatgtaacttaccaatatagaatatttccaccatcccagaaagatagctcatgtcccttcccattgcttacttcccaaagacaatcactgttctgatttctatcatcatacattcctgttttagaattttatgtaaatggagttaaaccacaggctgtcttaggtcggaaacctaataactttccaaattggaaagtactcaagtgcctatggacagtagaataagttctggtttattcattcactggaatattagatagctatgggaatgaatgatccataattacttgcaacaatatggaggaatctcaaacataatgtcgagtaaaagaattgagactcaacaaaatgcacactgtatgattttatttgcatataaatgtaagtacaaaaatagacaaagctaatctatgctgttggaaatcaagatactgatcatccttggtggggtgtggtttggagaatttagtgaccacaggaagcacaagcatcctgataatattctgtttcttcatctgggtgatgactacacagggagttcagttagtgaaaatttatcaaactatgcttctgtgaaatgtgtgtgtgtataacagaagtaaaattttaggccaggcgtggtgactcacacctgtaatcccagcactttggaggccaaggcgggcggatcacttgaggtcaggagtgggagaccagcctggccaacgtggtaaaaccctgtctctactaaaatttatccggttgtggtggtgtacgactgtaatcccagctactctgaggctgaggcatgagaatcacttgaacccaggaggtggaggtggcagtgagctgagattgctccactgcagtccagcttgggtgacagagtaaaactgtgtctcaaaaaaaaaaaaaaagaaattaaaaaaataaaaaatgacagtgtctggctatggcccaaaagttacccaattattttaccttaaacacaggtctaaaaaaggattgcaatgcttttgaggtaaatgtagctatccaaaacaatggacaaattttgttttccattttcaggtttgacctgccaccagttatcttgttttctatggatggatttagagctgaatatttatacacatgggatactttaatgccaaatatcaataaactgagtaagtcttctgtaactagtggcatgcaaatgataaagacacctagttagtcaatctctagaggatgcaactttctttctgacttttaacgctggtggtttgtcttagcctagatcctctctgactttaccacatggtttctactttcattcggaagtatattttcacgcttgctggcttctcctacctttattttggtgggatgttcagccttttgtttgtttattttgatttgctttatatttgaatgtaacttctgtcctatggaaatctattcatgtgtactgccttgaaagtgatgtttgtcagacccaggttctgggccttagcaaggagaatatagcgagaaccggatcctgaaggagcctggtgggcttagacagatccagcacctcccaccacttcagccgatatcaagtccaggatctatttccagttctggaatcaaactgcctacaacctgactctactacttgctagctgtgaggtctcagacaactttccttcaccttttagtgacccagtctcttcatctgtgaaatggtgacttcccacctgatagtattactgtgagaatgtacaggtagcattcaaaaaatagctgtttgatatgtggcatacaatgggtggttttaagttattgttataattcttttattatcaactttattataatgttgtacttctgtgttaggacacttggccttcacacaatttaataaaggtagtaataaagagaagttgaggctggatgtggtagcttatgcctgtaatcctagcactttgggaggtggaggctagagcatcccttgagctcaggagtttgagaccagcctgggcaacatagtgagacctcatctctatttaataataatttttttttaaaagaagttgagtacccaaggatacaatgctaagaagtggcatagttagttagaatcagagagctaactccaaggcgcacactcttcactgccctgcaattcctctctttcttctccctcctccgaggctgttttatatccctaaagttctcaaattttatgtcatttttactggtttattgtttttctttttcttcaagttattaaaaatagctatttgactctgggtaagttgactgacttttctgggcctcagtttcctcatttgtaaaatgaaatgactagatctgatgatttctactgttaattccagccccaaatgccatggttgtaggaagatagatcactacttcctgcaactcaaggtgcattgtttcttcagcttctccctcattccctgaggcagatctttagcaaagagactgttttccaaatccaggacctgtcatttttctgctgagttattttgtcctagaaagttaactaacacttctcagtttctatcttcttatctaaatttgtcttgataaactggatatcaaatctggtgtcaaaagggaatttgactagccagggtgaactgaaccttttctaaagtgaaattcctcgatttgctcattccattgagaattagaaatgacatcaatgaaatattcagccactaagagctttctgcttttgatgtttaaaatattttaaaacatttaaaatattttttagtcatatagacaacatctcaatccccaaatgtgtgaagctatgatcagctaggcctacctaggcaaaatagggctgttagtttctcagaggcctgattaagaatagatgtggtaggtaggggtacatattctcaggaccacctgaggctgttttgagggaaaattgaaaaaggagagatgtggttaaataggattaggattatgttagtcttgaggtgaggtatgtgacagcaggccttgctattaagggagcccagggccccatctctagggtttcatcaaactgcctgagttgggccaccatggtcatgtaaactgagcctaaacaatatcacagagcagtgagtcatattagtgactgttaagtggacgaggaagtggctctctgaatcacactctaatgaggcaagaacattgtcttgtcttagtgcaggtggcagcagacaaagaagggccagggccaagatcaggaaactgtcaagtgggatagaggtgatttggcctatttagaagacagccttcctgaaaagttagatgggaatctgtggatcaaataagactagaagtagcaggtagacagcagagatccagcaggggacatatgcagagttttagagattagagtttgcaaggttggcattcatgaacagcagagctcttatactggccatagcagatgtcatttgctgtctgctttttaaattttgttaagaatgcataacatgagatctatcctcttaacagatttttcagtgtacaatgcagtattattatctataggcataatgttgtacagcagatccctagaatttacttattttataaaactgaaacttcatatccattgattaacgattccacatttcccccttacccagcccctggaatccaccatcctattctttgcttctatgattttaactattttagataacctcatataagtggaatcatacagtattagcgtgtctgtgactagcttatttcacttagtatgtcttcaagtttcatccatgttatcacatgttgcaagattttcctcttttattaaggccaaataatattccattgtatgtatatgccaccttaaaaatctatttatcttttaaagagaaatagattgttaccacatcttggctcttatgagtagtgcttcagtgaacatgggagtgctaatatctctttgagatcctgatttcaacccttttggatactcaaaagtggaattgctggatcatatacttttatttttacgtttttgagaaacctccatgccattttccatagcagctatgccgttttgcctttctaccaacagtgtacaagagttccaatttctgcatatcttcatcaacacctgtttttggggtttttttgatactagatatcctaacagatgtgacgtgctatctcatttttaaatttttatttttaattattgttattatgttagagatgaggtcttgctatgttgcccaggctggcctcaaactcctgggctcaagtgatcctcccatctcagcctcccaaagtgctgattacaggtgtgagccactgtgcccagcctcattttggtttgatatgcatttttctgatgattagtgacattgagcatctttcatacacctattggatatttgtatgtctttagagatgcacaatatctttcttctttgaagaaatatctatttaggtcattagctcattttttaatgagactattgtattttttgctatcaagttgtagaagttccttatatattttcgaaattaacttcctatcagatacatggtttgaaagtgttttcccccatttcatatgttgccttttcattttattgattgtttccttttctgtgcagaaactttttggtttgatatagtcctacatgtccatttttgcttttattgcctgggcttttggcatcatgttcatgaaatcattgccaagaccaatgtcatgcagattttcccgtatgtttccttctagaagatttatagtttcaggtcttactttgaaatctttaatatactttgagttgatttttgtgtatggtataagatcagagttcaagttcatttttctgcatatggatatccactttctgacatcatttgttggagcaactattatttccccattgtgtattcttcttggcaccctttttgaagatcggttgaccatataggcttggatttattgatttatttctgagatctctattctttttttttttctgagatagggtctcactctgtcacccaggctagagtgtgatggtgtgatctcagctcactgccacctctgcctcccaggcttaagcaatcccctcagcctcctaagtagttgagactacaggcactgcatgccaccatgactggctaatttttgtatttttgtacagatggcattttgccatgttgtccaggctggtcttgaactactgagctcaagcttgccttggcctctcaaagtgctgggattacaggtgtgagccactgtgcccagcctgggctccctattctttttcattggtctatacatctgtttttatgccagtaacatgctgttttaattactgaagatttttaatatattttgaaatcaggagctttgatgtcttcagctttgttctttttcaagattgtcgtggttatctggggtgttatgaatttaattttttttctatttctgtaataaatgtcattggggttttgataaagattacattgaatctatagattgttttgggtaataggaacattttaacaatattaagtcttccagtccatgaacatgaggtgtctttccatttgtttatacgtcttccttaacttcttttcccaatattttatagttttcatatacaagtctttcactttcttagttaaatttatttctaagaatttcattattttcaatgtttagaaatgagattgaatagttaattattagtacatagaaatgcaactgatttttgtatgttgattttgtatcctgcaattttactgcatttattagttctaaataaatttatttagagctttcagtatatttagagcttcagtagatagtatcatgtcttctgaaaatagggacaggtttacttctttctttcctatgtggttgccttttttttttttcttgcctaattgctcaggctagaagagtggacagtcttgctttgttactgatcttaggtggaaaaattttcaccattgaataggatgttagctgtagacttttcatataatctttattatgttgaagtattttttttctatagctatgtgccacataacaacatttcaatcaacaacagactgcatatataatggcggtcccatacattataatggagttgagaaattcccatcaccagctgggcatggttgcttatatctgcaatcctagcacttcagaaggccaaggaaggaggattgcttgagccaaggaattcaagatcagcctgagcaacaaagtgaaaccctgtctctaccaaaaaaaaaaaaaaaaaaaagtagctaagcacaatggggtgtgccagtagtcccagctactcaagagactgaggcagaaggatcccttgagcctaggagttcaaggttgcagtaagctatgatcacaccactgcactccatcctgggtaacagagcgagttcttgtctcaaaaaaaaaaaaaaatcctatcacctagtgatgtcatagaaattataatgtcatagtgcaatgcattattcatatttttgtggtgatgctggtgaagacaaacctactgcactgccagtcataaaatagtacacatatttatgtacattacatcatacttgataatgataataaatgactgttactggtttatgtatttactatactatactcttttcaaaagagatggggtcttgctatgttgcccaggctggctcaaactcctgggctcaggcgatcctcccaccttggccttccaaagtgccttccaaagtgcttggccactgtgccaagcttatactatacttatactttgtacattattttagagtgtactactacttatttaaaaatgttaactataaaacagcctcaggcaggtttttcaggaggtatttcagaagaaggtactgttatcatagaagatgacagctctatgcatattattgcccctgaagacctttcagtagggcaagaggtggaggtagaagacagtgatgttgatgatcttgaccccatgtaggtgtgggctaatgtgtgagtttgtatcttagtttttgacagaaacatttaaaaagtaaaaacaaaaaattaaaaaacaaaagcttatagaataaagatataaagaaaatattttttacaactgtgcaatgtgtttgtgttttaaactcagtgttattacaagagagtcaaagagttaaaaaaattaaaagttattaaagtagaaaagttacagtaagctaaggttaattgattattgaaaaaaatacatttttgtaagtttagtgtatcctaagtgtacagtgtttatcaagtctatagtagtttacagtagtgtcctagattttcacattcactcaccactcactcactgacttactcagagcaacttccaggcttgcaatcatgataagtggtctgtattatatcatattttcactgtacattttctatatttagatagatagggataaatatacaattaccactgtgttacaattgcttacagtattgaataggataacatgctgtacagatttgtacaatagactttactatatagcctaggtgcacagtaggctttaccatctaggtttgcttaagtacaccatattatgtttgcacaatgatggaattgtctaacaacacatttctaggaatgtatccctgtctttaagcaatgcgtgactgactgtattcctagtttgttgagagcttttatcatgaaagggtgttgaattttatcaaatgctctttctgcttctattgaaatgatcatgtaatttttatccctcattctgttaatgctatatatcacattaattgattttcatgtgttgaaccatccttgcaccccagggataaatcccacatgatcatggtgtataatcttttcattgtgttgttgaatttggtttgctagtattttgttgaatatttttgcatctattttcatcaggaatattaacctgaaattatattttattgtgatatctgtgtagcttttatattagggtaatgctagccttattcatttgaaagcattctcttggtcttcagttttttggaagagtttgagaagaattggcattagttcttcaaatttttggtaaagaaattgtcagtgaagccatctggtcctggtctttttcttgggaggattttaattattgattcaatctccttactgtttatagatttattcggactttctatttatttaagattcagtcttggtacattgtatgtttctatgaatttatccatttctagtaggttattcagtttgttggcatataattattcatagtattctcttaagaaccttttatatctgcagtatcaattgtaatgtctcctctttctgattttatttatttgagttttctctctttttcttggtctagttaaaagtatgtcaattttgtttatcttttcgaagaaccaactcttagtttcattgatttattctattgtttctccattctctatttcatttcttcttgcatcttttcttttttctgctaaacttggatttagtttgttcctttttctgttccttaaggtgcaaaattaaattgtttatttgaaattgttcttctttcttaatgtaggcatttattactataacttccatcttagagctgcttttgctgcattccattttcatgttcgttcattttgtttcaagatattttctaatttctcctttgatttcttctttgacccattggttgttcaaaagtgtgttacataatttctacattatttgtaaatttttcagttttccctgtaatatagatttctagtgttattccattgtagttggagaaaatacttggtatgatcccaattttttaaatatgttaagacttgttctgtgatctaatatgtgatctatcctggagaatgttccatgcatacttgagaaaaacatgttgtgttgggtttaatgttctgtaagggttctgctttaaaaaaaaaacctgctgatagttttatagggcttctcttgtatattgtgagttgcttttattttgctgctttgaaaattcattgtctttgacttttgacatttgattataatatgtcttagtgtggatttctttaggttcatcttatttagaatccttcaagcttcctggatctggttgcccatttttcctccctagatttgggagtttttagccattatttctttctataaactttctggttctttctctttttcttctccggaaaaccccatcatgcatatattaatccacatgttggtgtcccacagttctcttaatctttcatcacttctttccattcttttttctttttgctcctttgcctgaataatttttaaaggcctgagtttgcctctctttgttgaaattctcactttattcatgcattgttctcatcacctcaacgagcatctttatgacagttgttttgaaatgtctgttaggaaaattgtatctctgcttcattcaggtcaattcctgaagatttatcttgttcctttgctttgaacatatttccccatttactcattttcctttactctctgtgttgacatctgcacgttggacaaaacagtcacctttctcagttttcatggaccggcctcgtataggagaaaccctcgccagttggcctgatcagcgattctggaggccccttaaaccttcatgctagtccagccttgtttctttgttgttaggggccccaagtgtctagagtatgctaggtcccattggtgttccaagatgagtgaaacttatcttggaaggaagccagctccttgggcagtcaccagagaatttggatcattagatgtcttgtccaattctttctctccccagagaaaagttggggtctggattttgttttgttttggtcgtggggctttttttttcttctttattttgctttttttctctgtgctgtgccagggagagggactatggtgactaatatgctacatcaaaccggtgtgtttttttctcactggcccccaggtgactagagtatgctaggttccattagcgctccaatacagacaagacagaaaaagccagtcctttgggcagtccctggtaaagttggggcattggacacttagtgcaactcttcctcccctgggagaagctgggagttggggttattgcctgatttctctgtgctgagccaagagcagaagctgtggtgagtgcctgtgtgctcgttagaatctcctctttgttctttgtagcacacaggggactaatagatgttgggtctcatctcttctaactcaagtgagttagaagccaatttctcagatagcacctggaaaaattggagtgttagatgtgtggtccaattttttcccccttggggagaaactaaaagttgagagttctctcctgatcatatagcatcgttctgggaatgggtattatgtcaaagaaacagttctgcttttcctactggtttcgatgtaactggtgttatacttgcctggtaagcaggagcctctcaagtagtttctgggtttctcacaaagggaattgatttatgtgtggctattgaatgattgtgtctgctgtgggaagagtcgtccaagatttcctattctgttatcttggtaacatcactcctctttgctctcttttgacccttcttctttatgtgccaagggattgaatgcatacttgcaactctgggaagactgaagcccctgcagagcttattattctttattttttttgagtgctagaaatgatacaggccaacattatggctaatctttctacaaggttattctactaagttacatataaaatgaaagtacctattttcagcctgtgaatactggtaaacagtttgctatgttttccatttgtacagatatcttaataatatttcattatgccagtcttataagaatttcataaggactacattgtagtttttttttgagtcggagtctcgctctgcgttttttttttttttttttttttttgagatggagtcttgctctgtcgccgaggctggagcacagtggcacgatctcagctcactgtaacctccgcttctcgggttccagtgattctcctgtctcgcccccccctgaggatctgggattacaggcacgcgccactgcactgggctaatttttgtatttttattagagccagggtttcaccatgttggccaggctggtcttgaactcctgacctcaggagatccgtccgcctcagcctcccaaaatcctgggattacagacgtgagcaccgtgcccggcctacattgcagttttgatctgtacattctctggttgctttacctactcacctgtttagacctttgctgcttcttatagttcctagttactataaacctagttgcataggcttatctcatttatattttcagattattttgtttagtactttatttttttaattgtttttttagaagtaaaatacacacgtaaacattttaaggcaatattcgagggtataagtaaaaataaatgaacaaaacatctttcctggtcttcctacttttcctttgcaaaagcaactgctcattggtttattgcgtgtctttccagtagtctgttcaagtataacttaaattattcatatttggaagaaaccatggtagaagactgtgctttctgtagactttcttcagtagctgtggttcaagggcaggtaatacaaaacggtagcttgggtctatagtcagcagatgtgtcttgtttatgacatataactaggacggtgccatgcttttacaataccggtagcttaatttgcattttattttatcctctagctttacccatttaagaatttgagtctgccacccgtttcaaggatattaaagcagaaactgactttatgtatctgttcattgtatgaattttttcccacttaaattattttaattgtgtaagtggactagatcttattttattttcttgttatatgacttcttaacaatattaaatgtctttccttaattgagatcaagatttacttattggtggtattgattaaataagaaaaataaaggttattttaatcttatgttttataaattaagtcctggagcagttctcaaacttaaatacattaggatgacctgggctgcttgttaagaatgtaaatttttagccaggcacaggggcttacatctataatcccagcactttgggagggtgaggcaggtggatcacttgaggcaaggagatcgagacaagcctggctaacataacaaaactccatctctactaaaaaatacaaaaattacctgggcgtggtggcaggcacctgtagtcccagctactcgggaggctgaactcaggaggcagaagttgcagtgagccgagatcacgccactgcactctagcctgggtgacagagcgagactccatctcaaaaaaaaaaaaaaaaaaaaaaaagaaagaaagaaggaaaagtagattttttttgaactccctttccttctcctaccttccaatccccatcagagaatcctatgtagtggacttgatatggggccctagaagtttctgaaggaggaaattcctgaatcagaggctgggaaggagaccaaccccatgtctatttgagaaaacactcattgtgttcagcagcaaagcctgtgactttttggatgacaattaatttcatgttttgttttgacttaaagagaattgataacggtgaagctttattttagaagtagaggcaacacaattttgctgtggaaaatttcttgtacttcactgctgcagaggaaatagcaatgtgccctagtggttctgacctctttaaacagggttattgcacagattgaaaacaacagaacaatgaagctaaattgctgtcatactttgtgaaacacagatcacaggaaacttccctggtctaatggaaactgtactaaaagtaagaagcagtaaagttagcttaatttgtaaacagtactacatgacatgggcttatgcagttacacaagtgaaatcctttttcatttgtctagacagtagtgttgacttttgttatattagatactttacatgtaagaactatcagctagatgccaatgctatataaagcaaacaaactggcagtgtataatatagagtacatttagctcaggggtcaacaggctgtggcccataggccaaaactggttcactctactcgtttgtgtatggcctgccatatatactgagaattgttttacttattttaaaaattatttatttatttatttatttatttgaaacagggtttcattctgtcacccaggctgaagtgcagtggtgcgatgacagctcactgccgtctccatctcctgagctcaaacaatcctcccacctcagcctcccgagtagctaggactacacaggtgcatgccaccatgcccagctaatttttaatttttatacagaaatggggtttcattgtgttgctcaggttggcctcaaactcttgagctcaagtgatctgccgtctcagcctcccaaagtgctgagattacaggtgtgagcctctgggcctagtctgttttacatttttaaatggttggaagaaagtaagaatattttatgacacgtaaaaattacctgaaatgcaaatttcaatgtccataaagaaagttttattggaacatgaccatattcatttgtttatttattgtctatggatgctttggggcctcaatggcagagtggaggtgtttcaacaaagaccatatagctttgcaaagcccaacatgtgtatcactggctcttccagaaaaaaatctatacaccttgatttagctcactcctctcctaaaagactgacattccctggaatggaggaagcttagagaccagaatttcaacctctttccatctttaatccactttttagtttgttttttatttttctgagagactttcatgttcagatttttagttatccaaaaaactgaagaagaaacaacttcctaatttctcaccatattctgttgcagaaacatgtggaattcattcaaaatacatgagagctatgtatcctaccaaaaccttcccaaatcattacaccattgtcacggtaagtgcttgacccagtggtaagacaggccaaagaccagaactgaccacataaacagacatgtttgggcaggaactgaccgagttctgtgacttacccttctgaagcacatggggggatagttcatggctgaattcaggctgtgaaggaatggctcaatatgaggccagtccagggctgtgaggaatgaactatgaataagtgtccagcattaggttaattcacctgtgtcgagccaaaaacagaccctttgatgtgagaaataccattttcctctgatctttcgattgccctttgtttatctgagggtctgctgggaacagtaggctatatatagggacaactactttgatgtgggaaattttgttctttcctagtcttttcattacaattaacttgatagaacttctttttcataaatgaattcacactgtctacatctctttagataaagcaataaaagcaagtgatataaaaaagatgtaggtagaatgtgtgaaaagtgtataaaaagatgtaggtagaatgattaaaatgagctcaaataaaaattaaattatttaagatagatagatttataacacattttaaggcatcggctgcctcaaaggatatttgtgtcttcattactttgagttttaatcttttattactatggaacagtaactatgacatttacattttaacccccacacaaatgtatgtatgtattctcattacttgcagattctgtatttgtgggtttgcttactcactaaaatttatttgtaacccccaaatcaataagtatagtgcatttgtggtcatttgcagccatcacaaagaagcacaaaaagttgagttgcccaatgcttatattcctagctaaggtctaaccaggagacattctgctttcttgttttagctgtcatactataaacaagtaccattttcacaatctcactgtctattgaatgccatactttttatattctcatgcttttttgggggtgatttcactggttaaaattgtccccttgcatagtgctgatgtggtttctggtgttcctaagagcaagaaggctatgaattgccttacagaggaaatatgtgtgttaggtaaactttgctgaggtatgagtgatagtgaaccaacaatatacataaataatgtgactttaaacaaaaacactcataaaagaaggttatgtgttgatcagaagacaaaaatgtcgtaatcagaggctctcaggaacctaactctctatttttcctaggagcaatggttcagtaatcattaatttagtgttcatgacaactttatagaatataactactacgaataataataattgactatatatacataaatatataccatatatacatatatgtatacataaaatagggattatgcacaaatgcaattaatttactatttatatatttttatacatatatatgcatatatattcatatacataaaaatgttctaaaataatgaccctaaaatctataggcatttaatgaaaatgtgtggaatgattaaataaatatgtgggattggattaaataaatgattggatggataggtgggtggatggcagggaagatggatagagacttggcaggctgcctttaaaatgctggtagcaccctttaattcaatttagccaggatatttgatatacagaaagcttctatctagtaaattccttgctattattgataatataaccagtggctaaccattattctaatatgggaaactttaacaaacagttaattaaacagttattaagcacacaaaagttatattaacaccatcagcacaagctatcagcctaatgtcacttatttgctgctgtaaaccataatagaactagaaaaaatatatatatatacacacttggccctccatatgtgtgggttctgaatccgtggattcaactaactgtggattgaaaatatttgggtggaatcaacctaaatgcccatcaatgacagactagatagagaaagtggtacctatacaccatggaatattatgcagccataaaaaagcaagctcatgttttttgtgggaacataaatggagctggagactatcatccttagcaaactatataccacacattctcacttataagtgggagctaaatgataggaacttattaacgcaaaggggaaacaacagacactggggtctgcttgaggcaggagggtgggaggagggagaggagcagaaagtataactattgagtgctggcttaatacctgggtgatgaaataatatgtacaacaaacccctatgacacatgtttacctaggtaacaaaccttcacatgtacccccaaacctaaaataaaagtggaagaaagagagaaagaaaagacagacagacagacagacagaaagaaagaaagaaagaaaatatttggaaaaaaattgcgtctgtactgaacatgtacagacttttttttgtcactattccctaaacaatacaacaatgattgacatagcatgtatattgcattagctattataagtaatctagagatgattaaaatatataggagggtatgcataggttatatgcaaatcccaagccatttactagcagggacttaaacatcttctgattttggtacctgagggaggtcatggaactaatgccctatgaaagccaagggatgacaatatctcctgatatgtaagttcaggtccaggtgttttacattgaaaggtatatagtacctttcttaggtatgagtaatagatcgtgtgctattttaatttaaatttctattttactaatattttatcttacatcttttttgaaattatcattttagggcttgtatccagagtcacatggcatcattgacaataatatgtatgatgtaaatctcaacaagaatttttcactttcttcaaaggaacaaaataatccagcctggtggcatgggcaaccagtatgtagcattctacacgtcgcaactgaagtaacctccatttctcagtgtgacaggaggacactcttctcactcagtggagcaagttctatgtcacccatctagtttctaagggctgagggtgcaaaggtgttttaccactatttgtaacttgaatttttaaaacatttatggttgttaactcaaataggtatgtttaaacttggatattgggttataaatgtatccatctggaagttactcagaaagattatctgttaatgtttttcctcattttgttttgtaagtctttttttttttctttttttttgagatggagtcttgctctgtcgccaggctggagtgcagtggtgtgatctcggcttactgtaacctctgcttctcaggttcaagcacttctgcctcagcctcccgagtagctgggactacaggcacgcaccaccacgcccagctaatttttttgtatttttagtagagatggggtttcaccatgttggccgggatgatctctatctcctgacctcgtgatcctcctgcctcggcctcccaaagtgctgggattacaggttgtaattcttttaaagggagagaggaaccatccaattttaccagtttgattgctacgtttttgatttttgaggcagattcttagataattatatcttttaattactacaaagattaaaatttcaattttaatacatgttgcaactattaatcttgtttagtttctagtaaggtacaccatttctacccaaagtaattactgactttcgcttatcctaaattttcttacagatgtggctgacagcaatgtatcaaggtttaaaagccgctacctacttttggcccggatcagaagtggctataaatggctcctttccttccatatacatgccttacaacgggtagtgaagcactttcagatattctcccagctaggcagaaatgatcaagatgttttctgtcttaatcttggtggcaattctattaatccagttgtttaagccaaaaatcttgggaatcaccattgattcctttcctttatgtcactcaagcagtctctcagtaaatgcttttggctgtaattaaaaatctatgtagcctgagaactttttattacctctagcattaccactctggttcgagctgtcatctcttgcctgtattaactgcagttgcctctttactcatctctgcttcttatcctttataatctagtctcatcccacccaccagagggattcctttaaaattcaagtccagccaggtgcggtggctcatgcctgtaatcccagcagtttgggaggctgagatgggctgatcacctgaggtcaggagttcaagaccagcctggtcaacatggtgaaaccctgtctctaccagaagaaaaaatacaaaaattagctgggcatggtggcgcattacctctaatcttggctactctggaggctgaggtgggagaatagcttgaacccaggaggtggaggttgcagtgagctgagatcaggggctcctgcagtgtagtccagcctgggcgacagagcgcgactccgtctcaaatgaataaaataaaattaaataaaataaaatgcaagtccaattatggcattattttgcaccaaaaacttcaatggccccctgtgtcactcagagtaaaagcttacaaggccctgtgtggcatgacctctggtgtccccttacctctcagacctccccttctgctactccctcgggtgctcactctgaactcgttggtggacttcaacatgctagacttgcttctgctgcaggacattgcactggctgttcaccctccctgagatgatttgctccatggatccgaatgcctactctttccctgccttccagctctgttgaaaaattaccttctcaatattgtcttaccccagttatacttaagatttaaaatttcaaaccaccttcatctcagttactctgctctagtttttttttttttttggtccacaacatttatcaccttttaatacgctatataatttatttttatattaggtctattgtttggtacttgtcttcctgcattagaatgtaatctttggtttcctcactgatacattctgttttgaatgaacaaatagtatccagcaataaatgttcaatatatgcatatgcatacatttttaaaaattgaatgaatggatcataatcaattgtcttttattttagttaggagaaactgaaagagagaagggtggggtgaaataaaacaatctacatttcttttatagtgccgcaagtgtatctataaacagaaatccctttgaataatactgaataccttccagtattgtgattatataggaacacaaaatgggtagctgaagatattaaactttctgaataggaatgtaatggagttattcttgatttgattcattttaaagaattatttctaccctattttttcagaagtgtcccatttgaagagaggatttctacactgttaaaatggctggacctgcccaaagctgaaaggtaatgtctagtgtcagaaaagtgctggcatagtggcatatatatgggtaaaaaatgaagtttttttttttttactttaaattacaatttttggctattttcgaaacgacgtggcattgccttataatggacacttttcatgaattattcctggctgggcagggggtctcactcgtgtaatctcagcactttgggaggttgaggcaggaggatcacttgagcccaggagtcccggaccaacctggacaacacagtgagatactgtctctaaaaaaatgtaaagaattagctgggcatggtggtacgcagttgtagtcctaactacttgggaggctgaggtggaatgatcacttgagcccagaagtttgaggctgcagtgagtatgatcatgccactgccctccagcctgggtgacacagtgatatctctctcaaaaataaaaaaagaaattattcctgggagctagtaactttttgttttcgaaaatgtggttgacattattgaacaacagagatagagccagcaccagagatcagaggcaaatatcacagaaccagagccagatatggaatggagcagagctgggagcaggcctgacactcagttataaggatagactccaagagcacaaggtgctccatcaagcccatacccacagattggagtgagggaaggctaatcaggagctccaggtaaacagtgcatcagaaaccagacaccagaagaaagaacttggtataacagaaccaagaatcagcaaaaagtcagaaaccaggaaacagaaaggactgggacacaccaagagtggtcttaactgcaagaacaaaacagagtttcacaataggggcgtaccactgcttgtatctgggaaggtcttatttatttcccgttaggaaacctatccttgctggagccaagtagaactactgggtctgaacaaggaggaggaggttagagagaaagaaaaggcaatggctagcaagcccaagatctacaaaatcccccaatccagcctgtatgtttatagcaaattgataatatatttctgtttcaattttacccctagacccaggttttataccatgtattttgaagaacctgattcctctggacatgcaggtggaccagtcagtgccagagtaagttgttgttttcttaaaagaaaaaaaaaaatgtaaaatcatctaaccctaacccacaaaacaagatagtattctttaacttctactgagcacaaatgtatttgatacatacacaagaagatcaaaatagttaaaggtataaaagggatgccatggttcaactgcctacttaaccataaaatagttgaaattctagaaaggacaactgccttattaactatatattgaatcatttgaaaagccctcattgaatattagatgtggcactgttgttgcatataatgaaaacatcaaggctagatactatacaagccaattcatactaatgtggtgcatttcaggctaagtcacctgcaagtccactgtggtatatccggctgtctactccccgacagttcagttataagttccttataattggatttaacatgttattgcctcaggcagagttgtttcccttctaggctcccattgtcattgaagtggactctctaatatgagtttattcattatctaggccattctgttatgattttactacacaaacatagtccttaaatattgcgtttaacaaaacaagccattctgtcttctaaactccgctaaagcctctattgtcttggacacagtggaaagatgcaaaggctgccatgaatgtggcatttccccaccccatggaaactcgttgacaattgtcctcaattggaatgcaagcatattcgctctggcagcatgcctttgcaatttctcagaaaagctttttttaaattccttcctattaggccaaaatgattcctagtatagggacttactcaagcctcaccacttttaagccttgggcctctgttgtattcctgcacagcgctagactgtatcacagaattgtatgccttttcaggttactctaagcgtgaactatctaaaatatattcaccatgccttcttttccctttctttctttctctctttctttctttctttctttctttctttctttctttctttctttctttctttccttccttccttccttccttccttccttccttccttccttgcttccttccttccttccttccttccttctttctttctttctttctttctttctttctttctttctttctttctttctttctttcttttcttctttctttctttccttttttgagatggagtcttgctctgtcacccaggctggaatgcagtggcgcaatctcagctctctgcaacctccatgtcccggattcaagcagttctcctgtctcagcctcttgagtagctgggactacaggcatgcgccaccacgctaggctaatttttgtatttttagtagagacagggtttcaccattttggccaggatggtcttgaactcctgacctcaggtgatccacctgcctcagcctcccaaagtgttgggattacaggcatgaaccactgcacccagccattcttttctattttaactgttagccgtgtttgatatgatttgtcctttgagaagggacactctatttgcattcattgcaccttaggagctgacttgagattaggtaccatgtcctttttttttttttttttttccattcagtggtctagttcaaaacccaagtacattttaagtataattttgaaaagtgctgcaaaggaaaagatcggagtcccccaagagatctatctaggcagtctcaatctagtctagagtagggtgcaaatttgggctggttaggagactctcctctgagtgacaaaaaggaaacagaatttgcaagtggtcttattgaggaaagagctgtgcacataggaggaacacataaaatgaacaaatggtctgacaaacaaatggctagatggctcagcaagtagacagcgtgatcatggtaagaataatagtagcagctcacccttatttgtgttctgctgtgccagagctgttggacaagctatgagaattatctcccaccaatgtctgcagcattgtgtaacagggaagagggctaagaggaagcccagagaaggagtcaggcaccaatcctgcagggccttgcaggtccttgcagtctagaaaaagtacaataagaagcattgaagcattgtaataaaggaggtgacaggaccagatctatgtgtatttagagatcacttttattgtgtaagaggaatgagttggaggaagcaggggaaagtggggagagacaggttagctttcccaacattccagaaaagagataacagtgatttggactaaggtagaggcaaacattgtggatggaagaagatataactgagattcttttaggagatagacttggcatgacttaatgtgagttgggtgagggggttgggggatcaagattgatttcctagtttctatcatgtgccagcaggtggtcccatttatattaataagactgctaaagcagggtaagtttggggagatgcttgttttgcaattgaggtgcctgtgatgtccaaatgaggatgtccagaagacaaataaatgtggatttaaagctcaaaggaggtgaagatctgggatatcggcagcatatagatggtgcacagaagtggagatggcctaaggagaaagcaaagagagaaaatagaagggttaggaccaactgtcacttaaaacttgagaagaagaggcaaatgaatggaagtagagattttctgactttcttaattattattgttagttttaatcgcatacctttattcagagttaatatgacttataaattgacagtaaaaaggcgattttagtttattttggcccattcactaagtggaaaacttatcactcaaacttatcaaagctactcaattgttgcccattataggaatttcttgtttctttcctttggttgggtgagagttgggaactggcatttcacattctatggagtgtgtacttcatgacagaatctgggttcaagaaatatgtaatgatttgggttgcatgatccctttcctgtgagaactcatgctctccttgagaggcagacaggtacacagatgatttcaaaactgtaaagagtccaatggcagccatatgccagggtgctggcagaggacagaagaggagggggttcttggtgtggttgggggagtgaatcagatgactatgtaaaaggaacgttatgtcatgacaacaggtggaaacagtaactctcgctggcaaaccaaagtgcaggtcacactaagactgaaggccaggaaagcatcttggagttgatgatggattgagctgtagatagagagtggcttgtgttcaagtcctgctctgtcccttattaactgaaggactgtgaacatgtcacttaacttctttaaacctcaagtttcctgacctttacaactgactgttctggtagcactttccatgaatatttgctgtgaggatttcaagagataatgcactaaagaccttaactctatcaggcttgtaaaattccttctcaaaaaaagaaaaagaagaggcaatcattgttataatagtactctgagagataagacatttctttccccaatccattgctattatgctttcttattcactggaaaaaaaaaaacacagaaaatttacatcagtgaaatttacttaaactttatattagttccatgattatattcataaagtgtagaaaattaaaaaacacaaaggcagtgagtataaacaataaaataaaaatgaactccaattctactatttagagacaaccactgtcaatagtactttgatatatttccttatagttttctgtgtatgcatgtttactaagaaatgctaaatatatttcaaaacaaaatcaggattatgcaatatgtatacagtttggttttcatttttattgcttaacattgttttgtgactattttcctatgccattgttttttgtgggggatggggagagggagttttactctttcacccagactggagtgaagtggtgcaatcttggctcactgcccccctggggttcaagtgattctcctgcctcagcttccctagtagctgggattataggtgcctgccagcacgcccaactaatttttgcatttttagtagagatggggtttcaccattttggccaggcttgtctcaaactcctgacttcaggtgatccacctgcctcagcctcccaaagtgttaggattacaggcatgagccaccacaccctgccccactgttctttaaaagtatcttttcatggatatagagtaagtcttcttaagaatgtgtcatcatttacttttccttgtggccaagcgtgtcagctcacacctgtaattccaacactttgagaggctgaggcaggaggatcacttgagcccaggagtttgagaacagcctgggaaacttaatgagatcgaatctctacaaaaaattaaagaattagccaggcatgatggtgtccacctgtggtgctagctactcaggaggctgagacaggaggattgctttagtccataagatcaaagctgcagtgagctgtgattgtgtcactgtactctagcctgggcaacagagtaagaccctgtccctaaaaataaataaataaataaattatttttccttgcatttaaattataaatcagtaatgtgatgactgtgtttgtatgcaagtctccatttgtactccaagtgttgacttaggacaaatgcccagaagtagaatcgttgagttgcagatgctctttttaactccctggaaacctattgtcacatgaccctctggaatgtatgtgacccttaggctgtcttagaagtatctgtccactcttctttctaactgagagcatcgctatgaaaatttttacagttgaatagtgttagttgacattcaacatggtttcatgtatttattggccagcagtctatcttcctttgtaggaagtatgatttagatttttgtttatagaaatttagggaattggtatttgatgaatatggtagcatgggtgctagtgctgggctctgaggttctgtttcaaaaccagcaatttcagagatggagatgtgtttaatttttacttcattagataacggtttggctaattaagacaactcattacgacaatcttaactccaaattatttttcaggtaattaaagccttacaggtagtagatcatgcttttgggatgttgatggaaggcctgaagcagcggaatttgcacaactgtgtcaatatcatccttctggctgaccatggtatgcttttaaaaaacattcttattttatcattgactataatttatcacttcagaaatcatacacaaataatagtgatattttaaaatctctacttccagacctaaagtctcttgaagaagcaaggaatgaattgtggtagaatgtgatgaaaagaggactacattaaattttctagtttaattattctgatacccctgaaaacctacccacagacactatgttttgtaaaagtagagttaatgatatttaacagggatgtggttgggtttttattcaatctaaaaagtgctttgggaccttctttccagccatgattcgtttatgtagattggctgcagtttactgtaattggcaagttttgccacaccgtgtgtatttttttttagttatgtaaatagatgtgtgtttattcatagcttttcatctttaaagttactgtcacctcacatttctctacttgaggttaactcttgattttggttaacctgaatgttaaaggaagtgaaacagtggagacaccctctgccacctcacgcaaaatgcattcaaacagttttgaagtacatatgcactcactctacaggtttttttttttttttttttgagatagagtctcgctctgtcacccaggctggaatgcagtggcccgatcttggctcactgcaagctctgcctcccgagttcatgccattctcctgcctcaacctcttgagtagctggggttacaggcgcccaccaccacgcctggctaatttttttgtatttttagtagcgatggggtttcaccgtgttagcccggttagtctcaatctcctgactttgtgatccgcccacctcggcctcccaaagtgctgggattacaggagtgcgccaccgggcctgtcctctacagatatttttttaagtgcctactcaatgataggtactttcctagatatggagtagatccttcctagctagggtggtcaaactgtcttcttgaggaggacgtttaaagtcaagccccaatatctgtgaagagaccagccatggggcatgaggaagaaaaatagtgtgtctgcagaacttttggtcgtattttagagcatccagataatgggaaacatagtaatgtatttttaaaatttctaaggtagttctctaacactttgccttattgttttaaaattaaatggaaacttttgatgtacattttgttaaaagaaattaatgaaaataataatttatatgcaagccaggcaccatggctcaggcctgtaatccccgcactttaggaggctgaggtgggtggatcacctgaggtcaggagttcgagaccagcctggccaatatggtgaaaccccatctctactaaaactacaaaattagccaggtgtggtggcacatgcctgtagccccagctacttgggaggctgagacaggagaatcacttgaacccgggaagtggaggctgcagtgcagtgaagcgagatcacaccactgcactatagcctgggcaacagagcaagactctgtctcaaaaaaaaaaaaaattcatgtgcagtctgaaaaatcttcaaataaaaaaggttaactaccaaatctttttatagcacgtactccttatataaatttaaattactttatactttttttttgagacagaattttgttctgtcacttaggcaggagtgcagtggcacaatctcggctcactgcaactgccaccttcgaggttcaaatgattctcgtgccttagcctctcgagtaaatgggactataggggcatgccaccatgcctggctaacgtttgtattttttggtagggatggggtttatcatgttggctaggctggtcttgaactcctggcctcaagtgagttcccccctcagcctcccaaagtgttaggattacaggtgtgagccacggagcacagccgaaataatatacttttaaaggtaaaggttatttccattaatctattatacattgaacaaatgatctgtttatgatacccatctgttcttccctcaaacatgacccttctccactgccacaattttctgccagagtagagtaatagggtgaattgcgtaaattctcagtgaagcttagtttgagatctgtaacataaaatgtcttctatttgacaagacagaaatcaaccgttgccatttatatacattcagtgggttattatgattatttttttattcaggaatggaccagacttattgtaacaagatggaatacatgactgattattttcccagaataaacttcttctacatgtacgaagggcctgccccccgcatccgagctcataatatacctcatgacttttttagttgtaagtatgaagacacctatatgaaaaaaagggtaaacctgaaagtgaataaccatagtccactaattctgagaggaagttggggttatcagaccctctactgacttcttgagaagaccacagagaaacaagtgggaaattcccatgcttaagtacagtctataaagtctatggtaatatctaatattgttaggttgaaatatatcctactcagttctaaatgctaaaataattctttgcttgaaataatttttaatataattttaccagatcacagttattaataagtgaatgtatcaaattcacctgagtggttcacattctttgcatttgttcgttatcaattgtaatgtcatttatttctttttcttttgaaacagttaattctgaggaaattgttagaaacctcagtgtaagtatacaatactcttaatacatatatttaagttaatgcaatgaccttaatctgggtttttgagaaattcatattgtatatttctaaatctaagctacttggaatttatttctaaaccttccatcaacattattttatatgcatattagttgcttttatcttagttgttttcattttggagctgacacatccacagaaattagcttgcagtaatagtagcactaaatactggcttatattgaaagggctgatgtcccattcaaaagggttgcattagtgagcttcaggtagcatcgtctttctcattttttgtgtgactaatataagaggatagtgaattatacctcttacagatcttttttttacaagtcaaaaagataatctctttactcactaagtataattgcaactgctttcgattggttcccacatcccaaattgtaagtaaatgagtagagaaacttccagatatcttaaagcaatatttttggaagtacaattcactactcctggagagacctggaatggtcttctgtaatagttttgttatttatttatttatatttattttacctttacaatgtttgcctttattaactttttttaaaaaattcaactttcatgttagatacagagggtacatgtgcagatttgttacatgggaatattgtgtgagtctgaggtttggaatatggaacctatcatcctggtagtaagcattgtacccaataagtagttttttaacccatacacctcctcttccctctagtagtccacagtgtctattgttcccatacttatgttcacgtgtgttcaatgtttagctcccacttataagtgacaacatgcagtatttggttttctgttcctgcattaatttgcttaggattatggcctccagctccattcatggtgctgcaaaggacatgatttcattctttttttatggctgcatagtattctatgatgtatatgtaccacattttctttatccaatataccattgttgagcacctgggttgattccatgtctttgctattgtgaataatgcagcaatacacatatgagtttatgtgtctttttggtagaatgttttattttggtggaggggtatatccccagtaatgggattgctgggtagaatggtatctctgttttaagttctttgagaaatctctagactgctttccacagtggctggactaatttatacttccatcaacagtatataagtgttcctttctctgcagcctcaccatagcgtctattgttttttgactttttagcggtggccattctgactagtgtgagatggtatctcattgtggttttgatttgctgacaaaaacaagcaattgggaaataacataataaacggtgctgggataactagccagccacatgaacattgaagctggacccctaccttttgccatatataaaaattaactcaaaatggattaaagatttaaatataagacctcaaactataaaaatcctggaaggcaacctaggaaatactcttcttgacatgggtcttggcaaataatttttggctaagtccccaaaagcaattacaacaaaacaaaaaataggtgagacctaattaaactaagagcttctgtatagccaaagaaactatcaacagagcaaacagcctacagaatgggaggagatattcacaaactacaacaaaggcctaatatccagaatctatagggaatttaaacaaatcaacaagcaaaaaacaaataaccccattaaaaagtgagcaaaacaaatgaacagacacttctcaaaagaagacatacaagtagccagcaaacatgttaaaaaatactcagcttcactaattctcagaaaaatgtaaaccaaaaccacaatggaatagtttttatagttatatatttaaaatatattcacaaatatttatctactacatgaaattcatgacttcactattgtttgcaatgcgactgtaactatttgagtatgggggtatacagttacaggcttaccttgcttcactgcattgtgctttctagatgttgcatttttttaccaattgaaggttttgtggcagctctgcactgagcatgtctatccagtgctattttttcaacagcatgtgcccgcttcatgtgtctgtgtcaccttttgttaattctcacagtacttcaaatttttcattattattatatgtgctctggtgatatgtgatcagttacctttgatgttactattgtaattgttttggggcaccatgaatcctactcatagaagatggcaaacttaacagataaatattacatgcgtgctgattgctccacaaactggctgtttcccgtccccctcctcgcttctggactcttctattccctgaggcataacaatattgaaattaggccaattagtaatgctacaatggcttctaaatgttaaagtaaaaggaatagtgacacatttctcattttaaagcaaaagctagaaatgattaagcttaatgaggaaggcatgttgaaagttaagatgggccaaaagctaggcctgttgcatcaaacagttagccaaattgtcataacaaaagaaaagttcttgaagaaaatgagaagtgctattctagtgaatacatacataataagaaagtgaaacagcctcattgctgacatggagaaagttttagtggctggatagaaaatcaactagccacaacagtcttttaagccaaaacctaattcagagcaagacgctaactctttcttcaactttatgaaggctgagatgggtgaggaagttgcagaagaaaagtttaaagctagcaggggtttgttagtgagatataaagaaagaagtcttctggccaggtgcggtggctgacgcctataatcctagcactttgggaggccgaggcaggtggatcatttgaggtcaggagatcgaaaccagcctggccaacatggtgaaacccgtctctactaaaaatccaaaaaaaaaaaaaaaaaaaaatagccaggcgtggttttgggcacctgttattccagctacttgggaggctgaggcaggaaaattgcttgaacccggaaggcggaggttgcagtgagctgagatcacgccactgcactccaacctgggcaacagagtgagactctatttaaaagagagagagagaaaaaaagaagaagccttctccataacagaaaagtgcaaggtgaagcagcaagtatttgtggtgacatagaagctgcagcaagttatccagaagatctagctaagatcattgatgaaaatggccacactaagcaacatattttcaatgtagaggaaacagccttccattggaagaagatgccatctaggactttcatagctagagaagagaagtcaatgcttgacttcaaaacttcaaaggacaggctgactctttttttaggggctaatgcagctggtgacttgaaattgagccaatgttcattctgaaaatcctagggcccttacgaattatgctcaatctactctacctgtgctctgtaaatggaacaacaaagcctgatgacagcttatctgtttatagcatccgtttcctgaatattttaaactcactgttgagactttctgctcagaaaaaaaggttcctttctaaagattgctgtttattgagaaagtaccaggtcacccaagagttctgatgaagatgtacaaggagatggatattttcatgtctgctaacacatctattctgcaggccatggatcaaggagcaattttaactttcaagtcttattctttaagaaatacatttcataagactattgtcataaataaggattcctctgattgatctgagcaaagtattataaagtgaaaaccttctggaaatgattcaccattctagataccattaaaaacatttgtgatttgtgggaggtcaaaatatcatcattaataggagtttggaagaagttgattccaaccctcctggataactttgaagggttcatgacttcagcagaggaagtaactacagtcgtggtaaaaatagaaagagaactagaatcagaaatggagcctgaagctgtgactgagttgctgcaatctcatgagaaaactggaacagatgaagagctgcttcttacggatgagtaaagaaagcggtttcttgagatggaatctaaccctgtgaagatgccataaacattgttgaaaagacaacaaaggatttaaattattccataaacttagtggctaaagcagcagctttgagaggacttgagaggattgactctaattttgaaagaagttctactgtgggtaaaatgttataaaacagtttcggatgctacagagaaatactttgtgaaaggcagggtccactgatgcagccaccttcatttctgtctcattttaagaaattaccacagccaccccagccttcagcaaccaccattttgatcagtcagcagccatcaacattgaagcaaggccctctacgatcaaaaaagatgacaactcactgaacgctcagaggatcattggcattttaagcaattaagtaatttaaaattcaggtatgtagtttttagacatagtgctgttgcacacttaaaagattacagtatagtgtaaacatatttatgtgcactgggaaaccaattcatatgacttgctttattgtggtggtctggaagtgagttcaaaatatctccaaggtatgcctgtggagtaaaatctctgaggatggagtgcaaaggactgacgataaacgctgagcaaagagtggttaatataatctgggacccactgcaagtttcaagtagaatgcccattagagcagaatttctttacagtgatgatcactctgtttttctctcaacaccttctagtatgccgatcttgagtaaaaactgtggacattcttgcccaccccttctggtgaagtgtatacttgcaatgtgttcatgctgagtggatgcatagttcagcattttcaacatgtggactctctaaatccatatatggttttctttttgttttgtcacctcatgatccctatagctgaagctctgttggtgaagaagggcaaatctctaataatcccagttgtgcaaggggattgagtatcacagtctttggaaatccattgcatggcatcacagatatggactggacctagagttacaaaggcccaaagaaatgggctaccatttcacatagtccatccttcccaaggaaatatttcatgtggtagtattcccagcagtgctgttccctgggcctatattgagcttattctggacagaattaaccaagcatgaagtggcaactttttaagttctgcagcactctgactacatgagagacatcactactatttattctgagataaaatgtcaaaaacggccgggcgcggtggctcattcctgtaatcccagcactttgggaggccgaggcgggcggatcacttgaggtcaggagttcgagactagcctgaccaacatggtgaaatatcttctctactaaaaatacaaaaattagccgggcatggtggtggatgcctgtaatcccagctactctggagactgaggcaggagaattgcttgaacccaggaagcagaggttgcagtgagctgagatcataccgctgcactccagcctgagtgatagagcaagactcagtctcaaaaaaaaaaaaagaaagagaaaaaaaaaagtcaaaaattgtatctcaactctgtagacttcattccaaattctcaaatgcaaagaatcaccggtacttcttcacaggtaggtagtgagcctccggttttctctggatttactctggctacacaaagtccaggaaagtgtgacaattacacacagggacaaattatagttagtcccttgcatcttgggggaagctgcatactcagcagctgccaggttgtgcctgcctggaagttacaaaaatattggcttaagaaagaagtaatgataaataaaacagtagaagcataagaagcctagaaaatataccaaaataggcaagaaaaaactggcaaaaatatgtttgcaatatatacttttgtttttcttctttcattctataaactctccttgctctcccattgtctatattttgtttaaattttgtttgtgtaaattatgtgcttcatagtttctcttatttttcttatctaaattgaccctgagataatagtgacacacacttgttaatatatatgatatattgtggtttaaaataaatgagaaaatgaggaaataggaaaaatttcgtttcctttgtttatggtttttcttcttgtttctcaaaatggtcatgagggaaagttcctttgtagttctatttctcattacctcatttttcttttacataaatagataccaatgtgatttgcatttctacaattttaaaatatgccatacagtcataattgttaaagaaacaaaattttactccaatttgtaaggaaaccatgattgttttacaaatagggagactataataggtttcaaaagccattgacttgatcggaaaactaagcaaatgtaggttatttaaaagataaattgagtctgttggaaagtacttttttgtgcaattaaactactttttaatttttttactcatatctactaatatggtatatatatttatatgtaatttagactcaaaagttgtcattatcactctaaatctagatgtctgtccattttctgttaaaaaagagggtaattcatagtggtttaatatatatataatatatggttatatatattacatataatatataaccatatatagtatatattatatggctatattatatatgatatatgatatatggttatatatgatatatggttatatatgatataatatgtagttatatatgatatatgatatatgatatgatatgtatatatgatatgatatatatgatatgtgatatatatgatatatagttatatattatacactatatatgatatatagttatatattatacactatatatgatatatagttatatattatacactatatatgatatatagttatatattatacaactatatatgatacagttatatataatatatatggttatatatgatatatagttatatataatatatatgtttatatattatatattatatatggttatatattatatattatatattatatatatggttatatacacacacacacacacacccccaggaataaaaactgaaaacattaactcataatttaaatcagattttttatttttttgagagagtctcactctatggcccaggctggagtgcaatggggtgatcttggctcactgcaacctccacctcctgggttaaatcagatttttaattgcaacctgattatcattgcaacggcaaaactaataactagggggatctgactacattgataataggtttaatattcctattgtattagccaagctgaaatccccttacttttaaaaggtgcttcataaattgatgtagaagatgaacttttaaaattaatttgcatatcttatgtatcataaagaaatatttacttgcttttcagtgccgaaaacctgatcagcatttcaagccctatttgactcctgatttgccaaagcgactgcactatgccaagaacgtcagaatcgacaaagttcatctctttgtggatcaacagtggctggctgttaggttcgtgtatctgtttacttatctcataatgcctttaataaccatttgtcattataagtctacttaaccttaccctgctattatcatcactgtgaattttcctgagcattgacattttctggcctttttgtatgctatttagcagttctgcatttgaagtgatcgttattagattgctgattttagcatccttatcttaacaatatagatgagaatgaggagtaaggctaagagtgtgcccagggactgtaagtgccagcaccttcctacccccactatgctgtccattaaggcagcagacagatgatatcagctgtctttcagcctgataatgagtgattgattacacaactctttaagacctttgtcatctttgtggtttttataaaagagcacatatagggctgtaagaccaagctaatgaattagttgtaacatttatttcttattactatttataatggtaatttatgttgattattgaaacatttgcaaaatttaaatgtgcttagagaaaacagaaaccacttttgactttgtgcatgctatttagcagttctacatttcaagtgattgttattagacattatgactcactccatcttaaataaccaattaatccattgattcaacgttttattttatgcttgccatgtatgcaccaggccctgttctaggcatttgagatacagatctgtctcctgctctcatgtactgtagtggagaaaactgaaaataagccagtaaacaaataaatatacactttgtgatagctgataattcctatttttgtatttcataccagcacttttttccttatgcataagtagatgtaaaaagtatctggactttatggcatttttctagcctatttaatatgtatgaatgtaatgccagggggatagaatgacaatggcaatacagtggctaagagatatgtttgacaaagaaaaaggagatgacactttgggaggccaatgcgggcaggtcacttgaggccaggagttcgagaccagcctggccaacgtgaagaaaaatacaaaaaattaataaaaatacaaaaattagccaggcatggtagcacctgtaatccaagctactggagaggctgaggcaggagaattgcttgaacccgggaggcggaggttgcagtgagccaagatcgcaccactgcactccagcctaggcgacagatcaaattagtatttgattccatcaaaaaaaaaaaaaaaggaaagaaaggaaaagaaaggaaaaggagatgaaagaacacaagggacaagggacaagggaattaggctccaacattcaggatcaggaactggggatttggctaagcctattctgtaagataacctggaaacccctgttgggcctgagagtgcagtttcacactggttcactagatggtgctgacccctctctttgggatcgaagtttattagccctttgtgtagatgggtggctgtactgtggctcaggacattctctagaaagtattttccttaaatatgtgaacaaaattaagctctactaatattaagtacatacaactgttagtaatttaggtatgtaatatataaataaatatatgtccaagttggggtacattctccagatatttactgttaaaagtctaacaccaaacaagttaggtcactggtacagaaggagaaagagctgtaaagtgagagctcgcccacccaaatacctctgggtatcatgtattaatactcaatctcaaatggtgagctgtttattcttttaaaaaccagcactgaaatgttaaaagaactgcaacccaagagttcatggccaggctccccacatagctaggttgtgggaacttggaaaaattaatatcttagagtctaatttttctcatctgtaacacaagattagcctagttttattattttcttgccattaacatacaaagtaaactaacttacatcaaaggaaattttgaatacagccttaacaagagagcaagtgaagaatctaatctgggccaggcacggtggctcacgcctgtaatcccagctctttgggaggctgaggcgggcagatcacaaggttaggagtttgagatcagcctggccaacatggtgaaaccccatctctactaaaaaaatacaaaaattggccaggcatggtggcgtgtacctgtaatcccagctactcgggaggctgaggcaagataattgcttgaacctgggaggcggaggttgcagtgagccaagatcgcaccactgcactccagcctgggcaacagagcaagactctgtctcaaaaaaaaaagagaatctaatctgattaaatcctgggttcactctctccaactcttaaaacacaagcctccagctacttattttctagtgaaagtacatcatttttagtaataatgtgcatcatttgataattaggttaggtcccctttgtacaattaaagcaaatttcaacagtttgtataatccattttcatcatcatcatctttattttacctaaaatgtgttagatcttactaatttggggaaacctgatgttttgatatagtagaagtattaagtgcttttttaaaagaacatgaatgttagcttttaattttggatcagcaactgacaaataaatttcaggcacctttttaagaactagagataaccaacaaagtacctgaccaaaggatctttgcccaggtaggaagataacagctataatcagatgggataactattgcactagaaccacgtacaaggctcaaggaagcaaaaattacagacccaggtgtgaatgtcaaggagcatcagagaatgcttcctggtaggggtggttgctgatcggggtttggaagacttatgatgggataggatacgtgttgccatacagcaggtctgccctgtgcagtctgtcggttgtacagtggcatcctgccaacaaggtgagtgggagtggaaatggaatctttgctcagctcaccaagccttaacaggggctgcattggcaggaggaaggggattcgttttttgtggttgttgttgttgttgtttttgccaaaagtgccatctgcttgccaagccttgaacactgccaggccgcgtccttcaaaggcacctttttttctctcaatgatctacccagagcaccttttttttttttttttttgaaatggagtctcgctctgtcgcccaggctggagtgcagtggcgcgatctcggctcattgcaagctccgcctcccaggttcatgccattctcctgcctcagcctcctgagtagctgggactacaggcacccaccaccacacccagctaattttttgtatttctagtagagacgaggtttcaccatgttagccaggatggtctcaatctcctgacctcatgatccgccctccttggtctcccagtgccgggattacaggcgtgagccaccgtgccggcctgagcacctttttaaagccagcagtagctctagggcaaggaagggtaaagagaaggaggcaggtttccagatggaagaactagattcctgcagttgcaagtagttctgcattgctggagcactgagtgtatgaagccatcatgtgtacaaaggaccttgtctgaaatgactaaggagtgtgactttgatcttgaagaaagtaggctgttggtagatacaggtggcttgaggtgaatatagggatatttgcttttggagaggtccttcaagatgctacatggacgaggatggtctagcgcagtggtccccaacccttttggcaccagggaccggtttcatagaagacagtttttccagggtgggggcgggaagggggggtggtttcagaatgattcaagcgcatgacgtttattgtgcactttatttcagttattattacactgtaatagataatgaaataattatacaactcgttatactgtagaatcagtgggagccctgagcttgttttcctgcaactagatggtcctatctgggggcgatgggagacagtgattggtcatcaggcgttagattttcgtaaggagcatacaacttatattccttgcatgggcagttcacaataggattcaccctcctatgagaatctaatgccactgctgatctgacaggaggcggagctcaggtggtaatgcttactgacccaccactcacctcctgttgtgtggcctggttcctaacaggccacagacaggtgtgggtccatggcccaggggttggggacccctagtctagtgtgaaacagggaagcctgttagaaaggtatgtagtgacccattcagccccaagggagcccatgaagccatggggatggtgaaactatatagtgcatcaccgggaaggtattatggttaacttagaagccacagtttctaggatagtcttgcttttatcatattctgtctgatgtttgttctcattagaacatagatttttatttccagcagtgttaaataagattaggggtatgtgtgtgggtgtgtgtgtgtgcgtgtgtatgtgttttgaagggaagattcagaagttctgaaggcaggatgatcaatttgggaaattgttcaaggggcttattagaacctacctgaagggaacgtttttctaggacacaaaacaccggtgcaaatccactgttgaaaatgttctccaatgtctattgtgaaatggagagattttgagttcagctcctttcgggaggggaggaaagaatcctctccaaggcagcttcctctagcagtttcctgcctcttgtgggatgagaagatttgctgtctaagatattatcatatttatttgtattttgctgagttcttttactggatgtaaggcagtccaaatgttatttggaaatctcctatcaatcaatcatgcaatttagatagaagttagttccatacagtgtgatctctgacttgctaaggtttagaataaactcaaagggcaatgtggcacagttattaaggtttgagagtatgcccatctgtgctctgactctacacatccactgcgagaagaaacatccatataacaccaaaaacactatatgaaaatcttgttgcacagtaggccacccatcaatattacagcttttctttttcttttgatgttccaggtgacctgcaggaaatgtagaaatcaggaaactgacatacaaaagaaaaagttagtagcaaatggaaacaactttataaaaatataatatggtatatagtataaaaattatactacagtatactttttactttataaaaagtataccataaaatagttttaaaactatttttatactatataaatagtataagcagtataaaataggctgggcaggatggctcatgcctgtaatcctagcactttgggaggccgaggcaggtgaatcaactgaggtcaggagtttgagaccagcctggccaacacggtgaaaccctgtctctactaaaaatacaaaccctgtctctactgaaaattagctatgcgtggtggcacatgcctgtagtcccagctacttaggaggctgaggcaggagaattgtttcaacccaggaggcagaggttgcggtgagccgagattgcaccactgcactccagcctgggctatagagcaagactgtctcaaaaaaaaaaaaaaaaaaaaaggataaaatagttttaggacatagttttatatctaacatgatatgacactgagttattgtgtaaaaagttattttaaaatataaaagtaaattctttgaactaagacaatgagaaattaaatataaatgtttaagaccaaacttaaacctagaaaaaacatcatctcaaaatgacatgtttcccatggcataagaagctgctacaacttttaagtgtgtaggtggtggattttgaaatctttctagatttttctttcttgagaaatctgggtttatcttgaaaaccctgaattagaaaaattagattgatttcattcagcggcaaacacaggaagatgtatactgaatcatatttcttaaaaatctcaaatttagaagattgtgaggttgaatgaggtcatctcctgaagcttctatagcaggaatgccgatccatgatgaaggacaggattgcatttattttctttagatgatctaccattgaacagtagagacagggtccctcacggtctgtatccaaacagaacccggatttttacagactgatcgaggcataatgctcagaactacatctctttagaggctcactttgcaaggaaaaaagaaatcattctgccctagaagggggctgtaggaagtattcacaatgagtcaattaatatcaagatctcctgttccaggaaactgttactaagtattacaaaggaaattttatgtgctcacataagtttagaaaacactggcttaaagctggtatagaattattctttcctagagaaatatttacagcattcactatgctaatatgaattgtgatccctagacagaggcatctgatgtgaagtaagtctcaaacttatttgactatagaacttatttttaaagtcctctgaagggaccagtgttttgaggaaaacattatgggaggtatgggactggatcaaaagctaatgaggatattgtaaggggtattgtcctggtgtggagtggctgcagcacaacttgaagagatcaatttctagaatttcatcccacatctgctgaaatcagtcatttaaaggtagggcaggagatagctccattttaaataaatgtctcagataattctcatgtccattgagggcagaggtcccaccagtgcagagatgggttaagaaccgctcaatgatgtaacttcctaggtcactgtcagtcacaatgccataatccttttcataaagccctttctactcccagcactctcttcaaagtattcttcacttctgagttcctaagactacagataaggggattgagcatgggattaaagaggctgtgaaacagcaggagatatttcttctgctccttggggttcccatatctgggtccaacatacatgataatggctgtgccataaacgagtccaatcacacagaggtgggagaagcaggtgcggaaggctttcctctgaacttcccttgattggatctgaaggatagcacagaggatgcacatatatgaaactacaattgtggacaagggtcccaccagcccagaaattgctccggccaagaccatgttctcattgatgtgggtatctgcacaggcaagtttgagaacagccaagatttcacaaaaaaagtgataaattttctggggcctacagaagggtaaaggtagaagtaacacaagatgaatcaaggataaaaggactccagtggtccaggaagtcaccgcgagggtgatgcagactctccaggtcatgatggccaaatatcggagggggtggcagatggccacgtacagatcataggacatcaccaccaggaggagacattctgtgacagcaaaagtggaaaacagaaaggtctgcatcatgcggcccgcaaaggagatgggcttggctggatgcaggaggttcaccagcatccggggcaccgtgttgcaggcgtaggcgatgtcgacgaccgccaggtgtgagaggaagaagtacatgggggcgtgcagtctggagtccagtgagatgagccccagtatggtcccgttccccagcagggtgaagacgtagaacagggagaagagcccaaagaggagcatctgaatccttgggccaacgggaaatcccagtaggaggaactctctgatggatgttatattgtctcccatatccctatgacagaggaaatcaagttaatgctcatggtttaggagaagtgtttaaaaacagattcattttaacttgttcggcactctttggtgaagtagaaaagtgttcagacagctgcagtgagtttttgtgtttttaaatgaatgcttcaagacaatttggtaacgctaaaataaatgtttaaaaaatatatgcaggccgggtgcggtagctcacgcctgtaatcccagcactttgggaggccgaggcgggcggattgcctgagctcaggagttcgagaccagcattgacaacacggtgaaaccccatttctactaaaaatacaaaaaattagcccggcgtggcggcgtgtacctgtagtcccagctactcgggaggctgaggcaggagaattgcttgatcccaggaggcggagcttgcagtgagccgagatcgcaacactgcactccagcctgggtgacagagccagactctgtctccagaaaaaaaaaaaaaagaaaagaaaaaaaaaacgcgtgcacacgtatacataggtttcttttttattacgttaattttttaataaaggctaaaatttaaaaataaacatgtcacatattaatatatccttttggtctttttttaaaaaaaatttggctcaggcctttcagggatgaatgtcacatgtcaatgtagtacacagtttttgtttgattcagtgagctatctcatatccttcaaataaattcttcttttccttggtcgtattattcagagtttttctctgttatgtttcagaaacaatgaacactaactgatacacatgtcaaagtcttaaaaccacattaagtttaatcttaaagtggaaggtttaattaagggcgggctatactaaggttcgacataccatcagccaaatacaccagtggtcattcacctcttaaactttccactcttgcactgatcatcacctccacagcatatatctcacaaaatcttttcttatccaagtgtaaagacttattttttagcccagaacattattttttgttatttactttcccacaatgtttagatgagcatttatgtgaatgactgaatagatttgcactgtgtcattatctaaacacgaaaacaggatcagtaacttttgttggatttgggcttactattgataaacactctagaatacacagttttaagcattgtctatgcaggtgattggcaatagttcgatgaatttatgaggaatgctgcagaaagagtctctgaattctctgattgaactcaggcctccttgatcccacaattaaaatgttagcataagcatgatattgtcatttttgcttaaattttattctcattttttatgtaaaattatattgtcttggagataggaaggatgagcaataatcctccatttaaatgtccataaaattataaatttaatcctgcaaaaccgactaaaaagtatttcatttgcattggatttttcctaccaccattccaaggataagtattatgctcatgttgaaaaaataaaataatttagttatttattgatttcttgtcatttatttcatgttgtcctgagattggatctaaactttgagctcctaatcattgctcagattgtgtggcctcgtaagattgtgcgtaataagtaaacaagcatctgtacacttgttaacttaatgagcttctgtatgtgacactttaagcctttttaaaaattaagtgctgggctatgcttggtgtctcatgcctgtaatctaagcactttgggaggctgaggaaggaggttcgctggaacccaggcatttgaaaccagcctgggcagcatagagacctcatctctttaaaaaaatttttaaaatagtaattatatgaaaaaaaaattttaaagaaaaaaagtgctggtcttttttgttaacgttgaacatttaccagagtcagttgcacacagatatttcttgaacttaaaaaaagctaccagccaaaataaccattaacatattgattgctttaatatattaatatactgatagataatatgctgatatctattaatatattttagtcatattatcctattatctaaaactattggtgagcaaaatttgagcattaagagagtagaaatgtacttttgcatgatattaaagtgtgacggtaaaagcaaacaagcaatgaaaatgaccttaaattatatttgagcagaactcacaaaggcagttaggaaatccaggtgtctagagatgactgctgtgtaagaacctagataatcttcatatagaaaaggcaaacatttctacagtgtggctgagtttactgatggtgctgggaactctgctgcccatctgagaactgccaaggaaggatcttgcttcttcaagtgcttttgagaagggaaggtgttattaagtcatcacctccacagagtaccttccaattatcatgagagctttgtgtgacgcatgagaaaataggcttcacttgcaccagcatgatttccatagagacatgaagaacccaaccactgttattcttctaggggcagagaactgagcttctgtctcattctgtctctgaggaagccacagtgataaagagaatgagactaaggcaagaacagaaaatgcctttgtaactgaaaggatacatatattatctaaagtaatatcctgggaccacgtggctatcacagctaccaaaatatgtgaatttgttagagtttcatgaatatttatgctattccttccccaaacattcagaaaacacttgggagatgcaaagatccatgtctaggtttgtttggcggttaaaataaaaccttgacattaattcctgcagtcatttcttttagtgtagtctgctttcccaaatacccaaaagctgttgggagaataaacttgaattccaaggtcttaatcattaggtcattttacatagaaactcagacactttatttttaagcaccaatctgtagatgttggagattcattttaaataatctgtggggctcattgacctgtctagaagaagaatggataaggcataaggattgagcaaaatttacttttgaaaattttcttttttttttttgataatatctggtcctgcccttatgggaaggataaagctctgtaaaagcacagggccagctcctgttttctgaaccctttctatggatggggatgaatctatgtattctacttatcagagtaggtttaccctcatggattatatttgaggtcccacatctgagtggttgacatattgtgccaatatacctagccaaagtgcccttgcattaggcctggcttgtttactaaggtatcagctggttggaaggacctaggagactgtatgtataagctgagagagaggcatcagtgatatagggatctgggccaactgttcattcagcctacttttgtcttttgcattttctcttgccctaaaacatattgcatccattataggatagatggttgcagtgaccattcagtcttatgacttggtagatctaatagcacttcagctcaagttggacaactccggatttatacttacttggcatgcctttctcacttagcttaataatttctagcttttaatttaatgacgttcacttgaacatttagaggacattatagggtggttaattggcttagcttcaacattgttgtgtctcagggactagggaggccagaagaggaagagagagagggaaatggcctgtcggtggagcagtcagaacacacacaacatttatcaattaagtttgctgtcttatgtggacgtgcttatgctgccctaaaataattacaatagtaacatcaaagatcacctatcacagatcatcatagcagacaataataataaacccatttaaaatactgtacagattattaaaatttgacctaggacacaaaatgagatcatgctgttggaaaaatggtgcagatagacttgcttgaggcaggttagccacaaaattttaacacaatggaaatgcaatatctatgaagcacaataaattgcagaacgataaaatgagttatgtctgtatatagaaatagaattaatttgattgtgtttatcttaaattctgtgaccttaatggactcacttcttaatttaaggaggtttgtaaaatagatttatttggatttctatgtagaaagtcatgtctgttgtaagtagggactgttctattttttccattctgatctgtatgtcctttaattattttcttgtcttattgcagtgtataacttctagcactgttttgcataagggtgataaaagcagacatagttcctttattcttgattttagagaggaaccattcagtttttcaccactaaatatgatgttagtatagctatgtcctacataacactttggtcggtgatggactgcatatatgagagtggtcccacaagattataatgggggtgaaaaaatcatattgccaactgatgtcatagccgtaataatattgtagcacaatgcattacttacatgtttgtgggattgctgctgtaaacaatcctactgcactcccagcatggttaaaagcaaacaactatgtattttgctatgcatttactacactctactaaactttttgtcattattttattttattttattttggaggtggagtcttgttctgttgcccaggctggagtgcagtggtgcaatctcagttcactgaaacctctgcctcctgggttgaagtgattcttgtgtctcagcatcccaagtagctgagattataggtgtgcaacatcatgcttggctaattttttatattcttggtagagatggggtttcaccatgttggtcagcgttttcttgaactcctgactgcagatgatctgcctacctcagcatcccaaagtactgagattacaggtgtgagccactgtgcctggcctttgtcattattttagagtgcactccttttacttattaaaaaaagttaactgctaaacagtctcaggcaagtccatcaagaggtattccagaagaaggcattgctatcataggagacgacagcctcatgcatgctcttacccgtgaagtcctttctggatgttcacacaatgtcagaatcacttgaccgcacatttctcagaacgtatccgcatcattaaacaacacgtgattgtataatgttagctttttgtagatgctttttatcaagtggatgaagtttcctctattcctgctttatagagagcttttatcatgaatggatatcgaaatgtgttaaatgtttattatgcatcaactgatataatctaactttccttcttttgtttgttaacatggtggattattttgattgactttttgagatttaatcaggtttgtttttctggaaacaatcccccgctggacatgggtaaattttgaaaaatatactatagaactctatttatcaagtaagttatacatatctttatatatatatatgtatatatgtgtgtgtgtgtgacacacacacactctctctctctctcctggttttggtatcactgtaataatagcttcaaaaaataaattgggaaatgctctctcttttactgttttctggaaaagattgtgtagaattggtgttaactttttaaaaacatgttagaattctccagttaaaccatctaagcataaatatttatttattggtagttttaaaattatgaattctattttcttaatggttatagagttattcaaatgatctattcatgcctggtgagttgagttagtttgtgttgcaggaggaacactgcattttgtccattttgtctattgtctaatttatgtgtgtggagttgtttgtaatattccttgatagtcctttgttatgtgtgtttatgtctgtagtgatatcgcctgtttcattatgatatttgaaatttgttttttccttttaatttatgcttgagtttgctaaattttattaatcttttaacatagctatctctttgtttcattgatttaaccattgtttttctcttgtaaatgtaagtgttttctgttcttatcttcattaatccccaccctctacttgctttgagtttattctgctcttctttttctaggttcctgaggtggaaatctattgctcactagagacttttcctctttactaatgcgtgcatttattgctctaagtttccttctcagtactttgatatgtcacagtttcatgtttatccagttcaatgtatttttaaatttttccttgagacttctttgactgatagattattgtgaagtgtgtttttaaatttccaaatgtttagggattttcatatctttcttatgctgatttccaattggattccctacaatgatttctggttttcatctgctctggatgattactatctcttttaaatttgttgtggcgagttttagggcctaggacagctctatcttgccaggtgtttcgtcagcactcaaaaaaaatatgtgtattctgctgttactgtgtggaatattctgtaaatgccaaatagattcttttggttaatggcattttgagttgttttatattcttgttgattttcttttttttcctctttttaaaaacatgaaatgcttcacaaaattttgtgtaatctatattcaagaaccgttttaatcttgttggcatcattctgattttagaaagtgctgccaaagccaacactccttgctgattttctgtctagttctatcaattattgaaaaaggcatgaggaaatttctaactataattgtggattcatctatatctcctttcagttttctttttttaaaaaaatcaatgaaaatttattaaattaagcataaagttactttcacatttatctacaaccacagtgaatacagttcttggcatgaagacaccacaacctttagaatttaaagcctcctcacctgcaagattacatatataaaactcccactattgtttctctaagagtggattagttcaccaagttaaaagttatatgatctagaatataataaaatggaaatgatttactcataagattcatattcaaaccatctttatttacaaaatactatcctgagaactattattccattaaacttcaatttgagaaaagtgcaatcacttaagtaacagcagttacttaaactgaaaatgagatcagtcaaaattacttttgaagaaagcaacaatattgtcaggtgtcttgctgtggttctggatgtccagtagcaggctcctttgaaggcggaatcaatcctgaagggaactcgcttctaccttcagaatgtggggttggggtaaaatccaggtctcggatgaaggtaaggaggtaaacccctcggtggatagatgtttctcattgcaaatggagcatgtggtggacctgggaaatcccttggtggaaaataacctcgagaagctccaaacatggttcctggaggaggtggggggaaaggaggtcctcttctcatgaatgggccccttgtatccactggaaacaatggaccgctgattggagcaagaggtggaggaataaggccagggccagttgcttcattttcagcagggagagatgaatcaggcacatttaaattaccaagatcatctttggcatcatttctactggattccatttctgaaggcattgacctatccattttatccaaagaagtcattttaaaacttctgggttctgctggtccagacagtctttcagaattagaataaaatctgtcttccctttgtggaggaagagttgaatcaggatatgattgccctggtggaggaaacatcatcctacggtcctgttccaccggagatgacagggacccagtgtcagaaggagccctgtgaggatcgattaacctgtcatagcttggttctcctctttcattggtaatctgatggtccaggggattccctgggctgcttgggcctcttcctcctccccctggaagcacaggtgagagtctgagtggatcctccaacaaagtttgaggagagggaaaagctctcgtttcagatgaaggccgacccaatggtgagggactacatggggaatgctctctgccaaatgctgtatttgaaacatcgagtgcattaggatctttttctaaaagttcaaatttcaactctctttcagttaatttttgtttgttgtgagcattttctttccttaaatcactgaggtttctttcagcagtccgagctgccaaccaattatcatgtcctcttttctcgtaggaaataacctgcttttgataaaaatgaacagttctctccaattcttcttcaagatctttggctagctttctataggtctccagctcttcagtggcatggctgatcttttcttccactctagaaagcttctcttcttcctctattcggtaattttcctccactgttaatttcctgtagagtttcatttcattttcttgatagaattcagtcattattttaagtttctgttgaagcttctgattctcactttcaaaatatatgttttctgattgcaaagatgcttgttgagtctgaagatttttaatatgctctgtaagctcttcctttgttttgtccacttcagataactgaataataatgtggtttctttctccttctaagctttttaaagaaacatttaacttagcagcatgaatcagtttcttcaaagctcctttcggaggatcatctaagttagcaccattttcccattgactgttcacttttaattccaggttatcatcatccgttgtgtcttcttcaagcacagcagcctgatctttcatcattggcaagtgtccagtcagggtcttgatgtgattttctttatcattcagaacttgttctgcgtgtactttggagtcttcaaatgttattttctgtttattaagttcactcacttgtcctttccatacttcagcttcttgctgaaaaagctgtttatggcttgtctgaagttgagaattttcattcaaagcatcttttattgctatagcccgtcgttcttcactcattttaaatgtcttgcagatgattttggcttcagctatttgtgatttgagggattttgactcatcttctagagactgtatactttttgaaatatccgccatcaattcatcttgttgagaatgtttagatttctcttcttttaagtctttttctagacagaggatttcatcctcaagttcagaattggacctgctcagcttttcacaggttgcctccaaacttcgtgcttcttctgctgccgccttctcaaagctggcatcctctaaagatgactctacttcatagccttcatactctttttgaataaggctaaacttttcaagtagtttacatttttcttcaattagtccagaaagcgttgcaccaagtttttgctctcttcccacataaagccgactcctaaccgatctaaaacttctccacaaaaaaaggagaacaacaaaaaatccaataacagctgcacataccaccagttccgatggaaaaccataaggattctcatctggtctcatactctcaggtagtgctgccacaactctgcctagctcctccaggaccagccccaggtagggctgaggggtagcaccaggctcctccatagcgtcgaggctgctctggcggtcaccgcagtaacactggccacaacaagcggtggagaacacgcagccttgggtctggaacccgaatgcgcacgtgacaaccaaccggagcggaccactgtggagcgggctgcggggggagctggggaacgcgggcacccacaggcctcacaggcccatgttgtcccccaccacctcccctggccctcttgttacactttacatcctgaggcagcgctggtctgagcccggcccgccttagttctggcagttttcacatcacatattttgaagctttattttttggtgaatacacttttaaaattgctgtcttcttcatggattaaacctttgatcattacataatctctggttttggtagttttctttgctttatctgatatgcatacagacactcttgctttcctttcattaatgtttgtgtaatatatcttttttcatcctgttaatttggcctgccctgtattggtaaaattcaagtgagtttcttgtacacagcatacaagaaacatataagaaagggtcatacttttaaatacactcttctattatctatctcttggtagaccattcataattaaatgaattattgatactttaatgcgtaagcctgacattttttgttttctctatcaattcttgtttctctgcttatttttcatgacttcatgtgggttacttgaacatttgttttagaattccattttgttatttatagtgtttatagtgtatcttcttttttatagtttttttggttgcattttatagcttagtggttgcattttacagcttagtgtatattcatttatataaacattatcacagtcaattggtatcatctttattccagtctgagtgaagtatagcaaccttctgtcatattatgtctctttactctatcaaatttgtagtataatggtcttacatccatttagaataacactagacaatgctatgatttttgcttgaaacatcaaacataatttaggaaattagaatctatgaaaataaagtgagcattttaaagcttccagaaagaaatctgacacaacctgttttgtctttcattttttctttctttcctttatattcaccatagatgttatgatgccctatctgttaactccaatatctggattatctatgagtttgtttttaataactgatttatttcttatcagtctgttttacttgcttttttgtatatttggtactttttttaaagtatgctgaatttatggataatatgatatagaactactcaagaattttgaattttttttctgggcagaatttgtaattacttgcagatcatcttgctgctctcaagacctagttttaagctgtgttatgataattatattttattttcctcttagaacatatgcctcactcctgggatactgcacctctcctaagagaatttttagagtcccaactgagtttctcagttgtttgccaacatttccccatttggctggatctgaactccagtagctttccaagaagtttttagtccctgatgatctcttatgctttctgtatcccagcagtttctttctccaaggtctcccctcttcttagccaactgtcacatagctaaggagtcacagaaggaccaaaatggcatgtatacacccatttctaggttctttctctctcccatatggtacattgacccccaattcctaaccaatttagcagctttgaactctattcattgcttcttttggttcccaagaccactaacccctggttgggtcccattttcctgtaccaaggtcaggaagatgcctttctggaaaatcctggcaaatgtggtactaacctcatgtgcctcaccttcctgaaagatctcatacctgacttgctacaacaatgttcttcaatgcctgctgatatggtttggctgtgtccttacgcagatcccatcttgaattgtagcttgcataattcccacatgtagccagcccacctgaaccatgctcagcagctggtgagaggtaattgaatcatgggggtgggtctttcccatgctgttgttgtgatagtgaataagtctcatgagatctgatggttttacaaaggggagcttccctgcacatgccctctctcttgtctgccatgtaagatgtgcctttgcttttcctttgccttctatcatgattgtgagttctccccagccatgtggaactgtgagttcactaaacctctttcttttataaattacccagtcttgggtatgtctttattagcagcatgagaacagactaatacacctgccaagaatttttttctatattttggccagattgtatagttttttatggtgggagggtgaatctgacacaagctatttggtgtcaagtagccaagtcacatactaatttatttttaatgtaaagctatacaaccttctttctatacctaaatttttaattaaaatataataattaaaatattactaaaaatttcttaatgattttatttcatggtgaaagagactcagtctggaatgtaaagtatgtcttaccagtatttctcgttttgcaggacattgtctaggtgtccctctcccatggatgatcattagtgtggtttatttttatgctttgagaaaataagtctgtagtatgttactacattctactatataaagatacacttcaacttatgataggattatgttccaataaacccatcataagttggtaatattataagttgatgatgctttttttaaaaaaatatagactgttgtcctgttgcccaggctggagtgcagtggctattctcaggtgtagtcatagtacactatattctcaaagtctttgagctcaaacaatcctcctgcctcagcttcctgaagagctgggactgactataggcacacaccactatacctggcttgaagatatgtttaataaacctaacctaccaaacatcatagcttagcctagcccacctgaaccatgcttagaacactaacattagcctacagttgggcaaaatcatcttacacaaagcctatattatagtaagctgttgaatatttcatgtaatttattgaatactgtactgaaaaggaaaaacatcatggtagcatgagtacttgaaatatggtttctactgaatgaatatcactttcccaccattgtacagttgaaaatcttaagtgaaatcattgtaagttggtgactctctgcatttatttattttactactttccttttttcttttaatagttgaaagccatcataaggtaaaatattattgcctaaaaatactctgcttctctggaaaataaaaaagacagaagtttcaaagaaatctttcaagagatataaaaatcatatgaaaatgaaataattaaagaataaatctgtaattatgcatgttgtaaaatacaaatgggaggctggaagagagactgtagatgcaccgtgaaaatgaaagcagaaataaagtaggaatggaaacatttatataggagttgtgagatacagcatcatatttttgttctacactaaatagttttcatgtctagcagaggacttggaaattataagctactcaacagtgaatctcagagctttctccattcatctcacagttagtcttatataaatatacagctctgtaatgattatatatatcaattttttttccagtcaaggacttttcctccacatgttcatttccgtgaaaaatatcacttggtactagatgatgtgaatggctatgattgaactggttacttagggtaataggttgacatcttgtttcggcaattaaacaataaaaaagttgttctttattaagatatgaatccatttcttaaagaaatgggttccatagatttccatagcattaagcatgttggtaattcaaatgcctcatcactgaacaaaaatgctcaacctcagagactatccttgcacataaaaatttttcttattttcagttgagtatgggccaactcatatcaaacattattgatagagattggagcacctgctctggatcagggtagggtcctccacagctagaactgtggaaaacatctcaacagtaggcactggaattgtgttttccccagtcacaggccttgggcaagaggagagctgctatggctgtggtttctcctggacaatgagacttttagccagcgccagcttgatgaactagaactggtctgtgtgtgttatttttgggtgacccagcctacttccttgagactgtggtgtagcagggccttctccattctacacataagcagatcgccaagcatttaaagcacttgctcacatgggctggcagcctgggttgccccttccttcctgtgcagagatccttgtgcaaggggaccatctccacttcatgcccaggcagacatccagggattcagagtgcccatcagcatgaatcagcaatctgagctgctccgttcttctggtgcagagattgcggtgtagtgggaccctctctgctccacagatttccaggtatttggagcatctgctcacctggagcagtagcctgagccaccccatccttcctgtgcagggatattggtgtaaggagaccctctccactccacaaccaggcagatctccaggcatttggagcagccactctcctggagtaagagattaggcttcctctggcacccttatgcagagaatttggggccaacttccacgccgaggcacgccgctggacacttggtggctgcccactggactctccctcagagttggtgctagtgcttattgttgggggacctgtagatgggcttgccaggtccagccccacccagtgttttctcggtaaacaagaatcaagtatatacccagccccactggctgcaacctgctgttacccataagcgcattctgggtaacccaggctgccagcccatgtgagcaagtgctttaaatgcttggcgatctgcttatgtgtagaatggagataccgcacaggaagacagacttggcaactgatctggcatcaggagagaagtcttattcatctcccacctgtgtcattacccagctgtggtagagaaccccagccttgatttcaactgtgttaattagacatggggaagataatggagaatttgttccaaaatatttcatatgggacttggaagttgagctaacttatgacagatagaatcaactcattttccaagtgccagctatcattgttccatatgtaacttccaaagctaaattaatgattagacatgaacatgaggaggtagagagcaaatttccaaagtttttacttggaaataaatagaaaagagagttttcaaacaatattttaatattttgcttctgaatgaaattttgcaatatttactatagtttttaaattgagctggattaggagatggaaatattttaaaaaactagatttttctgaaaatagaaaaataaccatagtacgagcattagaaaatttaccaaaaaacttagtcaaaaaacctttttctttctttcattaatgaacattctagctttccacacagaatttaaaacttaattacctcctactaaataattccattaatattgggaaaccaaatatctatgcagtaagaataaaaacatttatttatttataattaaaaaaatagaggccgggtgtggtggctcatgcctgtaatcccagcactttgggaggctgagatgggtggaacacttgaggttaggagttccagactagcctggccaacatggcaaaaccctctctccactaaaaacacaaaaatattagctggatgtggtggcacatgcctgtagtcccagctactcgggaggctgaggcaggagaatcgcttgaacccaggaggcagaggttgcagtgagccaagatcacgccacttcactccagcctgggcgacagagcgagactcagtctcaaaaataaataaataaataaataaaacctatagttgtcatatgccagcaattttattggcattaactaagataaggaaatgaagtgacatccttaggatatcaaacttaatttccttctgaatcaggacttgtcttgctttccccattccaggtacttacctggcctctcttttcttccctctactgggtagagttgagtgagtgtggcctggtcagatttgtgatttattttttaatttgtgatttatttttattttctatttaaactgaattagagtcagttatgaatttttttaatgttgattttttaaagacactaaattactgtcctgttgttagtcgagtcgagtttgtaaaaacaaacagaaaccctgcggggggtgtgtgtgtgtgtgtgtgtgtgtgtgtgtgtgtgtgtgtgtgtgtgtgtgtgtatttgcccttggggtgagaggtgagggtggggaagaaaatgagagaatcttttagggccagcctttggaaataggagtcctttgttcccttcagagatcaaatttgactcagtataacattgttgctttaaaagatctaggttcatttatcgctattttccaagtatgaaaaacagctacttataaaattgttaatactgctcaattcaaaacagtattaaaatgtaggcaaaaactaattaattaaatttgaaaatttattcaaataataaagctacagcctatggaagaaaatcacaaaggtaaacataattataataataatctctgaatttacagaatatactagcttctttttaccaagtacagttatgtgttgtataacaacattttggccaacaatgaactgcttgtgtgatggtggtcccataagattataatactatagttctactataacttttctatgtttacatgtgcttagatacacaaatccttaccattgtgttacagctgcctgtggtattcagtacagtagcatgctgtacaggtttgtagctaggagcaataggttagaccacatagcccaggtgcgtagaaggctgtaccatccaggcttgtgtaagtgtactctgtgatgtttccacaatgataaacttgcataagaatgcatttctcagaacatattcctgcccttaagcaacgcatgactggattataattaacttgccctgcctattctttattcatgctttcatattattttcctagacatcttcactggaaaacagaaattgatatttttccccagttgcaaagatttattcctaaagcattgaaatgctaaaataacatattaaccaaactattcttcagcatatagtcattgatgtgtaaaggtacacccatgagcttgaagacaaattcatttttttttaaaatatgtacctttattactagccttagtcagtatctatcagtcagagacttttgaattctatttatagatcctggaattttcctttcttctctcgtacccttctgtttgttccattatggttatgaatttgagcatgaaaataaatatatttattcattattgatataaaaatttattctgttgttgatagaaaaatatattattctgttgttgataaaaaaatttacttataaaatttacagaaactatataaaattagttaaatcttacactatggtctcatatcaatatattgatcagtgtgtaataatattttttctttataggagtaaatcaaatacaaattgtggaggaggcaaccatggttataacaatgagtttaggagcatggaggtaacttactgcttttttttttaacttttattttaagttcaggggtacatgtacagaatgtgcaggtttgttacataggtaaacatctgtcatgggggtttgtcatacagattatttcattactcagatgttaagcctagttactgcttttttaaaacagatatttattgcacacctattttattataggcaatgttcaaggttcttgaatacatctgtgaacaaaacagattaagatcctgccctcacgaagcttttattctaagagggggatacagacagtaggaataataaaataatacattatttgttatgtcagaaggtaaatgctgtgggaaataaagaaaaagtaaaggagagtaagggagaaattgggagtattttggggtaccctggggggcagtaagaaactttaaatagggtggaaagagtaagagtcattgagttgacattgagcagagatttgaaaaaggtaaaagaattcgccttacaaatattcaggagccaagtgtcccaggcaggagaaacagccactgaaaagggccaaaattgggagtgtgcctgagtctatgagtagaatgcagctgataatcccccataggtaaagctttgcaacctggttatctcatctacttccatttgtaacacacacacacacacacacacacacacacacacacacattcctttccaaatagaaaaaaaaatgtattaggccttttatgaatatgtttccttttattataacattgtcatggtgagttacatctttttgtaaatatttgaaaacgatctctggagaaagagctttactattaattggggtactatgtaatagttaaattaattattgcaagaaaaatctatgcttccaattctttgatcattgtcttaatatatgtatgtatatatacacccacacctgttaccaaaacataattgcttatctgtgtttgatatttttcttctaattgtttaagtctaaaataatttgatctgttataaataatataatcaagttaacattaattaattcaatgtaaaccaaaatattgaggtctttttatcccaaaagtaaaagagagaagtgtaagtggaacaggaagttagacttcatctaaaaaaaaaagttaacattttgtgtcatgttaacatattcgattaacatatttgattaatgatatgaaacaatatgaaaagataatatgatgttatatgattaaatttctactaaatattgtgcccatattgcagaattatgctgatattggttgtgtgccattgtttgtattctcctactttattggcacatgaggtgctatggaggtgggtagagacagaagtaaatacagcactgattatatttggttgggattggtacaacattgcaggtggaaaaatatgaaaatcattttcaaaactaaaaaaaaattccttacagaggcctaatacaaataggagagtagttacagaaggaaaattttgtctcttcctatatttgtttttgaatttggatgacatctaataataataatctgactattatgacctaggctatctttctggcacatggacccagttttaaagagaagactgaagttgaaccatttgaaaatattgaagtctataacctaatgtgtggtaagtatatttaaataagttcgccaacaaaatatggatagttttaaatatatgtgatttgaaattggtagcaaactgaatcccagaggctggatgctctgtagtgagaaggcagaaagtaaaaaagataaggaagaattattcattattcagaattattcagctataagagtgaattctttttgttttactagtaatgataaactttattttcatttttgagatggagtcttgctctgtcacccaggctggagtgcagtggtgtgatcctggctcactggaacctccgcctcccaggttcaagttattctcctgtctcagcttcccaagtagctgggattacaggtgtgaaccaccaggcccggctacttttttttgtattttttgtagagatggtgtttcaccatgttggccaggctggtctcaaactcttgacctcaagtgatctgcccaccttggcgtctcaaagtgctaagattacgggcatgagctaccatgcccagccagtaatgataaactttagatctcagaagaccaaccttttctattagttagttactagatgataatttaatttaataaaacttaggtaaataatacttccaacttttcaaagcaagacaaacttacctaaaaacacaaacattttcttgtaattacagagagaagctctctggcataaaaacatgggaaaaaagtcctagctggatagacacttgttattatactcaatgttaaaaaaccttaaagcattaggattttaggaagcctaacctaccttcctacctacgtgcttgttgcaggccattgtattaacaaatcatttatttacctagcaaggcaatgagtaagctgcaatttcgctgttagctttagaaatttggacataaacatgcttacaactctctctcttaatgttgtcactggtttgtggtaattgaatgtgacttagagaccaaaaggtattcagtttttaaaatggtgtgttgtaggcttaacaacttacattcttgttccacatggctaggtttatggtctggactgttggccctttgcagaactggttaaaaggaactacataggactgcagttccaggagagatctgttaggtagcaggcagtcagcaggaattacttaaaaggctatgttggtgaaatatttgtatgtttcatagaaacatacaaacatgcaaattgtatgtttctatgaaacatacaaatacattttgtattatgtattttcatagaaaaaaatgaagaaaagctctcctaatattaagcaaaattcactagttccattttttaaaagtgtctatctttagagaataaatgtactacaaggaagattataaattatttattgaaacttgcttttattaagaatatagctttttatgctagaaaatcatgatatgcttacgaaacaaagtggtgatttaaggaagcttttctttggagaaacagaaaccattcatgaaagttcctctggctcatctgcagcaactgttcctattcctcatttgtttcaagagatggagtttcagtatgtcgcctaagctggcctcaaactcccaggctcaagcaagcctcttgcctcagcttcttgagtagctgggactacaggtgcactgccgcacctggctagttctattctttagcaagactagtgattgaaaccatggagaagaaagtcagtaaactgaatggcatatagagtacatagcttcgttacagcagaatttattaaagggagtgaaagagtaggtgtttgtttcttcccatctcccacagaggagttgttgctttccagtgtaaagctactttgaactaattttttcaaaaaacagatcttctacgcattcaaccagcaccaaacaatggaacccatggtagtttaaaccatcttctgaaggtgcctttttatgagccatcccatgcagaggaggtgtcaaagttttctgtttgtggctttgctaatccattgcccacagagtctcttgactgtttctgccctcacctacaaaatgtaagtaacaacttcatgcatccataagaacgtaaaggggcaagctattcttaacctgggtagctgacaactggggtagcaacaaccaggtttgtgttccgccttggatatttacttagtaaatatatgtggtttctctgaaccttacctggaaacgagaagtgagaatgcatacattgtaagattaagtagggaaatatgctttataaactggaaagcactgtttggtaattgttaatgtcattataaactaactgtccttcaccattcaatacagtaatcttcgagctctctccaactttccttataaaccattcttcctgcggtttatgaatcagatgttcatgcctggttatttagagcagaaagaactaggagggtgtagggattgcagcctgctgtttgacatacccactagggtaggtgctgcggggtgttcctttgggtagcagggaagaatctggctgacagttgacactgggaaggtctttttagtagattaggcccttggatgagttcaagagcaggacttcagatcccaggagactttcaataaggtgaggttttagtgctaggagaggccccaagggcaaggagtcataacagcagctcaaaatataaggaccaagcctacttgtgagaatcagagcgcctggatggggttgggatttcagagtgaaattggagccccgttatcaggagtccttaaagctaaaattaatgtcaagggtcatttgatgccaagttccaaatgtgtttgtagaactaaataaaaacacctgctgcctcaggtaagaatttttccttatagtcagaagtaggtgaagacatcacaatctctattcttcaaaatagcattataccacagaaataaataaccaaccaaaggggctttacaggacaaaagcttagcaaacttctcaatgaagatcaaatccacagcaaagatcagagtaagggtgtgggtttcctaccgactgctcctgataacctcaatcaaactgccattaaaaaataataataacattacttactaggtatattatttctcattttagagataaaacatgctcagagaagttagataaattgttcgaggccagagaagcttgttctatctggctgcaaaccccaagttctatgtaaagaatgcctcttgctattcagagtgtggtctcaggaccaccatctgcatcacttgcaaattggttagagatgcagaatctcaagccctaccctaggtttactgaaccagaatccgtattttaacaaaaccctcaagtgattgtatgcatattaaagcttaaggagcactgggatgttgtcacccaacttagtcattgattccagcagtaatcagaatgctttgccccattatcaattatctttttgcaaattctctctctctctctctctctctctcacacacacacacacacacacacacacaatagggagcagtagtgtctctatatttctgaatagtggcagaatcagaatcttaagttaggctagcttctttggcagtataacatttaatcgattactacagaaacaatcttgattaccccttaaaacacatattgttgctttgacttatttcctcccctttcccatccctcattatcttgcagagtactcagctggaacaagtgaatcagatgctaaatctcacccaagaagaaagtaagtcaatagaaaacatgttaagtctttgatatttagacctaacaaaacacaatgtggcccttttaggactctccaaaataagctgacagaggttcctgaacataaagattttattgccaatatacaaaaggtaaaaaaaaaaaaactcacaacagatataatgacaacagtacaagcatggggtagttccagtggttccaggaacaaaacgaattccttgaagaggttgtgactcatctgcagtcctctgtttcctttccttagatgtaagcagactgagctgcctgggtttgagtcctacctctggtgcttcctggctgtgtgagctggggcaaatcacttagcctccctgtgcctcagtcttctcatctgtaataaccgtactcacctcatgtagttgtaaaaatttaaaaagttaatacatggaaagaatttacaattgtgcctggcctgtagcaatattattattacctgttatcttttaagtattcttgtattaaactcactctgtttcagtttcatcgcttataaggggatacctactttatacagttgctgtgaagattacatgagttaatatatgtgcctggtttacagttaagagcttagtaaatgtactagttgttttgataatcttataatctgccaagtgttattccatggcatgaatagcctgcaggttttttatccatcactaattgatggatttttaagaagcatgcaagtaaaagtaaataaatacattagaatgttgttttagtccattccaattgctattaggttggtgcaaaattaattgtgtttttttctattaaaagtaatggcaaaaaacagcagggcatggtggctcacacctgtaatcccagcactttgggaggctgaggcagacagatcacttgaggtgaggagttcaagaccagcctggccaacatggtgaaaccccgtctctactaaaaatacaaaaaaaaaaaaaaaaaaattagttgggcatgatggtgcacccttgtaatcccagttactcaggaggaggctgaggtaggagaatcacttgaacccaggagatggaggttgcagtgagctgagatcatgccactccactccagcttgggtgacacagcaagacttggtctcaaaagtaatggcaaaaaccacaattacttttgctccaacctaatataacaagatgccatagactgggtagcttataaacaacagaaatttacttctcatagttctggaggctgggaaacccaagatcaagttgccagcagatttggtttctgatgatggcctgattcctcataaagggccttcttctcactctgagctcgtatagtggaaggagtgaaggtgtccctagggtgtctttgatgaaagccctaatcctgctcatgggggtcttatatcatgccttaatcacctcctaaaggtcccacctcctaataccatcacctttgggattaggatttcaatgtatacgttttagagacacataaacattctgattataagacataagtttataaaattccaacatcttccctatgacaattactagactaggtcatctttgttacaaagtatgtacttttgactttgaaggttttacctcttcatgtatatcctctgagctgtaaaatgtaaggaatcacagagggcaggcttcagatccttgcttaggctcttgcttggccaacttacttatgtaaaccttagttttataatctgtaaaatggagtaataacaccaatattattattattatttttaataattatacattggattgttgtaagaattgaaagaggttaaatatgtaaaatatttgttagagtacttgtcatataataagccataagagagtggtagttattatatgggtagttattacatgcaaagaagcatttgctaatttcatgaacctttttattttatgttattttaattttagtaacagcaacagtgaaagtaaatttgccatttgggaggcctagggtactgcagaagaacgtggaccactgtctcctttaccacagggaatatgtcagtggatttggaaaagctatgaggatgcccatgtggagttcatacacagtcccccagttggtaagttcctgagtccattgatccatgcaggcaagaaatatttataatcctttcatattctaagagttgaattttgttttgcagcagagattcaaagggagggaactcactggcctgtagcttgcaagacaatgtgcaagtattagataaaggttgttataggtgctacacgggtgcaaaagaggaacacattgtgttttacctggagaaaatggaaaatgtttacaggccaattggccaattggtaaggcaggtagaaaaggacattttaaacagaagcaacaggaagtacagaggaatactattcatttaagattccccatgtacatcatgggtgcatgtagaaggtgatgataactagattataaagggctttgtatttatttgattatttaacaagtactttactatttgttgtgtgttatagtaggcaccaaatatacaaggtgaataggcatagttcttctctgaaggatctggcactccagtaagtcagactagacttacatgggacaaatgcattatgtcacagatctccaggctgaggttgaggtccacttgtttaaagccccttccctcttcactgtctggcatattctcttgcactaagtagtaccaggacagtcaactacccttcaggaagaaaacagtagatccctacctcacaccacacacaaaattaaatttctggtggatttgtagacctaaataggaaccgcaagtccatattccctttgtgcatatctttatgatcttgtgatagagaaggctttctcaggagacaagaagaacaacattaaaaatgcagaggaaattgattagactacataaacattaatgtatgacaaaataacaaagttgtagatggaacaatatatctgcattgcatataagaaacaagttatgagtatccagaacagtaattagattcagaatagctaataaatttccaccaatcaacaacagaatgacaagcatcttagttactacatgaacaaaggataggagccaagcaattgaatcacaattcaggaatatgcaataaggaaaatgtaaattaaaacaaaacttagggccaggcacagtggcttatgcctgtaatcccagcactttgggaggccgaggcaggtggattacctgaggtcaagagtttgagactagcttgaccaacatggtgaaacctcatctctactaaaaacacaaaattaggcaggcggggtggcatatgcctgcaatccccgctacttgggaggctgaggcaggagaatcgcttgaacccgggaggtggaggttgcagtgagccaagatcgcgccattacactccagcctgagcaacaacagtgaaagtccatctcaaaaaaaaaaaaaaaaaaaaaaacagcaacaaaactttaaagtatgcctaaagtcagtccaaacacttctctggggcagggatgattttatttaatgcatcctcagcacaatagaattgtccagtaagtgcttattgaatgaaacgcattgaatgaattaaccacaatcattatttttagacttttaaagacaaagctataccacccaccacatgggtaaataatcagggagctgtttctgtagagaaaatcttagtattttagatccagagactgatgacaaacttatagctattaatgtttttgctaagagtaccacctcttttatggaaaggaaataattgattgcataggtttacctactcttcctgttccaattcaaaatttttggagaaagataagcatattttcctactactaattaaaactttgtatattctgaaagccagctctgttgctgtcaatggttcgattgtggtcactggtaacagtactaatgtttgtttgccagtgtgggcaaatattttaccaacagttacctgagttcatatggacggttggtgcaacattactttcttaatatgcacagtgttcagttcgtgattttcttcaacacacaacattccacaaaataacttctattttgttattgttttcgagaggagtggcatactcagggtcagtcctattatttaattttctattttgaaaattccaggtatgaggggttgtgtggcattaaagggaatgtttatgtttttagtacttttcccctgctgtcttgcattcttgaatttttatgagctttggcggaaaccaaaggcggagagattctaagtgggctcagactaggagtttaatacaattcttctttgttattgttttaaaactagcttccttgttaccaaaagttcctgtcctttcactgatcccacagaagtacttgtgtatttctccttccctgtgacaggatggaattctagcaattttctgctttctaattcagaaattactctgttagtgtgttgtggttcaagaaaattacatacaaggatgttttgggattcacataaaaatgttgtaaatcagctctgtgtttcaaaaaatcaggcttaaataagcactttttggaacatggacccaattggtcttagcctttaagatttatagagcttttgtttttctgtggttttggtgggttttgtaatttttgttgtatctcagaagagttctggggaagtagttgtgatttgaaatcatggtcgtagaacagctgattcaaaaccattaaggttagtcagaccatacatagattttgcttctgggcctgttcagaaggaagatatgcactagtgttcctgttgctaggtgataaattgaaaataagagcaagaattgtgattactgtttaaaataggtatttcagaatttaatatgaaatcaaataacttttcagagtagaaatctagtgtactttgaaaaatgcctctctgtctccctatgtatctatgtatctctcgctctatttacctatctatagctatatgtctatctatctgtcaatctacacacatatcattccatgttaaaaagccttttttcttgtttctaaagattattttgtgagtctttgaaacaggggcattattgtgtgttgcaaacatttttgaactatgaaagaattatttttccctgtagaaaataaatcatacaaccaaataattaaaaacatacatagttattatccttaccgtaaggcaaaattgtaactatctaatcttcaaacaagtaggttttagcttgtacattcagcctacaggtaagaagcatctgtaacttcaatagaaataattttatcctctgttcaggttctactttgtttcaatgccagactaaaagtacaagcagctcacgttcctgtctatactcatcatttacttctccagtaagattttgagagctaaaaagttcatattttatctgagtgtctgaattatatttattgctttcctgactttctattccgttgcttcaaaaattccagggaactctgataggatggcaggattgaagctgtttatgtgttggaggcggggtggtggtggtggtggttcactaaagccttttttattatagaaaggaccttcctgtacctcccctccatccttctaatgggctgcctattgcataatctcgcctggataaaggaggccacatcctcattcctagtactgatgcacttttatttgagggttcaagtttggtatgtaagaaataaatctcaagattttcggttagcagaaaatgtgactttttttttttagtactttctggctgaagctatcccagttcatttcccccagcacaaagtctaagctactttgagaacatggtaaatattttgaccaactaagttgtttaagcacaacttttacagccacagcctcattaaaaattacaataaactttcttcgttaacatttttataattttaactgttaaatataagcatctcaatttccttacattatggaaaatgcatttagggctacatttatatactgtatatttcttcaagtaaaacttactaatgtgaaatgtttgagtacaacgataaagatgtgtgttaggaaatatcaaactcacaatataccagcggtctatggggccaacttggtcagcagtcaccattccttattttctaattttacaacatacttacgtagcccttataccaagtggagaaacctggtcactcagaactgtatactatgatatgtttttgaaagaatataaacaaatgcttttagctttccagactctgccacctgaaggagagtgaaataaatggtgagaactcatccaacacatttagcacaaacgtcttcgtatttcttggtttacttcttgttttggtggactatatcactcaggagcttcctgagaaagaaaaaggggaagatacattcttgagagtttttgtgtctcaacatgtttttactctgcctatacacttaattggtgttttagctggtttcagaattttagaaataatttttcttcaaaattagtaagacaggtcaagcgcagtggctcacgcctgtaatcccagcactttgggacgctgagtggatggatcacctgaggtcaggcgtttgagaccagcctggccaacatggcaaaaccctgtttctactaaaaatacaaaaattagctgggcgtggtggcgcatgcctgtaatcccagctacttgggaagctgaggcaggagaatcagttgaacccaggaggcagaggtagcagtgagccaagattgtgccattgcactccagcctgggccagatagtgagactccatctcaaaaaaaaaaaaaaaaaattagacttcctgggctgattctctaatgtgtttgaatttttcctatttttcccatctctttgtctttaattccaccttttgagtcacgtctgcaacttcatcctctagatcttattgagtgttttcttttggctgtcgtattttgaaatcccaagagctctttctgttaccttttctctttttaaacattgcctctgttccttctttatggatgccatatatactctcagctctctgagaaaagagttttcttctggcttctgcattgtctctttttcttctcccttattccccagtgtctagtggtccttggctgtcagcttctattttaagagttaggcactaaactatatggctgggtctttccagtctataagcttcactataggttgatcaggaagagaaccagccattttgttgaggactccaaactgacagtatctagtttcttttcaggctggttgttttccaaagagaggatacttctaatctgactcagcatatacaattttcaggctaaatgggcaatgagattggggaatcttatcattcagcaatagagttttgtttaatctcatttctttcagtatggtgcacctgctcttggctgtgccttgtgtcttttagtctgatcatccctctggtttaaactctccagagagtaaacatactgtctatccctttttgcagactttttcaatctatcctctatttccagccttatgcgaactcctgtctttaggactccaagttctacccttctggggttctacagtaggacttccttggtgcttttcccaaacataagctcttggtagtcagtgtttactggtctactaaatcacgttattatttatctgatttccagcttctgaatgttccctgtcatctcttgtgtgttttcattattactgtcttcttaatggaattttagaagggagcaagataaatgtatgtgtttaatcaatttgagaagttttctagctggagctttgtagtatgttagggagtacagtctctgctttgctttttctggacttttctcatcttcagctcctacttgttctatacctcagcatggtgctctcctggctacaaagacagcatacagtgtatgttgcctcttcctttgtgaattgaactcagaggtttcagacaacatagctaattttgctttcagcacaatgcagtgaataaaggaaggtcatcctaatttaacttaatcttcatttttttataaattatttcaaattttattaagaaagatatccattatgggcagtagagagcatacaaatcaaaatgtctgagaaaaataaacaaatagcaaaatgttcacttacccatgattatatgctaatcaaaatatgatgaccacataatatagtattaccttaaatactcgagttaggcagcacatttacaggatgtcctcttggtaaataaattattgtactagtctttaaatagggctacaaagaaattattattattttttaagacggagtctctctccgttgcccaggctggagtgcagtggcacgatctcagctgactgcaacctccacctcccaggttcaagcaattctcatgcctcagcctcccgagtagctgggattacaggcacccaccaccacacctggctgatttttgtatttttagtagagatggggtttcactatgttgaacctcggactcttgacctccagtgatccacccgcctcaaccttctaaagtgctgggactactggcatgagccaccaagcctggcctaagacattattattattattattattattattattattattattattttcagatggagtctcactctgtcacccaagctggagtgcaatggcccagtctcagctcacctccgcctcccggttcaagcgattctcctgcctcagcctccagagtagctgggattacaggtgcccgccaccatacctggctaattgatgtatttttagtagagacggggttcaccatgttggctaggctggtcttgaactgctgacctcgtgatctgcctgcctcggcctctcaaagtgctgggattacaagcatgagccactgagcccggcctggcctaagaaattattttaaaaattcttatatttcatgatgaatgaagcatggctgtaaatttatttatattcaaaactaatttgtttagacaactacaccttctttgaattaatcttaggttgataaaaagttcttgaacagctgaagaataatatatcaatacttagtttatatcaatattttaaaagtaaatacattttactttcaatttttatttaaaagtacaatatacatcaccacataaaagttagatcttgaaaaggattttagtttttaggaatagttcccattattcctctgctctcaattcaggtttcactgtgcaaatatttttttccaaggtgtatttgatttgccctcccgatgtccttaaccagaagggaaccacagaagaaaacactgctgaagacatccattctcattgcttgcgtagacctgattcactaagaaaataggaaaagcttaaatgaaaaacattctagggaagtgacaaaccatataaggcaatgggtgagccgcaattgtgggcgtaatttttttctctctctctttgaacagggagacacatcgcctctgcctcccactgtcccagactgtctgcgggctgatgtcagggttcctccttctgagagccaaaaatgttccttctatttagcagacaagaatatcacccacggcttcctctatcctcctggttagtagaactcttttttagagcagtagcttagaaagctctcatcagctggatgtgggcatgtgccttaaacatatactccccaccaaaactacctgcttgggtaagctagctgcctgagaggcttccagtggttgtggctggccagagcagcacagcggctgtaataaagactaagacattttgcagtgggacccacacagcagctctcatctggcccagatgtttagagagttcggcaggtttaagtttaattttaaaactggagattctttgcagaaggacacaaacatctaaaaacccatttcttctgactcctgcccaagctaaggtccacctggagaatacagctgtgcccgtgaaaagaaatcaggctgggtgctcgctttggcagaacatgtactaaaataggaatgatacagagaaggtcacctagtaaaataaaataaaataaaaaaagaaatcaggctggaattttggcctgtcgctcatgctgtagggctaacagttttaaactgcaggtgaagtagccaaatgaaatttaagtttttgttgttgttgttgttgttgttttcagaaagaatctctcttgggaacctgccaaagctagtgtgattttcctaaaactcaagccacttccctgtgcaacaggaaacgtcatttttattaacttgcctatgagattttcaacaatttcaccttcttagagatttgtaatttaaagattccgaaatgtataatgggcaaaaaggtttaatgaaagcaagtagcgttatcaatttaaaactcctgagttaggataaattaactgataaattttatgtatctagatacaatcagggggtaccaaatttatgtaagccctgtgataaacattaaaaatttgcaacaggctgggtgcggtggctcacgtctgtaatcccagcactttgggaggccaaagtgggtggatcacctgagatcaggagttcgagaacagcctggccaacatggtgaaaccctgtcccgtctctactaaaaatagaaaaattagctgggtttgctggtgcgcacctgtaataccagctattcaggaggctgaggaatgagaatggcttgaacccggtaggtggaggtgcagtgggccgagattgagccactgactccagcctgggtgacagagtgagactctgtctcaaaaaaaaaaaaaaaagttgcaacattttattaataaaatatttgaaatttgtgtataaaattgtatctgttaggccataagatattagttaatacatcaatgtttgcctgacaaggaataaaattaataattaaacaacttgtctcaaaaaattaaggatacggccagacacggtggctcatggtcataatcccagcactttggaaggtcgaggcaggaagatcacaggctcaggagtttgagaccagactgggcaacatagtgagatcttgtcagttaaaaaaaaaaaatcaaggataaaattaaactctcttctaactctccagtataaattccaattatttgttaaaaatagaagttctattactagcacgttcttattttcctctaaaacagaggtaatgttatgttgattgactttccaactttcagggcttagttaaaaaggtagaagaggctttttgtggagtctgagaactacaaacaccatatgaaatctgaagaaaaaagagctacttgtttcttcttgtcttttggtgcctacttattggcctctcattgaataattagttacccaggcaggatggtgcatgcctgtaatcccacctactcgggaggctgaggcaggaggatcgcttgagtccaggagttcgagatcaacctgggtaaaatggccagactctgccttaatagtaattaaaaaaaataattagttaagatatccaagtacagtttaagtataaaaagtattataatagaaaattcatataagtggaattgtgcactatatgtgtttctgtgactgccttatttcactcaatgtcctcaagtttcattcatgttcttatatattacagaatctaaaatagtcaaattcatagaatcagagagtgaaatggtggttgctgggggctgggggagggagaaatggggagttcctaattaatgggcgtaaagtttcagttaagcaagacaaataagctctggggatcttctgtacagtattgtacgtagagtcaacagtactatactatatacttaaaaaattgttaacagagtagatttcatgttaagtgttcttaccaaaatgaaatcaaatgaaaaaggatttgaataaacatttacaggtttgcagcttttaatcctcacaataattctatgagatagatgccatgagacaaatgaagcacagagggatgcagcactttgcccgaggagtgcagctgtgagcagcggagctggggttcccacttgggctgtctgcttccagagcaccctcgctgaacactcactgtgctagacagcacagccataaatcctcagagcccatgatttgtggtgttcccttcagcagtctctattagtcagttctcatactgctaataaaggcatacctgagactggataatttataaagaaaaggggtttaatggactcacagttccacatgcctggcgatgcctcacaatcattagggaagacaaaggaagagcaaagagatatcttacatggctgcaggcaagagacagcgtgtgcaggggaactcctctttataaaactatcagatctcgtgagacttattcactatcacgtgaacggcatgggaaagacctgcccccatgattcaattacctcccacagggtccctcccacagcacgtgggaattataggagctacaattcaagatgagattgggggggacacagccaaaccatatcagtctctatcaagtaaaaactcattttcttcagaaaattttattttggaagacagctatctataataacattattattttgtgcacatccaataactacccatttatatctggcattctgtttgtttcctagggctgctggaacaaattaccaaaaaaggttgacttaaaacaaaaatgtattatctcacagttctggaggtcagaaggctaaagtcaaggtgttgacagccatgttctttttgaaggctctaggggaaaatccttccttgtctctcccagcttctggtggctccaggcattgcttggcgtgtactggtatcactcaaacctctgcctccatcttcacaagaccttctcccctgtgtttctcctcttcccaaatctccttctccttattaagacactagtcactggatttacagtccaccctaaatccaggataatctcatctagagactcctagctacatctgcaaagacctatttccaaataagtttatattcacagggatgaaaggaatggttaggacttggatgtatcttttttggatcacacttcaacccactacaggcataaaactgcctgcattattaacaacctctgttagaaagtactacttctgtgctttgactgttaataaatttatattaatatgtaatagtagtatgcctgttgtgcagtatgtcatattttctcttatagctagatctaataagatccatttgttttgcagccagcaatagaacatcagatagccaatatgatgctttaattactagcaatttggtacctatgtatgaagaattcagaagtaagtatgaatttagagtattaattttaaaatagttaagtgactccttgaacttccaaactaaacacatatttttttaattgcaatttgttcctgatattaagggtcattttgttctaatggtttaaatataggtataggaaggatccctcacatagtttcttttcaacttactttgactttgagtgacttgttgctagaattctgataatttgtttttaagccttaatttgattactgccactcactaaaagtaaatcaaatgtaaatgtttatccccagagtaataattaataaggcaacatgtgtgttctgatcatttttaacactcgctgtcccataagcaactcagccctagggagaaatttgaaggcatatttaactgtaatttcaagacaataactacaaaaacaaaaagctatcatcaatgtggctgtttatttttgcttgtgaagcctattctggagaattacccaatcatcactggcaattattaaggcagaatttcatgttatttaaatgtacttgtctataatagaaaatagtgtcatatttcactgaagtggacattttaaacactttatgattttatttttagaaatgtgggactacttccacagtgttcttcttataaaacatgccacagaaagaaatggagtaaatgtggttagtggaccaatatttgattataattatgatggccattttgatgctccagatgaaattaccaagtaagtgatttgactttttgatttatcaatagggtctcatgaggggaaattccaatattttaagtaaagctcagtattttaaatattacataatacattcacagacaaatgttattgttgactattttcaatctagtctatctaaatatttaggaaagcttatattgcaaaaaatttaaactaatgggcaaagaaaacacttcctggaaaagtttagcaaaattttatttggaaaattgctgaattaatgggcaaagataacatgaaattttgtaaaggctaaggaggtagacaaaacttgatgtactatcaatgagtataaaaccaatccaacagtaaatgaaaaaaaagtcgagtaaaggctaaggtaaattttacaagaatagtgaaaagtcaagtaaagactaaggtaaattttacaagaatagtgaacagttcataaaagcacttcccaggagacaatgtaggtaaatttcatgcagagaactagtcctaactaaactgtacattttagtattaagcctggtcataacaggttgctaagaattagttttgaatgcagagcacagtaatagagttttagagaagtttcatctaccatttctctttattatcaaaacatatgaaggaccaaactaaacaattgtactgtctaagcctagattatgtaaagcaatgatttctacctataccttctgataaagtaacatttatgactaccaagtgtgtggcctttttctattttgttcaccatgtccttatttcagtgttgaatgaatactgaatcaatatttcagtattgactctacctttcacaatttattaattctaataattcaaactttgacagcattttctatatgctaggtactttataaagaactcacatatacatcagttaaactgcaaagataccctagttaggttccattagcccccagttagagttaaggaaactggggttaaacaacttatctaaattctgcaactaataagtggtaaagccagaatatgaacccagacagcctggctctgagtccatgttctaaatcacagtaatacatttctatttataccagcttgtattcctttggtggagtcagactttgcacttaaaacttttgaaagcactttcatgttcgttatctgaaaccgaagtactgtcacatcagttgtatggatttatccccatgtctacactgtgaagttgatagcacagaatcacttccttggaaagctgaggaaactcgaaactcggtaaatgacagaattagagggtgaatgaaagtccaaacattttgtggaagtgcacggctggaggtggaatctgggctccttcattctcagcttctgctgtattagtaaacactactgtgaagtatgaagtcaacaaaacgaggaaatgcaggaggcagaatatcatgctctgcttttttttttttttttttttttttgtattctaacattttttcatgttagaatgaccaagcttggacttctactgtaatctctattctggctgatgggagcaaaaaatatgtaagaccttgtgctttttatttattactttcttttactatatttttactttggcatttctttaaaactatataaagacatttattggcctggtgcagtggctcacgcctgtcatgccaacacgttgagaggccgaggtgggaggatcatttgagcccaggagtttaagaccagcttgggcaacaaagtgagaacccatctctattaaaaaaaaaaatccaaagtaccattagaagtaaatatatatatatatgtgtgtgtgtctttacatagtgtttttcatatatatatttacatatttataccagcttgtattcctttggtggagtcagattttgcacttaaaactttgtatgtaagttatttaaaaagtacctagcatatagtaaaatgctgtcaaacttagaattataagaattattattttacatgtatatgaaaaaaactatgtaaacacacttatcacctttagaaacaaaagtataataacatcaaaacatgttttcaattatgtttgtaagacatttagccaacactgatgttcccatcccaacacactactttgtggtgctgaccagttgtaaaaacaagagccacacaccggaaaactgccctgggtggctggatgtcctaccctttatcatccctcaccgacctaccaacgtggagagctgtcctgtgagtatgctttgggagggtccaggacccgagaaaatgagtcagagctcatttgggttctcataaaagtggctctgactaaaacattttttttaggtgtttcatgggaaaagttataacacaaatgacttcatttttaggcttttccttaggctattgatctctatgtaattaatatcaatttaaacatatatctgcatagttgaacatatatataccccatgtattttatttatatacgttttattcacattcactaataatgaaagaggtgaaatcttgttaatctcttttttctttttttatttataacatgacaattgtatgtatttatgaggatagtgagatgtttgaatgcgtgcatactttgtataatgatcaaatcaggataattaacatatctaccactttaaacatttatttctttgtggtaatagcactcaaagtcctctcttctagctatcttgaaatatacaatacattgttattaactgcagccactctactgtgtaatagaaccaccagaacttatttttattctggccacaaatcttaaagttcttcccaatgttagcactaaattaatgtttctgaatgagtatatacatgtaaaaattccatcaacttgaaccatgaggtgtgaaattgattatacacacacacacacaaacacacacacacagtgcaagtaacattctttttttaaacatcattattaggctacctcaaaatcctttttggatcaaggcagattatatgtaagtagttaattcgacttgcatataaattccttatagaaaaaatatgtatcctggaacttaggttttactgaagtcattcaacaaacatattgagtacctattaagcacatagtatcatgatagaaactctttagaatgcacaaaggaggaacacattgtccctgcttttaaagagttcatatacaacttcagtttatatatgagatataggcacacaatttagtcagtcaataatacaagaattattctaaaaactaaaaagtaaaagaggttgcaaagttgggatcaattgacaattaatgttaaaaggatttaatatttgaaattaaaatcacatttggctggaatgatcaataaagatttcataaaataaggtgtaagtagggctgtgccctgaaagatggatagaatttgagtatattgagaagactacaaagagtcttccatggagggtgggtatgaagaatgaagaggatttagtaactgattggatacaagagcccccaccccaaaaggaaactcaaagatgaatcagatttgaatgttagtaattaggaaaaaggcagaaagaggaaggttgggaatgagaactttttggcaggtagataggataagctaaggataggcattttaagtttgtggaaatgggcattgatgtggaaagtcccataggcaattagagcctgagaattgaagcttgggatctaggccagattgggattcatctatattctttcaggtgttcaatgcatgagtgccttcaccatgctgtgcactataggaggtgctcacaattagaaatccagtaaaatattagaagaaagagataagtgatgtaagagagggacagataaactgctgtagtagtatttcaaaggagaattacttcttgacagggagggtgacatttcagttgggtcatgtagatacgattttacttgagtgtttaaattgtctaaagaaggtggccaagtttagaggctgaatagtgagccactcactattcttaaaatgaggaagaagagtttctgaacaggaaactatcaggagatgttgttgaattgaatcccttcctactttttctgtcagcattttgtttggttgagacaagggtaagccattattctttacttccttttccaatgacagacatcaatgactgatacgatgtggtactctttaccatgaaatctggattaaacagttcgttattacagaggttctaggtagatatgatggagtgattacaatgagtacacaaagaaaaaaatatttgctatccctggtctgggcccttttgaccttctattaggactcttgaaaatgaatcttaagtagatttgtggtctcctctcctcttctcatttgtcagtgtgcactactaccaacttactcatcttaaaatttagtttatattttgtcatagcctctcaccccaaaacttctgattatcctgaacaacaacaacaacaacaacaaaaatacaaagaaacaaacaaaaacaacttccagcctgtacttaagtctcttcacaatttaccctcagttgaccttacaggctataagttccaggtcaattggagtccttgaaattacttgaacacatcttgagtttgcttacctcatcactgttgcctatgttcttctctcctctagaatttcattcttttccatctgctaaaaattccatctgggcgtcaaggtaaagtgcaaataatatgaagctttccttgattattcaaagtagaagtgatctctccaaagttaacagagcatcatctctattgaataggacatcatcagtaataaattggacatatccaagattttgaggaatttgcagtatagtaataagaatgtgacatctgtatagataattattagacaaaatgcaatgagtataaagaaaacttaagccaagctatgattataaaagagattgcaaagttaataagagtagctgtcaattagatatggggaagggaaaggcaagatgagagagaggcaaagatgactaaaaatccagggcatgactgaccaggaaatgtatacgatagattatcttttgttttgagaaggatggatttgctcttggtggtcttcagtttgacagactagttgaatatttaggaggatatatgagaaatagtataaaacagaacttaaatgcatggattttggagttggacctcctgggttcagtgaatgacttcgtttctttgggcaaatatgttagtttcctcatctattatatctaataagtataaaatattcacctccttttatgaagtttgtaaagattaaacaaaataatctatataaaaccctaagacttcccaatataaaaaatggtggctattataaaggaatcatatcttaggatgaagttacattctaaagtcgacagaggccaggcatagtggctcacctgtaatcacagcactttgggaggccgaggcaggcacatcacctgaggtcaggaggtcgagaccagccttttactagagaccccatctatactaaaaatacaaaaattagccaggtgtgatggtgcatgcctgtcatcccagctactcaggaggctgaggcaggagaatttcttgaaactgggaagtagaagttgcagtgagtggagatcaggccactgcactccagcctgggcaacagaacaagactctgtctcaaaataaaataaaataaaataaaataaaataaagtcaatagagagtgaaattgaatctcctatatgcaaatcatccagaaagtgtagtacattcacaaactgtttcttagtaagtctaaaccagccaatatttccaatagcatttggataggtaattgtgctttgatgcacctgataaaatagatggctggctttaaacattgcattgtatggaaactctgtactttaaatatttgaattacacaatgtacagaagtactcctactattaagaggttccagggaactgagatcaagctataggaatgatagattcacaattttatcccacacttggtgtaaggaattagatcatatttccttatttattttgtcctttccttgttcctttcatcttttcttccctcctttttccttttccctcctcctgtcatctttgtactgtaaaattctgtcagataaatgagaatgtagccattagtccaagtgactttcattgtaagttactcagcagatatggaaaatgtaggtatggaacttggaggagaaatcagaactgcagatctagatttgggattaaatcattggtgtgaaatacaattgccaaaggggagaaagtggaaagaaaagatcccaaatcaaattgaggaaaatatgcttccaggaagtatagtcatctgaggaaacagaaggtattatcaaacaagtaaacagtagagttatggataacaaaggaggaacttcagaagcctggggtagctaactaattgaaaagcctgaggacaacccattcagtgaggtcatcattgacaaagtagttgcattagcatgataacagcaatcactggactgtaagtggctaaggagagagaataagaacgtggatagggcagaaaaatgctgaaatcaatattgcctcaaaaaatgagttgtattttggggatatacaatactcttaattctgtaacaggtcatttatacacacacacacacacacacacacacacacacatataaatatcaaagtatatttaaatatagctcataaaactgtatagcctattctgttggcatggactagtgcagcgagagcagttgtctacagctggcttctgttcagattagttggtgccagcgacttactcaggttaaatagctgaagtatcgtctctgcataagtatagttttgtgttatgctttgtggtcatttccctgcaaatttaaaaaagggaagactgtcaggtgctgggtaaacatttagttggatggatgccaagtaagtcaggagagagtagagtcgtataaaccaaatgggagaaaatgttatggaaaaaaaagtgatcaaagatattaggtgctgctgaaatgtgcaatagtaaaggcagaagagaaaaacttctaattagattcccattgaaagaaataactctaacatggcgcatttttttttttttaatattagctcgcattgtgaatctgacacaagtgctttaatggttaggaacaaaaagtatttcctcttactcttcctctggctcagatagtggctatctgtattaagcctgcatacttaaacaagtaaaccactgcatcgaagtcaaatgagaatcatgaaaacacagtaatctgattaaataaactttgaaactttcttattatgtgaaaagttaactgaactttagcaatatcatatgaataccagaaaattattctttataataaagaataaagaatgtcatagaaacccatgtttctaaattattgaactaactttcatattgtaaaaaaaatccaaaataaaaaggtcaagaaataactgaaaagatgcataaataaacaatagtcagcataataaaatataaacagacataaaacactattttacacccacggtttggcaaagatgtggggaaatgggaattatctttcactgcctatagaactgtaaattggtacgaagactttgaggagtgctaggtttaatatctgataaagttaaaattgaatgtactcggccgggtgcggtggctcatgcctataatcccagcactttgggaggccaaggtgggtggatcacccgagatcaggagtttaagaccaccctggccaacatggtgaaaccccatctctactaaaaatattaaaaaattagctgggtgtggcggcgggtgcctgtaatcccagctacttgggaggctgaggctggagtgcagtgagccaagatcacaccattgcactccagcctgggtgacagagtgacaatgtcaaaaaaaaaaaaatttgaatgtactctatggcccaacaattttattaatatatcctagaaactcatgctcttgaacacaggaggcatataccaagttatttattatagcattatttatagtaacaaaaattttatcaatatgtaacgcaaaatttaattgttttgcatttaaatgaggaaatatcacaaaccacagctaagaacaagtcacttaacaagacctagatatatcactatagattacaaacgttaataccgaatgaaaaaaattgtagaataccacttataatattaacataagtttaaaaactcatcagtactacatattgtatagtgatgtacagtaaaagtttgaaaaaacagactggattcaccctgatataaagatgtttagttctgaacagaggagccctggggacttaacttcatctgcaatatttaatttcattaaaaaaattacatctgaagtaaacataaaaatagataaattttgacaacggtgttctatgttagttatagtatactttgtacttgtgttttctttttatttttaaaaactaaatttagctgtatcaaattaagatttaaggaggtaaaaatcatcggcaaaaagacaacttctaagcaataaaaatatttctgttcatgaaaaatactgccttgtgaaaaaaaaagtgttgtgcttttctttttcaggaaggtaaaccagaagctctttgggttgaagaaagatttacagctcacattgcccgggtccgtgatgtagaacttctcactgggcttgacttctatcaggataaagtgcagcctgtctctgaaattttgcaactaaagacatatttaccaacatttgaaaccactatttaacttaataatgtctacttaatatataatttactgtataaagtaattttggcaaaatataagtgatttttttctggagaattgtaaaataaagttttctatttttccttaagtcccctaaaagccataatttttattattcctttttctcttttttcaattctatgaatatgtattattttaaagttatatttttcacacagagatgatgctatattacaccttcccttttttgttggtttcttaaactctaatctcatgacagattataccttccttattacttgttttatcttactcagaatctttgaatatatttttctgcccagaattatctaaacaaaagggagaacaaaagaagtatgtctcacttgggaactgaatcaactctaaatcagttttgtcacaaaactttttgtatttgactggcaatgctgattaaaattaaaaatgcacagaa

SEQ ID NO: 636 - DNA, 81205 bp, Homo sapiens
gcctggatggactagccggggccatggccggcgcggcggcggagtcagggcgggagctgtggaccttcgcgggttcccgggacccgagcgcaccgcggctagcctacggctacggcccgggcagcctgcgcgagctgcgggcgcgcgagttcagccgcctggcaggtgaggcgggcgggcaggcttgggggacacgaggtttctggaaccgacgtggacggatcttttgctcctagtgagagcggcgctacctcattcgggcgcattttgaatcgaaactccaggagggacgtgtccacgcgtcctcctagtagacacggctccctgaggtcccacctgcagccccaaggcttcttgctactcttactcttccgactttccggtgggcaggaccaacctagccgtcttccccttttcccgccctccgcgagcggggcttaggatggttcttgccctctcttgcgggagacccctcactgtaaagggcctgctggggccggggttgcaaaagacagcatgtccagcggccgtgacccttcggatgtcctcccgaggtaggagcggtgcgtggaccgccagcgcccgggctgggacagcacctctgacggcgcgccaggttgggaccgggaggccaaggcctcttggccggggcctcccgaggctgcgctctgcagactcctctgggatagcctgtattcagctttgattttcgaaacctcattttccttactcttacagcgtcagaacaatccctctgagctccagttctctgggggactagaagaattagcaaacagtgcaatttcacctttaagaacagggcgagcctgtgaattagacaacaccaagatcacatcgtgcctttcctcagagcggaacaggctgatgaaattgcaaatcaagctccatctggccttggccgacccagccctctgctgccagggcccaagttcgtgactcatccctctgccagggactttgggtgcagggcttcatcaagccccagggccgcgtgccggatggtcaaggagggtgtgcaggtgaagtgggcacgtcttggcacagggcaccggggtttgagtgtatctgctctgtcgcgatgaacaactggtgactgctccccttctgggggcagaacagcaaccatgacttaggtttcactactcgggtagctgatttcagcgcttcgggtcacttcctggtgttgtggagggtaactgtgttttccctttgggggctgtgagaactgtggcctcctcctgtgtgtctcctctggcttcctaagtagggagagtcaggagggagacgggggtgccttctgccaacctctctattcactcctcatccttccctctcgcagggtcacctgctggagacagctcctcacccttctttcgtattctctctctctctctctctctcaactattaattatggaaatttcctaccactcagaaatagaggggtactatgaatgcctacaggtgctggggagggaggctctccattctttgaagcaactcttcaaggctacctgagtaattatatcagcaccgcacctccttaatcccctaaatctcctccagctgtgatctctcacgcccactattggccaacctctcccctcaatgctaccctgggaaagtagagctatgttctggtcccctcctggtttcactcttgtccctcagagaacagtacttttcccctcaaatgcaaaattgggatgtgtcagccaggctggccctcagaactcgttaccacttactgtatgtctggtagtgttgtgggcatcttttatttaatgcaagttccttgtatttcctctacattacggttaaagcagacatttgtgcactaatctgacgcccctcccactgctgggagtcttggaacatgtccacttgtttttctcctagaaacaagacagagagagggcgggaaaaaacaaaccaaaataacatcacctcttcctcgttcctcctctcccctcatgaagtttttctgccaatttgagaattactctggttaagtggtggctcagaataattaaatgcttaagatttaagtgctgaaatgtgttacctaaagatttggatgggaacttccttgcctttgtgaagggagagtattgaatatacggatgtgtgtcaagggtctctggaagccttcgtgctgaatcatgaccactcaccatgctggaaagagaactggagggggatgacctagagctgaccctggaattctctttcctgaagaaggtctgatgccatttaactttggggtaattcacctgtttctaataacagctacacctgtgtcccgagcattggactggatgctgccatatagcagctcatttaacctttgtcccatctgcagatgaaagaacaggggcccagaatggctactggtggagccaggattcaagtctgggttgattgacttggattttgtactgttaacccctatgctgcctgactttctcctaacatcacatctatgggtgatttaacacagctttcccacccttttgtttttcctgcaaaattaaccattggaccaaaagccaaagcatcttcttctccaatagctacttggccctccagaagactgtggcacagtgtgagatgctccccagcagcttccaggtctcacctgtggccttgatgcctgggtgaacaaaagcctttcttttggtttggtacctttgtatttctgaatctttagtaaaagcgaacattgttttaaaagtatctttttggactagctcatacatttgatatggtttggctctgtgtccccacctaaatctcgtgttgaattgtaattcccagtgttgggggagggacctggtaggaggtgattggatcaagggggtggatttcccccttgcagttctcgtgagggtgcgttctcacaagatccggttgtttaaagtgtgtagcacaaactgggtatggtggctcaagcctgtaatcctagcacttgggaggctgaggtgggcagatcacttgagcccaggagttcaagaccagcctgggcaacatggtgaaaccccgtctctacaaaatatacaaaaattaggcaggcatggtagctcatgcctaaagtcccagctactgtggaggctgaggtgggagaattgcttgagcctggaaagtcagagctgcagtgagctgagattgcaccacttcactccagtctgggcaacagagtgagaccctgtctcaaaaaaaacaaaaaaacaaaacaaaacaaaaaaactttctttggccaggtgcagtggctcatacctgtaatcccagcactttgggaggccagcctggccaacatggcaaaacccagtctctactaaaaatataaaaaaattagcccggtgtggtggcacatgcctgtaatcccagctatttgggaggctgaacctgggaggtggaggttgcagtgagccaagattgagcccctgcactctagcctgggtggcagagcaagaccctatctctcaaaaaaaaaaagaaaaagaaaaaaaagtgtgtagcacctgccccttcacaagcaccttctctctctctgtctctctctgtctctcctgtcaccatatgaagatgtgcttgcttcgctttccaccaagattgtaaagtttcctgaggcctccccagccatgactcctatacagcctgtgcaactgtgagtcaattaaacctcttttctttataaactacccagtctcaggtagttctttatagcaatgtgagaatggactgatacaacatttagtggtatcagattcaaaagttgccaaaggagggtgaagaatcaccagggagcctccctctcacgccagctgcagccactgtgtctacctcagagtcaattgctgtcactcatgtcttgtgtatctttccagtggttgtccatatttatgtgtgcatgtgcacactttttgagacggggacttgctctgtcacccaggctggaatgcagtggcatgatcatagctcactgccgccttgacctcttgggcttaagctatcctcttgcctcagcctcccaagtagctgggactacaggtgtgcaccaccatgcctggctatttatttctatagagatggggtctcacatgttgcttatgctggtctcaaattcctggcctcaagcaatcctgccttggcctcccaaaatcctgggattatagatatgagtcactgtgtccagtacacttaaaatacgtgtgcacacacacacacacacacatgtgagccatatgtctcaccacttgacatagtttgtgtttaaggtctttctctgccattatcatgctatcttctattttgttcattgctgtgtctccagcacttagaacaatgcctgacacatagtaggtgctcaataaatatttcttgaatgcaaatacactcaataaactaggaatgaaggaaaagttaaccaactgataaaggtcatctgcaaaaccccccacagctaacatcatacttagtggtgaaagactgaaaactttcatcctgagtttgaaacaagacaaaagtgcctgttctcaccatttctattcaacattgtactgaaggctctagccagggcaattaggcaagaaaacaaaatagaagggatccagattggaaagaagtaaaactatctctacttgccaataatgtaattttgtgtataaaaaatttcaaggaatccacacacaaaactattggaatttaaaaacaaatttagccaagtggtaggatacaagatcaatatgcaaacatcagttcaatttctatacattggcaatagatactatgaaaatgaaattagaaaaacaattccgaaggcatcaaaaataataaaatacacagaaaaaaatttatcaaaagaagtatcacatacactgaaaattgtaaaacatcattgaaagaaattaaagaagacctaaataaatggaaagatatcctgtactgatgggttggaagacttaatattgttaacatggcaataatccccaaattaatatacagattcaatgaaatgcctatcaaaatcccagctgcctttttgcagaagttgacaagctgattctaaaatttatatagaaatgcaagtgactcagaatagccaaagcaatcgttttattttattttttgagtcagagtctcactctgtcacaaagactggagtacagtggtgcaatctcagctcactgcaatctccacctcccaggctcaagtgattatcctgcctcagcctcccaagtagctgggattacaggcgcacgccattaccgcctggctaatttttgtatttgtagtagagatggggtttcaccatgttggccaggctggtcttgaactcctgacctcagatgatccactcacctcagcttccccaagtgctgagattacagtgtgtgccaccacacctgacctcaaagcaatcttgaaaaagaagatcaaagttagaggaatcacactttgcagtttcaaaacttactacaaagttacagaatgggccgggcgcggtggctcacgcctgtaatcccagcactttgggaggctgaggcgggtggatcatgaggtcaggagatcgagaccatcctggctaacaaggcgaaaccccgtctctactaaaaatacaaaaaattagccgggcgcggtggcgggcgcctgtagtcccagctactcgggaggctgaggcaggagaatggtgtgaacccgggaagcggagcttgcagtgagccgagattgcgccactgcagtccgcagtccggcctgggcgacagagcgagactccgtctcaaaaaaaaaaaaaaaaaaaaaaaaaaaaaaaaaaaaaagttacagaatgaggacagtgtgatattggcataagtatacacatatagacaaatgaaatataattttaatttaataaacccatatgtctatggtcaattgattttcaacagataccaagactattcaacgagggaaataacttcttcaataagtgatattgggacaactggatatcaacatgcaaaagaacgaacttggacccctacctcattctgcattcaaaaattaactcaatggatcaaatacctaaatatgaaacagctaaaagtataatattcttagagtaatatataagcataaatcactaggaccttgttgaattagacaataatttcttatgacaccaaaaatgcaacaacataaatagacaaattggattttatcaaacttaaaaagaacttgtatgtttcaatgaacaccatcaagaaagtgaaaggacaacccaccaaatgagagaaaacacatccacacaaaaacttgtacaccagtattcataccagcaatcatttataatacacaaaagtggaaacaatccaaatattcctcagtagatgaatggataaaatgtggtatattcatacaatggaatactattctgccataacaggaatgaagttctgatacatgctaaaatgtggacgtaccttgaaaacattatgctaaattaaagaagtcagacactaaaggccacatattgtatggttccttttacatgaaatgttcagaacaggcaaatctagagaagcagaaagtagattagtggttatcaagggctggggttggaggcattggggagtgattggtaatgatatgggatttcttttgggaatgaatgaaaatattctaaaattggtatttatgtaattttatgaatatgttaaaaaccactgaattgtatactttaagagagtgaattttatgttatatctcaataaagctgtgataaaacaacccattctacacaaaacaaaatatttgataagtgaatgaatggatctcttcacattatatgtacttgaaagtgtatctcagagtttgtttcatgtcagtacttattattagtgtacaatgtttattttaaaagcgcattgatggatatttaagttgtttccaatcttttgctattgcaggcaatagttcgtcgaatagccttatattcaggtcattccacaaaagtgtgggtatttgtaagatgaattcctgcaagtggaattgctaggtcaaagggtgtgtacattttaaagcatgaactgatgttgccaaattgctgagcataaaggtgtacctgtgtaccctcctaccagccgtgtaccagtgagcttgtttcgccacagcttcattcacacagtgaggaatccaaccactgatctctgccaatctgatcagtaatccgcggtatctcattttcatctaaatttgcatttctctcagagagaggttggatggatcatttgcattccttgtattcttggaagctctgcagctgcattagtgttgaggggtgcagagcagtgtgggaaagtaggatcagggctctcccctcagggactcctcccagaacctccagaataggttgtgagtgacaatgtgaaacagctttgccatcattcatcacgaatgtctgctgggcgtcttctctgtgtgggatgctgttccaggttcacaaaagagtgaagagagctgattaatcaggagggctctctcagtgctttaaaagtccttcagcattagaagtgcagtccttccactgctcatgcctacacttggattaagaggcacatatcaagaggcacaagtcagtggcctgatgttacgtctgcatgcattagatgacattggttgggcttacacaaaccagattcaggtaaaattttagtatttattttgtgttttctttcaggaactgtctatcttgaccatgcaggtgccaccttgttctcccagagccagctcgaaagcttcactagtgatctcatggaaaacacttatggtaaagaaaaacacctgaaacaggttttagtcaactacatgcagctgatatacctgtgcatgttaaacgctggattaataggccaggaatattctgaccacaaaaagctgaataagccccatgtaagataggggccaggcaagcaccctgggtcattctgtactgtaaacatgtggccgggatggagggagctggctcagggacagacacacaggttactaccagaagaagaggccagtgttaggaagggcacagagattcaaaggtgctgtatttggtggtggtgagtgaccctgtatagtgcagagagtggggcagcaggagggatgttaattcagtcattcactctataactgttcattgagccactatgatgtgtgggggacagtgctataatgggaacaaaataaacatatccctttcttcttggacactgtgatctagtcctggaagacaagaccttaagtgaactccaaatagatgtgattaccaactgtgtgaaggactatggacaaaaggtgcctggttccaggccagcctgtatctgcagtgacagtggggttggcttgtgcatgtctagggaaagcttcctttggagtggagtggatgctggaggatgagccagaattcactcagacaagagggggagaagtgcgagcaggcagggtaacagcctgagccaagatcccatagtggtttcaggaaccagtccaggaacacggaagggagaagagtgggagaggtctgaatggggagggagggagaagaagccagtgcagggcattgtagatgcttgatctttgttctaggagcaatggcattgtcatcagtggcatttatttgcagcacaacatgatctcacatactttggaaagggaacttgaaatcatagtggcagtagcaattgtaatatttgtgatgagaataacgataagtaacatttatcaggtactcgctatgagctttctctcttcagcctcacaacaacccaagaggcataggttctggtatcactcctgttttataggtgaagaaatggggccccagagagggcaagtaactagcctgaggctgcacaggaaggactggagcttggaggagctagaagctgtgtttgcaggcagtttagctccagagcccaagcccttagcctccaccagagtgcctcgattcaggatacttctgttatgccacattaaggggtttggattttggctctgggcagccagcagatatttaaatctggggaacagtcttctgggaaggtgccaaggagggatttatcctgattttaatctgcagtttgcaaaggttcttgtaattctccttctttaacctttgcaagagccataaccgtgggaaagcctgagagatggcagagttgagattgcaggtggtggtaatgatgcagcgctaaagccaagcagaggaaaggcaatgaggataattaccaggtcccacaggttactagcaatgtggaaacagaacatatggtagctgcagtggccagaaatccagtgcaatctttcagtgtattttggaggaaaaaaaaagtctaaaactaaagggcaaattctgcgttaatgagcacatgtagctcctgagaaatgctggtgcctggtcttataggtcaggccctaccaaagcctgtctgggggttaagtttgagggaggtcatgatactctgggacacatttggtgaggacaccaggaagggagcaaaactagaagttaagaggaagagtgacattgggaggagggccttcctccttgaaagtggatggctaagggcagcacagtggcccccttcacatatttggaggccgggatcaattatttctgcaggaaaggcatcagcagtggtggtgggatctgcagggcaatacgtggggacttagattaagtggcgttcatggctctgcttcatgcttggagaaaagggcatcctcctgaggctgtatactgcattctctggagttaaacagagccacagccacctgtctggaacatgtagaacagactcttgcactggcctgcttctgagctgacttccagctctaaaatactcttcccgatcacatttggttttactagtgaggagagatttttttttttaactatatcataaaatttaccagctgggtacagtgtctcaggcctataatcccagtgctttggtaggtcaaggtaggaggattgcttgagcccaggagttcaagacaaccctgggcaacatagcaagagcctatctttacaaaaaacaaaaattttaaaaaatcagccaggtgtggtggcacatgcctgttgtgctagctattcaggaggctgaggcaggaggagcccttgagcccaggaattcaaggttatagtgagctatgatcagccactgtactccagcctgggtgatagagtaagattgtgtctctcttaaaaaaaatctatttcaggtgtccaatgatgattttttagtgattgacctagtgatgcaatcatcactataaatcagttagatgttttcattcccctgaaaagatccttcatgcccattacagctaatccttgttgctgaccttacccccaggcaattgctaatctactactttctgtatctctacaattcttttgctggacatttaatgtaaattgattcatgcattatgtatattcttgtgtctggagtatttcatttatcatgcttttgaagttctttcatggcatagccagtagtttgttcctttttattggcaaataacttccctggctgggcacagtggctcatgcctgcaatcctagcacttggggaggctgaggcaggaagattgcttgaacctaagagttcaagaccagcctgggcagcacagtgagacctcatctctacaaaaagtaattttaaaaagttagccaggtgtagttgtgcacacctgtagtcacagttaggaggctgagatgggaggatcgcttgagcccaggagtttgaggctgcagtgacctatgatcatgccactgccctccatcctgggtgatggagcaagacagaacaaaaaaccaaatcactttttattttatggatgtagcatattttgtttatctgttcacccattgatggacatttatattgtttccagaatttgactttctgaataaagctacgaacattcccatgcaagtctgtatggacataagttttcatttttgagggatagaaatctaggagtggaattgttaggtgatatggtagttttatgttgagctttttgagaaactgagggagtggattcagaaggaacacaaaagaagcgaccctaagtagtgacttggtggccttgtctttgtaacctgccaggtaatcctcacagccagaacatcagcagcaagctcacccatgacactgtggagcaggtgcgctacaggtaagcatcagggacacctgcctgactgggcatacctaggcagacagacttccttcctaggacttgcctgcatcccacaaaagttctgagttggtttcaggaggatcacagttggctaaaaggcaatgcatgtatgttgagaaacatcagagtcagagctcagaaaggcagcggtgagtagatgcagtgtggggcagatgagacacacaggtaggtggctctgaggtgcacacagctgttctgtgtggctccagagactctgcagtgccaaagtgacaggaagtgacccaggatcctaggtcttgttttcagaaagaagaaaagtactatttctctggttttccttttcataagaagttttattaggcaacttgttttcttcctgtcttttttcccttttccccccttttttactagtatttgtatgttaaacagctctctatactttctaaacataacagtatctggcaaataatttccaggttgtccttaaaattattaacacaatttccaatcacacaatttcaagttagttcaaatgtgaaagtgatactgttttgctattagagttgccaaaactaaaagcaatgtaaacaggttgattactacttaaaccttgttatgttagagctgagcagaaagcaccaaggagagaaagtagtatcaactctgattaagtttattgtggattttttgtcatacatatccaattggagatatccagtgatatttgggaggtaagaggattttgccaactggaactcgttcccacggcttccattgccctcgccctaatttcgcagctgtggcaaacctatctatccattaaggtagagatgtcatagttaatagaaataaaacagcctgcaaacattcagtgctggggctgagatccgcgggttgcggggatgctgtgcttcttccagaatcctggcgcacttccacaccaccgcagaagactacactgtgatcttcactgccgggagcacggctgctctcaaactggtggcagaggcctttccatgggtgtcccagggcccagagagcagtgggagtcgcttctgttacctcaccgacagccacacctccgtagtgggtatgcggaacgtgaccatggctataaatgtcatatccaccccggtcaggccagaggacctgtggtctgcagaggaacgtagtgcttcagccagcaacccagactgccagctgccgcatctcttctgctacccagctcagagtaacttttctggagtcagataccccctgtcctggatagaagaggtcaagtctgggcggttgcaccctgtgagcacgcctgggaagtggtttgtgctgctggatgcagcctcctacgtgagcacctcgcctttggacctgtcagctcaccaggccgactttgtccccatctccttctataagatcttcgggtttcctacaggcctgggcgctctgctggtccataatcgtgcggctcctctactgaggaagacctactttggaggagggacagcctctgcgtacctagcaggagaagacttctacatcccgaggcagtcggtagctcagaggtaaccttgccacaggggaggggtcagaggagttcagcaaggtggggtctggcctgtttctcctggaggattatgcaagaggtgggtctggctttgagggtcagcagaattcaggttgctggcagggacaggctgatggcagggctcagatctgggaggcagaagttgactggaggtgacacaggtgttcagtgaactctacccccatttgagaggcttctccagagctgtgagaggactggggcctgcagataagaactgcacacaggagagataaaaggccctcatggggtaaggagggtgagctaccaggcctctgccctcagcactgacaagaggttgcaacagttgaaacagtggccttaaaaggtggcacccagtggctttaaaaggtggcaccatttggaaaaagtctgcccacacattgacagcatagctggttctccaggagctaggatcagctcagcctggcacctagttagcaggaggaatcagttaaagcagaggcccccagacttgtgaggcagtgttagcggcaacctctatgagccccactgtgagtgagttacagagggagtctgggtgcaggttgtcacttgccctcaaatgccagaggcctctgcctgggttgttggcatatgcatcatccccaggctgcaagggcaggtggtgtgggttatgctcaggactctttcaaatggtaacagctgggacctgtaaggtcgagtgtgtcaaggctgaaaatggtggctgatccagggttctgctgggtcaacagtggggacacagggttgggtaggcaactaatcacctccagggtccggagaaggcctggggcatagacgggaagggctttagatccccaacagaccccacacagacgcaagggtcctgcacgtagggccatggccttgacgatagagtcagtgttagctgtgtaagcctcaggctggaccactggggaatgagtccccgctccactgcacaccagcgaggggacatgtgacttgttctctgcacctcatgttttttctgtaaagtagaaatgataatattgggtcgggtgtggtggctcacacctgtaatcccagcactttgggaggccaaggtgggtggatcatgaggtcaggagttcgagaccagcctgcccaacatggtgaaactccgtctctactaaaaacacaaaaattagctgagtgtggtggtgggtgcttgtaatctcagctgctcaagagattgaggcaggagaattgcttgagcccaggaggcagacgttgcaatgagtcaagatcatacccactgcactctagccctggtgacagagcaagactccatctccaaaaaaaaaaaaaaaagaaatgataatattgtccttttagagctaacatgggtgaagtatcagaatggtagggatcaatgttaggaggctatttgatgcctcttttatttaggacttgtccatagttggggggcttctaaaacaggaatgctcatgtaaaacctcttgactccaagtgtgataatttaccatgtaacagaatcaaatgagaaaagaatgacaggcataacataatgtaagttacaggcagaacaaagcgacacctcaaatttaatttggccaataagggcacctgaaggccaggagaagtggggcagctcactgggggccagggcatgaatgggctgggggggatcagacctctttcctttgattcaggtagatgactttacaacagatgacacgccaacattcccagaaagctgaatttatttatttaccattataagccaatttttttcttgtgaacttaggactagaactcaatagatttaatactcaacctaaaggtttattgaataaataccttgactatgttctcaactttattttataactcagcgaagtacatcccttgacagaaacaaaaaacttttattttaagaaatctattaagtatttgatcaataaataattgtcaatcaataactggctagtttaacaaatttttttgtagagatggggtcttgctatctagagatggggtcttgctttttgtagagatggggtgttgcacaggcaggtagtttcaaactcttggcctcaagtgatcctcccacctgggcctcccaaagtgttgagataacaggcatgagccactgcacctggccaccctaggaaatttagagcagcccaagaaaactgcagagtgggtcagggccagaggcagctggacaggtcttggtgtacaaagtgcccccatcctgaaggggagagcaatgttttataagacagcagagggaaggtattaatagattacagcggtattagtccaatttcacactgttataaagatactacccaagactgggtaatttataaacaaaggaggtttaattggctcacagttctgcattgctggagaggcctcaggaaacttacaatcatggcggaaagggaagcaggcactttcttcacaaggcagcaggagagacagagaagagcccaggggaactgccatttataaaaccatcagatctcgtgagaactccctcactatcacgaaatgagaacagcaagggggaaaccatccccataatccaatcacctcctaccaggtccatccctcaacacctggggattacaattagagatgagatttaggtggagacataaagccaaaccacatcaacagctaagcctaaaatctaaagctcattatataccacgaaatgcacatggattgttttgaccacagcttgacctgttctccttaccccgtggttataggtttgaagatggcaccatctcattccttgatgttatcgcgctaaaacatggatttgacaccctagagcgcctcacaggtcagtggacatttctatccctgtggaatttgctcctgttgtgtccttgagggagctctggcacaggtgtgattcaggtaaaggagacagagtctgtggaagtgactggcactccatgtagttaaatttgattcctagtaacttcaaaaccacttcagagagcaagagaatgaggtggggtttttggattgttttttgttttttcagctaaaataacattttaacaggtagaagacattccaaatcaggagattgctagcttcacagaatgagaggagcatccctgggtcctgggaatggttacagatcctgaggcctttacctgctcttgcctttctgggtcctccccactgccccacgggggagctctgcctatgaatgagctgatgctcagagaggttaaacgccttccaggccagggagctggaaaccaggagggcaaggatttaacccaagtcatactgatgcctaaccatgagcacccaaccactgtgtctgccgatggtcttcgcatgaggcatgatttctttcctggccattgctcttttgtcacagtaatgggacccttcagtgccttaaccttagccttagcccaacataggggcagacaggattcacgggaagagagggtcgccctgatggcaatgcagggaggtgagtgggcatgatctgggacaaacggagtagttaataaatacaggcagtgagtagtgagtactttccaaggaaagatattaacagggcccccaaactgcaggtgacagtgtctaacaggtccaggtagctcggaatgcaaaggttgactgtaccagtccacaatatggcaaaccctgatttttttcctatgtcattgttccttttttaaaaaataaaaattgtggtaaactatacataacataaaacttaccattttaactatttttaagtgtacaactcagtcgtagtaaatacattcacaatgtcgtgccaccatcaccactatctatttccagaactttaccataccaaacagaaactctgtacccattaaacaataactctctatttcctcctccccttccaacccttggaactacttttttttctctgtggatttgcctattcttggtaactcatctaagtagaatcatacgacatttgtccttttgtgtctggcttcacttagcacgtttccaagattcattcatgttgaagcatgtattcttcattgctttgtgtagtgttaaaatgatttaaacattaataataaaaacaaacagcaaaaatatgtttagaggaaaaaacatacattttgtgatctgttaccaaagggtctaaatatctaaatgtttaagtaacattatgtataaaaaagaggatgacaggaatgcctatggaaaaattctgttgttcagtactgaagacctaaacatttgtcacaagggcagtaccatccactatttacacacatttaaaattattaatgtgaggtccaggtttgccagttataacaaacttgttttcttaaaagtgagttagtggtgccaggcgtggtggctcatgcctgtaatcccagcactttgggaggctgaggcaggtggattacttgagcccaggagctcaagacaagcctgggcaacatggtgaaactccatctctgcaaaaaatacaaaaattagtcaggcatggtggtgaatgcctgtcgtcccagctacttgggaggctgaggtgagaggatcacctgagcccaggaggttgaggctgcagtgagctgtgatcataccactgcactccagcctgggtgacagagtgagtgagaccgtgtctcaaaaaaaaaaaaaaaaaaaagagtgaattgagaatttacataaagctcatgattctcttgtgtttcatgattgatttgaggtggaatggagaatataaagcagcacaccttcaccttggctcagtatacctacgtggccctgtcctctctccagtaccccaatggagcccctgtggtgcggatttacagcgattctgagttcagcagccctgaggttcagggcccaatcatcaattttaatgtgctggatgacaaagggaacatcattggttactcccaggtgggttttctttccatcctgctgactttattacaactcatcctagttccagacgagagcaatgtagtgtgacaaagtccatgcactgttgaagaggccaccaggccctcagccacatgcctttccaccttcattcaccctcgtttttcagtcctctttactcagccaaaagtggtaactttcaaatgggaagaaagaggccagttcttctgatggcaggtgggaaactgttgggtctttgccatagtagaataagctgttcacttcacttcctggtccactaaaatgtccagagttgcactgagcactcaggcatggtggtaggtggttatcagacggggtgtcacagatggacaacaggaaccaaatgttactcccagagcagcactgtggggaatggattcaatcgttgggtgtttggaagacggtgctggtttttccttgaaagcacatctgcatccccatttttatttatttttttgaggtggggtctcgctctttcacccaggctggcatgcaatggcatgatcttggctcactgcaacctccacctcttgggttcaagcaattctcatgcctcagccttccgagtagctgggattacaggcacacaccaccacacctggctaatttttgtatttttagtagatacggggtttcaccattttggctaggctggtctcaaactcctgacctcaagtgatccacctgtgttggcctcccaaagtgctgggattataggtgtgagccactgtgcctggcccacattttgtttttaacaaagaaaaaaaggtttatttggctcatggttctgttgactggaagattgggcattggtgaacaccttaggttgcttccacctgtggaggaaggcaaatgtgaactggtatgtgcagccagagaggaagcaagagagagggtgagggaggtacctggcactttatttttattttattttttcttccaacttttttttttttttttttttgagatggagtcttgctctgtcacccaggctggagtgcagtggcgtgatctcagctcactgcaacctccacctcttgggttcaagtgattctctcacctcagcctcctaaacagctgggactacggacatgtgccaccatgcctggctagtttttatattttagtagagatggggtttcaccatgttggtcaggctggtcttgaactcctgacctcaggtgatctgcccgcctcagcctcccaaagtgccgggattacagatgtgagccactgtgcccggcgttcttccaacttttattttaggttcaggggatacatgtgcaggcctgttacatgggtacctgaaaggtagtttctcaatcttcccctccccccaccttctaccctcaagtaggccccggtggccgtggttttcttctttgtgtccatgtgtactcaatgtttagctcctaattataagtgggaacatgcagtatttaggtttctgtttctgtgttaattcacttaggataatggcctccagctgcatcatgttgctgcaaaggactggtttcatttttttgtggctgtgtagtatcccagggtgtaaatgtaccacatttctttaaccagtctaccactgatgggcatataggttgattccatgtccttgctgttgagaaaagtgctacaatgaagatatgcatgcatttgcctttatggtaggatgatttatattcctttgggtatataccagtaatttaattaaggaattgggatggctggattcaatggtagctctgtttgtttgtttgagacagtctcactttgttgcccaagctggagtgcagtggagcaatctcagttcactgcaaactccgcctcctgggttcaattgattctcctgcctcagcctctcaagtagttggaattacagatgtgcaccactacgcccggttaatttttgtatttttagtagagacagggtttcaccatgttggtcaggctggtctcaaactcctggcctcatgcgatccacctgcctcagcctcccaaagtgctgggattacaggcataagtcaccatgcttggccaatggtagttctgttttaaattcttttagaaatctccaaactgttttccacagtggctaagctaatttacattcccactagcagtgtataagtgtttttttttatccacaacctcagcagcatatgttaatttttgaccttttaatagccattccaactggtgtgagatggtatctcattgtggttttaatttgcatttctctcatgattaatgatgtcgaacatttttttcatatgctattggctgcatgtatgtcatcttttgataagggtctgttcatgttctttgcccatttttaatggggttctttgttttttgcttattgatttaagttccttatagcttccagatattagacctttattagatgcatagtttgcaaatattttctctcattctgtaggttatctgtttactctgttgatagtttcttttgctgtgccaatgttcattagtttagttaggcttcatttgtcaatttttccttttgttgcaattgcttttggagtcttcatcatgaagtctttgtcaaggcctatgtccagaatgacatttcctacattttcttctaggatttttatagtttcaggttttacatttaagcctgtaatctgtcttgagtttatttttttatgtggtgataggaaagggtcccatttcaatcttctgcatatctatagccagttatcccagcaccatttattgaatagggagtcttttccccattgcttgttattgtctactttgtcaaagatctgagggttgtaggtgtgcggctttatttctgggttctctaaccttttccgttgaatttatgtgtctgtttttgtactagaaccatgctgttttgattactgtagccttgtagtatagtttgatgtcatgtagtgtgatgccttcagctttattctttttgcttaggattgctttggctatttgggctcttttttggttccatatgaattttagaatagtttttttttctaattccatgagaaatgacattggtagtttgataggaataacattgactctgtaaattgctttgggcagtgtgaacatcttaacaatactgattgttcctatccatgagtatggaatgtttttccatttgtttgtgtggtgtgtgatttcttttagcggtattctgtaattctcattgtagatatcccccctggtaaggtggattcctaggtattttattatttttgtggctattgtaaatgggattgcattcttgatttggctttcagcttggtcattattagtgtataaaaatgctactgattttcatgcattgattttgtatcctgaaactttactgaagttgtttattagttctaggagcctttgggcagagattatgggattttccgggtatagaatcatgttatcagtgaagagagataggttgacttcttctcttcctatttggatgtcttttatttgtttctcttgcctaattgctgtggctaggacttccagtattatgttgaaaaggagtggtgagagaggtcatccttatcttgtgccagttttcaagggaagggcttgcagcttttgcccattcagtatgatgttgggtgtagttttgtcatagatgggtcttgttattttgatgtatgttccttggattcctagtttgttgggagtttttaacagaagggatgctgaattttgttataagccttttctgtgtctattgagatgatcatgtggtttttgtttttagttctgtttatgtaataaatcacatatattgatttgtgtacgttgaaccagctttgcatcccaggaataaagcctacttgattatggtggattaactttctcttcttcttttttttttttctttcttggagacaaggtttcactctgttgcccagactggagttcagtggcatgatcttggttcactgcagccttgacctccctggcttaagtgatcctcccacctcagcttcccgagtagctgggactacaggaacatgccaccatgcccagctaatttattttaatagttttttattgtacaggtggtttttggttacatggataagttctttggtgatggtttctgagattttggtgcatccgtcacttaagcagtgtacacattgtacccaatatgtagccttttatccctccccaatcccacccttcccccctgagtccccaaagtccattatatcattcttatgcctttgcatcctcatactttagctcccacttataagtgagaacatatgatatttgattttccattcctgagttatttcacttagaataatggcctccagctccattcaagttgctgcaaaggccattgttttgtttcgttttatggctgagtagtattccatgttgtgtatataccacattttctttatccactcattggttgatgggcattgaggttggttccatatttttgcaattgtgaattgtgctgctataaacatgtgtgcgtgtgtcttttccacataatgacgttttctttgggtagatacccagtagtgacacctggctaattttttggcattttttgtagagacagggttttgtcatgttgcccaggctggtcttgaacacctgagctcaattaatctgcccaccttggcctcccaaggtgctgcgattacaggtgtgcaccactgtacccggctggattagctctttaatgtgctgctggattctatttattagtattttgttgaggatttttgtgtctatgttcatcataggtattggcctgaagttttctttcttcattgtatctctgccatgttgtggtattaaaatgatgctgtccttatagaatgagttagggagtcaatccacatttgttaaaccctagatttcccaaacaaaattcatttcccaaggaatctttttctccacttttctgagtagccataaactttctaaagaatactattgggcaatattcttctgggggagatgtcggtcctcactggtgttcagggcagacactgtacagccacaggtggtctcttgagtatggcagctgtgcagaccccttgcccccactgccctcagctgtcagtactggcagaaccagccctgacactactaagaagcacaatattttaaatgcttttggaggggacaaggtggaaaatgcatcagaggcaaaaggtttgccttcttaaatatgttattctaggtcattggtaacataagttttattcttgaatcaaaagtaaatgtgcctgggtgcggtggctcacacctgtaatcctagcactttgggaggccgaggttggtggaccacctgaggtcaggagttggagactatcctggccaacatggcgaaaccctgtctctactaaaaatacaaaaattagctgggcgtggtggcacacacctgtaaccccagctactcagaaggctgaggcaggagaatcacttgaacccgagaggtggaagttgccatgagctgagattgtaccactgcactccagcctgggtgacagagcaagactctgtctcaaaaaaaaaaaaaaaaaaaaaaaaaaaaaagtaactgtgtgtgctgtggcagtggcatgggattggtagtggagaagaagcctccaagaagaagaatcaccagggtgtgaggctgcctgtgtgggtgtctggggactctcattccccagggctagacacaggatgagtttctccctctgtgccttggtagaggaagctcattgtgtgaatggattctgtggctaaggcatgactaactgtgccagttcaagaaagtgcagttacggttttttcaggttcagggaacttcacgatatgggaatttccacagggattttggtggccttcggaaacatcagctgggtttggctgtctctttttcatcaggggatgtgtaaagaatttagcttcctatgagaaggctttgtgttcttgttttggtatatccaggcttctaattttattctcccactgttggaagtcactgcatggtgattaagagcagggactcagagtctgtctgcctcttgccagctctgtgaacttgggcaagttaagttctccaagactctgtgaaatggggataaaaatataccctgattatagtgttgatatgaggattaaatgagacacaatatatacatcccttagcacaggacccagaagaaagtaagtgctcaatgaatgttgggcacaaaggctcccgggctgggagcctccagggcattgtggctgggcctgtttctcagtcctccctgaatgctgtgctcatcctgccatagaaaacaacctccttcacctggctgggcacagtctgggcctgtgtgggattccccagggctgagggcaagaagagactgatgcataaaagggaaattaggacaaagggtaagtgtggctgcaacagcatcttctgctcacatcctctcctgccatgagactttgacactcctccatggagggctggggatctgtgggtcttcccctagaatctgggctgatctgtgactcgctcatagctaacagagtgccgggaggatgacactgcatggcttctaaggctagatcagaagagatgatgccctattggctttgttccctgggacactagctttggagcctggagttacgctgtcagctactgtctcgagccctgaggctgctgtgtgtgctgcaaggatgccaagccacatggagacgccaagctcaggactgtggctggcggtcctaattctgaagcccttccagcctgtggaccagaaagacccaggagtaaaggagtctccagatgatcccaacccccagatgccaaactactcccagactttgagtcttcctagctgagactccagacattttgagacagacaggagacatctcctccatgccctgtttaaattcttcccacactgtagccatgagctgcataaaatggttgttgttttattctccctagtttgggtggcctacttcacagcaaaagtaactggaatggtgaatatgggggagtgggtgaggggcagccacggggactctaattcagcctggtgggagctggacgggggtcgggggtctccctagtagttgccttgtgacgggaaacctgacctggagatggagttggccaggcccagtagagctgccaggactcaccttagagctgggaaactcctgaattcactagcaggtctgcatgccagtgggccattagccaagggtgaaggaacagaattgttcatctgaagcccctcagttcaacccagagaatggcttcttctcacacaccagaggagatggccaaagtgaagactgccgtggtcttgataagggtctgtgggaggcatcgttgcccagccaagatccctggctgaccacacggtgacctctggccaccccacatgtgacttcccagggagaaaaattcaaaggctcactcagctgagcaagatgtgtttattttcctgaatgcagttcagtgactcctcctcctgaattcagcctgagcccccagggtgaggactcttactgggcccccaggcccttggggaatggagtacttgattcacagcctggaggaactggagcaaacatcccaggggctcatgtgaatgagaaccacctcccagagccttcagagggcaggaaagagctttgggaacttctggactgaaaagcaattctgtgattaaaccgaaagttggagaaagtaggaaaagcaaatcaattatactcagcatggacacagtaacacttggagtccaggctgcgagctgaggcggggctgctcggaataacacttcgcggggcctgctctgtggtccaaccctgtgcagctgatgccaagaagccactgtctccagccccactgaaacattttatacaacgtttaacctgtgataaatcattttagaggacaattccaggcttgtatcatcattttattattaggaaagagaggtccaaatcctgatctgaatctctcagagtaaaactgcacgttggtaatggctcattccatgttacattaaatccgcaggtggacaaaatggccagtctttacaacatccacctgcgaactggctgcttctgtaacactggggcctgccagaggcacctgggcataagcaacgagatggtcaggaagcattttcaggttggtacagggctctgcgatccagacgctggtcagcgagacccagcaacacctgttgctgcctgtgtgtctggggtgggggctgctgctgcatactcatttctccacgcctactctgtgcatgtacaaaggaaaaggaatacaaatggaaaatgcttcaagaaggccgggtgcggtggctcacgcctgtaatcccagcactttgggaggccgaggcaggtggatcacctgaggtcaggagttcgagacaagcctggccaacatggtgaaaccctgtctctactaaagatgcaaaaattagccaggcatgatggcatgcgcctgtaatcctagctacttgggaggctgaggcaggagaatcgtttgagcccaggaggcagaggttgcagtgagccgagatcgcaccattgcactccagtgcctgggtgacagagcaagactccatccccctccaaccaaagaaaaaaaaaaagaagaagccgggcacggtggctcatgcctgtaatcacagcactttgggaggccgaggtgggcgagtcacctgaggtcaggagttcatgaccagcctgaccaacatggagaaaccctctctctactgaaaatataaaattatccaggtgtggtggtgcatgcctgtaatcctagctagtcaggaggctgaggcaggagaactgcttgaacccgggaggtcgaggttgtggtggtgagctgagattctgccattgcactccagcctgggcaaaaagagcaaaactcagtctcaaaaaaaaaaaaaaaaaagaaaagaaaaaaaagaaaatgcttcaagatattatctctatagcagactttcagattcattttttactttgaggccaaccatttaaaggcaagggaggggtgttaacaagggatgtgtgaggatgtgcccttacctggttcagccctcctgaggtacggcctccaagctagagttagctgacatctgggttgggtgcggtgtggaactcttctagggctccagggattctgcgtctcccagaatccccaccctccctgtctcttccctgggctgaggtttttcacttcagggtatagcctgttttgaaccatttcattaggaataatttgagtggcaaagagtgtttattgatttgagtttctaatttgattttcctttggttgctgtgaaatactgtatatactagatctcaactaaccatgaactgagttttgtttaaaaagaaagagggataggacagaaggagagggaggagataggagagagggaggagaagaaatagagagggagagggaggctcagaacacaaacacagctccagatagaatatttggtcctatggaacgctgtggctccatttgttcgggtgtctgacccggatccagcaccaaggtttgtccaggactgctccatgcactgtgctgacctgtgaccaacaccaggcagccgggctcggagactgagattctcctgcctttcttccccatctccctgcaggggcactcaagctgaccttggccttcacagtggcccggggctggtcatttgcaggggcagcatctctgcctttccctgttgtcaaggggcagctctcagggatgcaggcctcccctcagtaatgagaggctaacgagagtgaccagtgatgtttctcccatctcagccccgggtagaccttgaggttgaccccttggtgcttctgaaaccttagtctgtgttttgacacctctgtgagccagccctgtgcctggctctaggtaaatgctttccatgaagtatttctattaaacttttaatggccccttgagattgatattggtcccaatttacagttgagcaaaatgagatccagaaagtggtcccctgcaggtagagagctgaactatgtcccagacgcacagcacatattaatgttgcagttctgttttcctgggttaattttaaaattaacaaaatttattttgccgaactgtttccagtgtctctatgagaaaggggtcactctggctgatgcacttccctcttatcctaggctggtcatgtctgtggggacaatatggacctcatagatgggcagcccacaggatctgtgaggatttcatttggatacatgtcgacgctggatgatgtccaggcctttcttaggttcatcatagacactcgcctgcactcatcaggggactggcctgtccctcaggcccatgctgacaccggggagactggagccccatcagcagacagccaggctgatgttatacctgctgtcatgggcagacgtagcctctcgcctcaggaagatgccctcacaggctccagggtttggaacaactcgtctactgtgaatgctgtgcctgtggccccacctgtgtgtgatgtcgccagaacccagccgactccttcagagaaagctgcaggagtcctggagggggcccttgggccacatgttgtcactaacctttatctctatccaatcaaatcctgtgctgcatttgaggtaaggaatttcacagcagcacagaaagtcttctctttgtttactctctctattttttgataaagtgaagaaaagcatgaaaaaaatcaaaatcattcatcagagtgttgtggtgagaaaagccattctcactctccctttcttggtctgtgctgacttttgaacatgactgctcacggggactcctgagaggaccctgtttctgagtggtgaatgtgtcattactcttattaattatagctgtaactttcactgaatgtgtgtgctggctgtgtgctgaagcattgtatgtgtttatttgtttcatttgatccttaaaatggtgaaatatgaggtagatagtaatattatccctattttatagatatggagcctgagggttttgaggttaagcactttgcccaggtgacctgaagatatgtcaaaaggacacaagagccagcttgaaggagctcccgttggccaagtctttggcaatatgtacatcaaaataagtactgatagtgatgagtggtgagcatttgagaaacacaggaatccatgagtccagtagaaagtaaaaatgaattagcgaataaatagagaagaagctcaaccctactatagaataccaactaataaatcaatgatagaattttaaaaactaccattttgcaaccatcatgccaataattgatttaggcaatagtcatcaatagatgctaaatctaatgaatgaaaatttgataagtaacaggatatctgcatattctgaaaatatctctccataaaatacttattaattagtaagtaccgcctacttattgatgaattttacaatggagaaacctaatagaccccatgttaaccaagtggcaaaagttgacatcaccaacattgggacaaatgaatggggtgtgtctcctgggatgtacagagaagaacatagcgttggtcctgaggcattcctaccaaaaatgcagaaataataaggaagctcagataatcccaccttaagagacatttagcaaggtagctggactctacttctcaaaaatatcatggttgtgaaagacaagaggagactgaaggagactagagagacgcgacaaatgtatgcaacgtgatattcgatgcagacagcagaggtggaatctgaatggagtctattgattagttgtaatatcaggtcaatggtaattcctaattttgatggttgtactggggttatgtcagagagtgtccttatacttagaatatgtacagtagagtattatggggatgatgagacattattttgcaacttattctcaaatgatttagaaaagtcaacaatcagaattggagtgaaacgtttatgggagctctgtgaactgtaactacttttatttaagcttaaagtatattaaaaatattaaattttaatttttctaaattgtggcatcagtaaataatgttacttttttttgcatctttactactgagggtagctgggctcccttatgtgtgcactgcagggacatctatgactagttctgtggttggaactctgaacctttgcctttgtccacacccttcttcagcagacagctggctcaggaaaagccctcattgaagggacattgcacccatgctatcacttgctggtgctgttaaaacctaacctgtggacaaccgctcctgcaaagggcaggagcaggaagccagcagagacgaaattggactaattctctctgtactcagagaaagcacatccttgctaaaataaaggttcaaagaagaaacgagatgaaaactgaattggtcttgtagcttaggaaataagtggaggggatgtatgaaacttacagaatgtaacccacagctgtttattcccaactaaacccccagatggcttagggaaccaccatgacatcttgtgaggatgctgcagcctttcctcaatgtgggcctctgtttctgaacttgggcccttctcacaattacatgaagctgcttctattgctccacagctgaacttctataccagaacggtcaacccaaagaacatcatctccattagtttaggatctcaccatcttgcaaaagcaggatggggcgacaaggcttggcatctgtggtaggtgaacccagagatatggtggaaggagcagcaggagggagctgctggtgggacggctacacctcttatacaggtcagctgtaggctgggaaactgcacttcagagaccctgatggaaggaaaacaagcaaagttagaaataatcaatgcctcttgttattctgtgatgtcagcttttgatacctatacccacctaactggtggttttaattttttccatcagcagactctgtcaaatttaattttaccttttatggctttttttttttcttttagagaaacacaccaccaggaagaacatttgtaccttatcttccgggtcttcgaaaaagccagcatctttttggggaaacagtttaaaactagtttctcagggagctttcttctgtgctgaaagacttcttacttgctactcactttatccatttattcatttgcttattattattttttcgagatgggatctcactctgtctcccaggctggaatacagtgctgccatcaaagctcactgcagttttgaactcctggtctcaagctatcctcccgcctctgcctcttgagtagctgagactacaggcatacaccaccatgcctggctactttttaattttcattttttttagagacagggtcttgctatgttgatcaggctggtcttgaactccttgcctcaagtgatccccctgcctcaacctcccaaagtgctggcgttacagacataagccactgcgcccagctctactcactttattttattttatttatttatttatttatttatttatttatttatttatttatttttgagatgaagtctcgctctgtcgcccagactggagtgcaatggcacgatcttggctcactgcaagctccgcctcctgggttcaattgattctcctgcctcagcctccagagcagctaggactacaggcgcctgccatcaagcccggctaatttttgtatttttagtagagatggggtttcaccatgtcggccaggatggtcttgaactcctgacctcgtgatctgcccgcctcagtctcccaaagtgctgggattataggaatgagccaccatgcctggctatttattattattattattttattttatttttttttttgacacagagtctcactcttgtcgcccaggctggagtgcaatgacatgatctcggctcactgcaacctccgcttcctaggttcaagcaattctctcagctgattttttgtatttttagtagaaaaatatgtctatactattatgaaatacctggacagacaccactgctaaggaaggatatacaagagcaaaggggtgggcgtggtggctcatgcctgtaatcccagaactttgggaggcaaaggcaggtggatcacttgaggtcaggagtttgagaccagcctggctaacatggtgaaaccctgtctttactaaaaatacaaaacttagccgggcatggtggcaggtgcctgtaatcccagctactcaggaggctgaggcaggagaatagcttaaacccaggaggcagaggttgcaatgggctgagattgcaccactacactccagcctgggcgacagagcaagactccatcttaaaaacaaacaaacaaacaaacaaattaaaaaacagcaaaaaaagagcaatggctggagccagctgggaaaggaggcttgcttttcactgtagactcttgtactctctgaatgtcaggcattacctacttaaaacatggctcgaagtggagaagggtggagtgtggacctggaggctgaatgggagatatccagctcctacatcatcttctttgcactgtcctctctgttttagtttcttctcttcctccctttcttccttccagtgtaggtgctgaattcatgaagtctatctgtgtttgtgtagccactgtacaaataggtgaagaccaactttggggagccctggcctgagacacgtctacctttttgtttaggtgaccaggtggcctgtaggaaaccaagggctgctatatgaccggagctggatggttgtgaatcacaatggtgtttgcctgagtcagaagcaggaaccccggctctgcctgatccagcccttcatcgacttgcggcaaaggatcatggtcatcaaagccaaaggtgggaaaactgcttcattttcacagagcagctcccaacagcagcttttatattcatatgaaatactctaccaagtgttagaataacccatcagcctgggcaatacagtgagacctcatctctacaaaaaaaaaaaaaaaattatcctgggtgtgggagcacgtgcctgtaatctcagctactcaggaggctgaggcacaagaatcacttgaacccgggaggtggaggttgcagtgaatcgagatcatgccattgcattccggcctgggcgacagagcaagaccttgtatcaagggaaaaaatgggtaaaataacctgaaagtaagggaaatagtgtctaggaaacacaacaaagagtttgttccccttgattttgggaaatttcgggagacagaaagatctgacagttcaatcagacggtaaagaggggccaggtgcggtggctcacgcttgtaatcccagcactgcagaggtgggcagatcacttgaggtcaaaagttcgagaccagactggccaacatgacgaaaccccttctctactaaaaatacaaaaagaagctgggcatggtggcacgtgcctgtgatcccagctacttgggtacttgggaggctgaggcaggagtatcgcttgagccccagaggtggaggctgcagtgagcccagatcgcaccactgcactccagcttgggcaacagagggtgatgatgtctcaaaagaaaaaaaaaaaaagtataaactttatattaattagatgatgtcctatttacttaagtttcttttattttcttcactcatcatcatgtatactgcaggctttaattcatccttgttgattttgttatgagtgacatgaatgatcaaaccaatagaaaagtataggcccactctgtttagtagaactttctgtggtgatgaaaatgttcaaactataccttgtccagtttagtggccaccagtcacttgtgactattgaaatgtggctagtgggacactagaactgaattttaaattttacttaattttaattagtttaaatagctacgtgtagctatgctacagtgttggacagcacgggtataaagaataatacacaattacagcattcaattttagcaaatcttaacatttggccacatttcctttaggtcctcctcctcctcttcctttttcttttttagcacacatacgtacatacataaaacattacatagcagttgtggtgctgggttaaaaaaaggtaaaagacattacagatacagcagaaatttcctgtggacctctcctgagtcttactcctcctcctttcccattccactaacttgcagttgtacttttgtgatatataacatttccatatattcacgattgtgtttcttggctgtaagtgttctgttctgttctgttctgttctgttctgttctgttctgttctgttcccgtggtttatttttccttgaaccaagaggccagtgttattactagagttatagaataagtcttgatatcccattgtttttttttttttttgagacagagtttcactcttgttgtccaggctggagtgcaatggcgtgatctcggctcactgcaacctctgcctcctgggttcagcgattcttgtgcttcagcctcccgagtagctgggattacaggcatgcagcaccatgactggctgattttgtatttttagtagagacagggtttctccgtgttggtaaggctggtctcgaactcccgacctcaggtgatctgcccaccttggcatcccaaagtgctgggattacaggcataagccactgcgctggccctattatcccatttgtttaaattgtctgttgtcacatattgcagaatctcttttaagattgagtagtattccattaaatgagtataccatatttactttgttcatctcttaatggacatttagattgtatccatatcttggctattggaaatagagctgcaatgaacattgggagtgctaatatctcttcggtatcctggttgaaattattttggataagtacccagaagtgggatcactggatcatttgatagttttatttttaattttctaagaaatctcaatattgtttttcatattaactgaaaaattttacatacccaccagtggttgcaagggctcaagtttttccacattctcgacaacacttacttactgtcttttgtttgttttcttttgacaatagccatcctgacaggggtagagtgatatctcattttgatttcaatttgcatttccctcattattagtgatgttaaacattttccatatacccattgaccattagtacatcttctttggaggaatacctagaaatacctattcaggtcttgaacccattttttttttttaattttttaatttttttttttttagagacagagcctcgctctgtcgcccaggctggagtacagtggcgcgatcttggctcactgcaagctctgccttccaggttcacgccattctcctgcctcagccttcccagtagctgggactacaggcgcccgccactacgcctggctaatttttgtatttttagtagagacggggtttcaccgtgttagccaggatggtctcgatttcctgaccttgtgatctgcctgcctcggcctcccagagtgctgggattacaggcgtgagccatcgcgcccagccactaacccatttttaaattaggttatttggttttctgtttgtttgtttactgctgagttgtaggagttccttatatatctttgaggttaactactttttcagataaatggtttgaaaatattttctcccattccacaggttgccttttcacttttttaattgttccctttgctgtgcagaagctttttagttggatatagtcccatttgtgtatttttgtttttgttacttgtgctttgggtgtcatattcacaaagttattgccaagaccaatgtcatgaagtttttcccctatgttttctgccaggagctttacattttgggatcttgtgcttaaatctctaatccatttgagttgaagtttttgtatgatgtaagataagggtccaattttattcttttacatgtggatatccagttttcccaacaccatttgttgaaaagactatcttttctccattgtgttttcttgacaccctttccaaagatcatgtaaccatatatgcatggatttatatctggactctctagcctgtttcattagtctgtgtatctgtctttgtgccagtaccatactgctttgattactatagctatagtgatatattttaaaatcaggaattgtgacaactccagctttgttcttctttctcaagattaattagtttatttgtcatcttttgtgggtctatatgaattttaggatcgttctttctatttctgtaaaaaaatgccattgcgattttgatagggattgcattgaatctgcggattgctttgggctctatagacattttaacaatattaattcttctaatccatgaacatggagtgcctttccatttgtttaatttcttgtttgtgtcttatttctttcatcaatgttttgtagttttcagaatgtgagtatttcacctccttagataagtttcttttgttcttttaaaagagatttagggtctcactctgttgcccaaactggaatagagtggcatgatcacaactcactgcagccttgaactcctgggctcaagcaatcctcctgcttcagcctcctgagtagctgggacaacaggcatgtgccaccatgcctggtctagatgagttcatttctaggtattgtactcttttttttgtgctattataagtgggattggtcttcttatttccttttcagagagtttgtttttagtgtatagaaatgcaatagatttttgcatgttgatgtgtatcctgtatcctgcaactttactgaattcatttattagtttaacagttttttaaaatggagtatttagaattttttgaatatataagatcatgttttttgatcaaacaaggacaattttacttcccttttccaatttgaatgtcttttatttctttttcttgcctaattgctctgactagaacttccagtactatgtcaaatagtggaggcaagaatgggcttctttgccttgttcctgatcttaagagaaaaagttttcagtttttcatcatggagtataatgttagttgtaggcttttcatatggcatttattatcttgaggtaacatgttctattcctaggttattaagtttttattatgagagggtgctgaattttgtcaaatgctttttctgtgtccattgagatgaatatgtaattttctcctctattctgttaatgtagtatgtcacattaattgattttcatatgttgaatcatccttacatcccaggaataaagctcactttctcatggtgtatgatccttttaatgtactgttagattaagttttgttgaggatgtttgtgtttatattcgtcagggatattggcctgcagttgtctttgcctgcctttagtatcaagataatgctggcctcataaaatgagtttgggaatgttccctcctcttagtttttaagtagagtttgagaagatttagtattaattcttctttaaatatttgatagcattcagcagtgaagccatttggatgtaggcttttctttgttgagaggtttttgattactgattcaatcttcatactagttgtaggtttgctcaggctttattttgttcatgtttagtttcgatagatagtatgtttctaggaatttattcatttcttctaggttatccagtttgttggcatatagttgtttatagtaatttcttagaatattttatttttgtggcattatttatagtgtctcatttcatttcagattttgagttttcaatttttcttttctttttttttgttttgtttgtttgtttttgagacggagtctcattctgttgccaggctggagtgcagtggcacgatctcggctcactgcaacctccgcctcctgggttcaagtgattctcctgcctcagcctcccgagtagctgggactacaggtgcgcaccaccatgcccagctaatttttgtactttttgtagagagagggtttcaccatgttggccaggatggtctcgatctcttgacctcgtgatctgcctgccttggcctcccaaagtgctgggattacaagcgtgagccactgtgcccggcaagttttctatttttcttagtctagataaaagcttgtcagttctgtttttcaaaaatccaacttagttttgttaatgttttccatttttcaattttatttatttccattgcaatctttgttgtttcattccttgtgctaaatttgggtttactttgttctcctttttctagttccttgtggtgtaaaattaggttgtttgagatctttcttcttttttactgtagacacttactgccatgagcttactatttagtactgcttttgccatatcccataaattttgatattttatgttttcatttgtctttggtattttataatttttaaaattttcttctttgatcaaatggtcatttaagagtgtgttgtttcatttccacatatttgtgaatttttccattttcttgctgctactatttctagtttcatttcattgtggtcagaaacttgatatgatttcaatctttttaaattcattgtctttttttttttttttaagtcttgttttaagacctaacatgatctatcctggagaaagatccgtgtgtgccttagaagaatgtgtattcttctgctgttgggtgaaacgttttatgtatgtttgttaggtccatttggtctacagtatgattcaagtcctcccttgatcttcagtttgcatgttctgtccattattgaatttatttttcttttgctgtctatttctcctttcggttctgtcaatgtttgctttatgtatttaggtgctctgatgttgggtgcatatatatttataattgttatatactcctggtggattgatcattttatcatcataaaatgtccttctttatctcttgtgacagtttttgacttaaagtccattttaatggacataattatagccactcctactctcttttggttaccatttgcatggaatatctttttccatctgtttactttcagtctatgtatatccttaaacctaatgtcagtttcttttaaacagcatacagttgggtttttttttatgtctttttatgcttctttttttttattcagccactctaagtcttttgattggagagtttaatcaaatatatttagagtaattattgataaggatttaatattgccatttggctagttgttttctgttagtcttatagttcttttgtctgtcttttcacctcttgctgtctttgtgttttgttgatattttatattaatgggctttaattcctttgtcttttcctttttgtgtaacttctataggttttttctttttttttttggtgtgtagttatttcgaggcttacataaaatatcttagagttataacggtctattttaagctgacagcaagtttaatcacatacataactctacactttaagctttgctccccatactttacgtatggttgtcaggatttacatctattcatgatgtgtatcttttttttttttttttgagacagggtcttgctctgttgcccaggctggagtacagtggtgtgatcttgactcactgcaaactctgccacctaggctcaagcaatcatcccacctaagcctcctgagtagtcctaagctaagtcctaagctaagtcctaagcagacacatgccaccatgcctggctaatttttgtatttttttttttagagacagggtttcaccatgttgctcaggttggtcttgaactcctgaacttaagcaatccatcctccttggcctcccaaagtgttggaattatgggcatgagccaccacccctggcccatatttgtatcttttaacacatatgtatatattttaagagatgtggtctcactctgttgcccaggctggagtgcagtgacatgatcatagctcattacagttttgaactcctgggttcaagtgatcctcctgccttaccctaccgagtagctgggactactgatatgtgctgccatgcccagctaaattttttttttttttgagatggggtctcgctctgtcacccaggctggagtgcagtggcatgatcccagctcactgcaacctctgcctcctgggttcaagagattcttcttcctcagctttccgggtagctgggataacaagtgcatgccaccacacccagctaatttttgtatttttagtagagatggggtttcaccacgttggccaggctggtcctgaactcctaacctcaggtgatctgcctgtctcggcctcccaaagtatggggattataggtgtgagccactgtgcctggcccatgcccaactaaatttttaaaacttttaaaaagatgagttctctccaatctaggcaataccattcaggacataagtaagggcaaaggtttcatagtgaagacagcaaaagcaattgcaacaaaagcaaaaattgacaaatgggatataattaaactagagagcttctgcacagcaaaaggaatgatcaacagagtaaacagacagcctatagaatgggagaaaatttttgcaaactatgcatctgacaaaggtctaatatccagcatctataaggaacttaaacaaatttacaagaaacaaccccataaaaagtaggcaaagaacatgagcaaacacttttcaaaagaagacatatatgcagccaacaatcatatgaaaaaaagctcaacatcactgatcattagagaaatgcaaatcaaaaccacaatgagatatcatctaacaccagtcagaatgagtattattaaaaagtaaaaaaataacagttgctgatgaggttgtggagaaaaaggaatgcttatacaccgttggtgggactgtaaattagtttagccattgtggaagatagtctggtgattcctcaaacacctaaagacagaaataccatttgacccagtaatcccattactgggtatatacccaaagaaatataaattattctattataaaaacacatgcatgcatacgtacatttgtgacacaattcacaatagcaaggacatggaatcaacttaaatgcccatcaataatagactggataaagaaaatgtggtacatatacaccatggaatactatgcagtcataaaaaagaatgagataatgtctttttcagggacatagatgaagctggaggccattagccttagcaaaccaacataggaacagaaaaccaaataccacatgttctcacttataaatgggagctaaatgatgagaacacatgaacacatagaggggaacaatagacactgagacctacaggagggtggagggtgggaggatggggaggatcaggaaaaataactaatgagtattaggcttaatacctgggtgatgaaataatctgtataacaaacccccataacgcaagtttacctatgtaataaacctgcacttgtaccacggaacttaaaagttgaaaaaaaaaaaaaaaaaagatgagatctcgccatgtttcccaagctggtttcaaactcctggcctcaagaaatccttctgccccagccccctagtagctggaattacaagcattagccattgtggactgcatatattttaacctatttttgtagttattctttaatacttttgtcttttgacttatttttgacatatttttgtagctattttaaatatttttgtcttttgacctttatgctaggattaaaaatgagttacccactaccaatagtaacataatattatttatttgtctacatatttactttatagcaaatttcatgctttcttatgctattgtgttgttgtttagtgtcctatagtttccacttgaggaactttcttttgcattttttataaatcaggtctagtagtgataaattttctcagctttttcttggtatggtattcttgttggcaggtttgtttcttttaatagtttgaatatatcattctactttgtctggcctacaaaatttctgctgaaaaaaatccactgattgtattatgagggttcccttgtatatgacaagtcagttttcccttgcctttttccttccttttgacttttggcaatctgattatatgtgtcttggcgtggattttttcagatttatcttatttggtatctgttgggctttttgaatttggatgtccattttcttcctggatttgggaagttttcagccattctttctttgaataagctttcttttcttttctcactcttttcaaagttttagactcccataatgtatatattggtccacttgatgatgtctcataattcccctaggcttacttcactgttttaaatttttacttctttttgctcctctgactgaattatttccagtgacctgtcttcaagtttgcttatcttttcttttgctgatctagtctgctgttgaacctctcttataataaattttttagttcagttactgtgtccttcacctccatgatttctatctggtacttttaacattttctatttccttgtcgaactattcattttgttcatgcactgttctcttgactttggtgactgtctttatagagttattttaaactctctgtcaggtaaaccatattactctgtttcattagggtcagttgctggaaatttatcttgttcttttgtttggaacatctttgcctgattcttcattttcctcaagtgtctgtgttggtgtctgtgcattacttgtttgtttctttgtttcaagacatcttgctctgtcacccaggctggagtacagtggcacgatctcggcttactgcaacctttgccctgaggtttcaagcgattctcatgcctcagcctcccgagtagctgggtttacagctggtgtgcaccactacaccaggctaatttttttgtatttttagagatgggatttcaccatgttggccaggctggtctcgaactcctgacctcaggtgatccacccaccttggtctcccaaagtgctgggattacagacatgagccactgtgcccagcctgtgtctatgcattagacaaagcaagcaactctcctagtcttcaccgactggcctcataaaagaagacccctaccaatcagattggccagagattcagggggtcactaccaactctttcgtcccttaggataatcaggcaactatgttttctatctgcttatggtgtgatgagcactggggagctcaagatgctacctccattctcttgcgagtggcttcactgtgccaggcccatcagagctctaagactgagaagacagaagccagtcctctagggagctctcttggaaaggttggggtgctagacacacaaaccagccccttctcttccctgagtgaagctgagagtgaggggctctcttcctgattgtatggcactgcactgtgggccaggtgtctgtggagacggtgctggaaatctccctaccagtttcagtgagtctggtttcatgttctggggttcaggagcctgtcaattaggttctgatttccatgtcatcttctaataatgatagttttgtacctttctttttcatttttatttctgttaatttttgtcttactgcatttgttaatctttcctatataatgaggaatggagcactgatggaagacattcttctttattaccaacttgagtggaatgcttctgaagtttcaaaaataagaatgatgtttattgtaggtttttgattgatttattttatcaggctaaagtagttcttttcctattttgccaaaatttttatcatgactaaatttatttcttactgaacgctttttctgtatttgtttatcatattttttcccataagctattaatatgatgtattacattactagattgtctataactgagctatatatttggtatcttaaggaaaaagtacacttggcaatgactttctaatacattgctgggtttggtttgctaatattttagtgatgtttgtgtctgtttttatcagtgagagtgattatagcccattgttattaaattattcttgttcaagttcaagtacccaggatattaacatacattaattattgttattttgaactgttacctatgcatgttacgcattcctttatatatatgatgtgtataacatagaaaaaagactagctttccaactctactgtgacatagtaagttttttgtttgtttgtttgttttgtttgtttgttttttagcaataacgatgattgatgcaggaatccaatttgatgctaactcctagaggctaatgagatttgacactctatgctgatatctttacagaatgagccttcatgcttgtctgtctatttctaaaggattgaaggtagcttagagaacaatgacccacgatgtggatgatccagaagtacagaaatctttcaaaataatttacagagtgtccctggggccttggatgtgatcgcccccattcaggctcttccataaaaaacttgctcagtgcacatactattggtggcactgataatgatgaagaaagtcttcatgttataaaaagatttctaagacccaggcacttccttgatccaaccaaattctagtgtcattaaaattcttttttttgttgttttggtttttttgagacacgttctcactgtgtcacccaggctggagtgcagtgacacaatctcagctcactgcaacctccatctcctgggctcaagcctcaagcgatcctgctacctcagcctccggagtagctgggaccacaggcatgtgccaccacatccagctaatttttgatattttcagtagagatggggttttgccatgttgcccaggctggtctgaaactcctgagctcaagcgatccacctgcctcggcctctgaaattgctgagattccaggtatgagccaccatgcctgaccttaaaattattgtatatttcataataatgagctttgatttacagttattcctttttaattttgaacagatacagtaattgtacatatttatggtgtacaatgtgatactttgatacatgcatacaatatgtaataataaaatcagtgtaatgatcaaatcagtgtaattatatagcatattcatcacctcaaatatttatcatttctttgtgttgaggatgtttaaaatcctcttttctagctattttgaaatatttaataaattattgttaaccatagtcaccctattgtgctacagaatactagaccttattcctcctatatacctgtaattttgtacccattaaccaacctctccctatccccttctttatcctacccgtccctgcttttggtaactactattctactctttacttctatgagatcaacttaaaaaattcccacatatgagtgagaacatgcagtatttgtctttttatgcctggcttattttacttaacataatgtccttcaggctcatccatgttgctgcaaataacataatttccttcttttttatggctgaataatattccattacacacacacacacacacacacacacacacacaccattttctttatccattcattaattgatgaacacttaagttgattccataacttggctactgtgaatagtgctgcaataaaaatgggaatgcagatatatcttaaacatactgattttcctctccttcgttattattattattatcacttcaatagtttttgggaaacaggtggtgtttaggtacatgggtaagttctttaggtgtgatttctgagattttggtgtactcatcacccgagcagtgtacactgcacccagttgataatcttttatctctcaactcccctccacccttttctgcaagtctccagagtccattatgtcattcttatgtctttatatccccatagcttagtttccacttataagagagaacatacaatgtttgttttccattcctgaattacttccctaaaaataatggtctccaactctatccagattgttgcaaatgccattatttagttccttttaatggctgagtagtattccatggtgtttgtgtgtttgtatacccacatcatattttctttatccacgcattggctgatgagcatttaggctggttccatatttttgcaattgtgaattgtgctgctataaacatatgtgcacaagtgtcttttttatataatgacttcttttcctctgggtaaatacccagtagtagggttgctggatcaaattgtggttctacttttagttctttaaggaaactccatattgttttccatagtggttttactagtttacattcccaccagcagtgtaaagtgttcccttttcaccacatctatgccagcatcgattatttttcaatttttaaattatggtcattcttgcaggagtaaggtggtattacattgtggttttgatttgcatttccctgataattagtaatgatgagcattttctcatgtttgttggccatttgtatatcttcttttgaaaaatttccattcatgtccttagcccactttttgatgagattatttggtttttgttgctgatttgtttgagttccttgtagaattctggatattagtccttcgtcagatgcgtggtttgcaaatattctctctcactttgtggattgtctctttacttttctgggtatttcttttgctgtgcagaagctttttaaattaggtcccatctatttatctttgttttagttgcatttacttttgggttcttggtcatgaattctttgcttaccgcaatatctagaagggtttttccaatgttaccttctaggatttttatggtttcatgtcttagatttaagtctttgatccatcttcagttgatttttgtataaggtgagagataaggatccattttcatgtttttacatgtggctggccagttatcccagcaccatttgttgaatagggtgtcctttccccactttgtttttgtttgctttgtcgaagatcagttggctgtaagtatttggctttatttctgggttctttattctgttccattggtctgtgtgcctgctttaataccagtgccatgctgttttggtaacagtagccttgtattatagtttgaagttgggtaatgtgatgccttcagatttttctttttgcttagtcttgctttggctaagtgggctgtttttttgtttccatacggattttaggatcattttttcctagttctgtgaataatgatgacggcattttgatgggaattgcactgaatttgtatatttcttttaacagcatggtcattttcacaatattgattctagccatccatgagcattagtccatttgtattgttgtgttagcctgttttcacactgctataaagaaatacctgagactgggtaatttataaaggaaagaggttcaattgactcacagttttaaatggccggggaagcctcaggaaacttacaattatggtggaaggcaaagggaaatgaggaccttcttcacatggtggcaagagagagaagggcaaaggaggaacttccaaacatttataaaaccatcagatctcataagaacttactcactatcatgcaaacagcatggaggaaactgtccccatgatccaatcacctccctcccttgatatctagggatcacaacttgagatgagatttggatggggatacagagccacaccatattattctgcccctggcccctcccaaatctcatgtcttttaacatttcaaaaccaatcatgccttctcaacagtaccccaaaatcaatttttttaaatttttttattattatactttaagttttagggtacatgtgcacattgtgcaggttagttacatacgtatacatgtgccatgctggtgtgctgcacccactaactcatcatctagcattaggtatatctcccaatgctatccctcccccctccccccacccacaacagtccccagagtgtgatgttccccttcctgtgtccatgtgatctcattgttcaattcccacctatgagtgagaatatgcggtgtttggttttttgttcttgtgatagtttactgagaatgatgatttccaatttcatccatgtccctacaaaggacatgaactcatcattttttatggctgcatagtattccatggtgtatatgtgccacattttcttaatccagtctatcattgttggacatttgggttggttccaagtctttgctattgtgaataatgccgcaataaacatacgtgtgcatgtgtctttatagcagcatgatttatagtcctttgggtatatacccagtaatgggatggctgggtcaaatggtatttctagttctagatcctgaggaatcgccacactgacttccacaatggttgaactagtttacagtcccaacaacagtgtaaaagtgttcctatttctccacatcctctccagcacctgttgtttcctgactttttaatgattgccattctaactggtgtgaggtggtatctcattgtggttttgatttgcatttctctgatggccagtgatggtgagcattttttcatgtgttttttgcctgtataaatgtcttcttttgagacgtgtctgttcatgtccttcgcccactttttgatggggttgtttgtttttttcttgtaaatttgtttgagttcattgtagattctggatattagccctttgtcagatgagtaggttgtgaaaattttctcccattttgtaggttgcctgttcactctgatggtagtttcttttgctgtgcagaagctctttagtttaattagatcccatttgtcaattttggcttttgttgccattgcttttggtggtttagacatgaagtccttgcccatgcctatgtcctgaatggtaatgcctaggttttcttctagggtttttatggttttaggtctaacatttaagtctttaatccatcttgaattgatttttgtataaggtgtaaggaagggatccagtttcagctttctacatatggctagccagttttcccagcaccatttattaaatagagaatcctttccccattgcttgtttttctcaggtttgtcaaagatcagatagttgtagatatgtggcgttatttctgagggctctgttctgttccattgatctatatctctgttttggtaccagtaccatgctgttttggttactgtagccttgtagtatagtttgaagtcaggtagtgtgatgcctccagctttgttcttttggcttaggattgacttggcaatgcgggctcttttttggttccatatgaactttaaagtagttttttccaattctgtgaagaaaggcattggtagcctgatgggggtggcattgaatctgtaaattaccttgggcagtatggccattttcacgatattgattcttcctacccatgagcatggaatgttcttccatttgtttgtatcctcttttatttcgttgagcagtggtttgtagttctccttgaagaggtccttcacatcccttgtaagttggattcctaggtattttattctctttgaagcaattgtgaatgggagttcactcatgatttggctctctgtttttctgttgttggtgtgtaggaatgcttgtgatttttgcacattgattttgtatcctgagactttgctgaagttgcttatgagcttaaggagattttgggctgagacaatggggttttctagatatacaatcatgtcatctgcaaacagggacaatttgacttcctcttttcctaattgaataccctttatttccttctcctgcctaattgccctggccagaacttccaacactatgttgaataggagtggtgagagagggcatccctgtcttgtgccagttttcaaagggaatgcttccagtttttgcccattcagtatgatattggctgtgggtttgtcatagatagctcttattattttgaaatatgtcccatcaatacctaatttattgagagtttttagcatgaaggttgttgaattttgtcaaaggccttttctgcatctattgagataatcatgtggtttttgtctgtggctctgtttatatgctggattacatttattgatttgcatatattgaaccagccttgcatcccagggatgaagcccagttgatcatggtggataagctttttgatgtcctgctggatttggtttgccagtattttattgaggatttttgcatcaatgttcatcaaggatattggtctaaaattctcttctttggttgtgtctctgcctggctttggtatcagaatgatgctggcctcataaaatgagttagggaggattccctctttttctattgattggaatagtttcagaagtaatggtaccagttcctccttgtacctgtggtagaattcggctgtgaatccatctggtcctggactctttttggttggtaagctattgattattgccacaatttcagctcctgttattggtctattcagagattcaacttcttcctggtttagtcttgggagagtgtatgtgtcaaggaatttatccatttcttctagattttctagtttatttgcgtagaggtgtttgtagtattctctgacggtagtttgtatttctgtgggattggtggtgatatccccttttatcattttttattgcgtctatttgattcttctctcttttcttctttattagtcttgctagtggtctatcaattttgttgatcctttcaaaaaaccagctcctggattcattaattttttgaagggttttttgtgtctctatttccttcagttctgctctgattttagttatttcttgccttctgctagcttttgaatgtgtttgctcttgcttttctagttcttttaattgtgatgttagggtgtcaattttggatctttcctgctttctcttgtgggcatttagtgctataaatttccctctacacactgctttgaatgtgtcccagagatgctggtatgttgtgtctttgttctcgttggtttcaaagaacatctttatttctgccttcatttcgttatgtacccagtagtcattcaggagccggttgttcagtttccatgtagttgagcggttttgagtgagattcttaatcctgagttctagtttgattgcactgtggtctgagagatagtttgttataatttctgttcttttacatttgctgaggagtgctttacttccaactatgtggtcaattttggaataggtgtggtgtggtgctgaaaagaatgtatattctgttgatttggggtggagagttctgtagatgtctattaggtccgcttggtgcagagctgagttcaattcctgggtatccttgttgactttctgtctcgttgatctgtctaatgtttacagtggggtgttaaagtctcccattattaatgtgtgggagtctaagtctctttgtaggtcactcaggacttgctttatgaatctgggtgctcctgtattgggtgcatatatatttaggatagttagctcttcttgttgaattgatccctttaccattatgtaatggccttctttgtctcttttgatctttgttggtttaaagtctgttttatcagagactaggattgcaacccctgcctttttttgttttccgtttgcttggtaggtcttcctccatccttttattttgagcctatgtgtgtctctgcatgtgagatgggtttcctgaatacagcacactgatgggtcttgactctttatccaatttgccagtctgtgtcttttaattggagcatttagtccatttacatttaaagttaatagtgttatgtgtgaatttgatcctgtcattatgatgttagctggtgattttgctcgttacttgatgcagtttcttcctagacttgatgatcgttacattttggcatgattttgcagcggctggtaccagtttttcctttccatgtttagcgcttccttcaggagctcttttagggcaggcctggtggtgacaaaatctctcagcatttgcttgtctgtaaagtattttatttctccttcacttatgaagcttagtttggctggatatgaaattctgggttgaaaattcttttctttaagaatgttaaatattggcccccactctcttctggcttgtagggtttctgccaagagatccgctgttagtctgatgggcttccctttgagggtaacccgacctttctctctggctgcccttaaaattttttccttcatttcaactttagtgaatctgacaattatgtgtcttggagttgctcttctcgaggaatatctttgtggcgttctccgtatttcctgaatctgaatgttggcctgccttgctagattggggaaattctcctggataatatcctgcagagtgttttccaacttggttccattctccccatcactttcaggtacaccaatcagacgtagatttggtcttttcacatagtcccatatttcttggaggctttgctcgtttctttttattcttttttctctaaattttccttcttgcttcatttcattcatttcatcttccattgctgatactctttcttccagttgatcacatcagctcctgaggcttctgcattcttcgtgtagttctcgagccttggttttcagctccatcagctcctttaagcacttctctgtattggttattctagttatacattcttctaaatttttttcaaagttttcaacttctttgcctttggtttgaatgtcctcccgtagctcagagtaatttgatcgtctgaagccttcttctctcagctcgtcaaagtcattctccgtccagctttgttccgttgctggtgaggagctgcgttcctttggaggaggagaggcgctctgatttttagagtttccagtttttctgttctgttttttccccatctttgtggttttatctacttttggtctttgatgatggtgatgtacagatgggtttttggtgtggatgtcctttctgtttgttagttttccttctaacagacaggaccctcagctgcaggtctgttggagtaccctgcagtgtgaggtgtcagtgtgcccctgctggggggtgcctcccagttaggctgctcgggggtcaggggtcagggacccacttgaggaggcagtctgcccgttctcagatctccagctgcgtgctgggagaaccactattctcttcaaagctgtcagacagggacatttaagtctgcagaggttactgctgtctttttgtttgtctgtgccctgcccccagaggtggagcctacagaggcaggcaggcctccttgagctgtggtgggctccacccagttcgagcttcccagctgctttgtttacctaagcaagctgggcaatggtgggcgcccctcccccagcctcgctgccgccttgcagtttgatctcagactgctgtgctagcaatcagcgagactccatggggtaggaccctccgagccaggtgcaggatataatctcgtggtgcgccgttttttaagcccatcggaaaagcgcagtattcgggtgggaatgacccgattctccaggtgccgtccgtcacccctttctttgattaggaaagggaactccctgaccccttgtgcttcccgagtgaggcaatgcctcgccctgcttcggctcgcgcacggtgcgtgcacccactgacctgcacccactgtctggcactccctagtgagatgaacccagtacctcagatgaaaatgcagaaatcacccgtcttctgcgtcgctcaggctgggagctgtagaccggagctgttcctattcggccatcttggctcctcccaacaaagtccccagaatcttaactcatttcagcattaactcaaaagtccacagtccaaagtctcatctgagacaaggcaagtcccttccacctaggagcctgtcaaagaaaaaacaagttagttccttccaagatataatggggtacaataattgggtaaatatacccattttaaatgggagaaattggccaaaacaaatggtctgcagtctccttgtaagtctgaaatccagcagggcaggcattaaatcttaaaggttcaaaatgatcttctttgactccatgtctcacatccagatcacactgatgcaagaggtgggctcccatggccttgggcagcttcttcatgggctgaagttgagtgatggggcttttccaggtgcaaagtgtaagctgttggtggatctatcattctggggtctggaggacagtggccctcttctcacagctccactaggcagtgcccctgtggggactctgtggaatctccaatttcacattacccatctgtgctgctctagcagaggttctgcatgagggatccacccctgtgcagacttctgtctggatatccaggcattttcttacatcctctgaaatctaggtggaggttaccaaatctcagttcttgacttttgtgtacccacaggcccaataccacatggaagccaccaaggcttggggcttgcaccttctgaagcaatagcccaagttgtaccttggcccttttagccacagctggattgcgagtggccagaatgcagggcaccaaatcctgaggctacacacagcagtggggccctgagcctgacccgcgaagccatttttttcctcctaggcctccgggccgtgatgagaagggctgctaccaggatctctgacatgccctggagacagttttccccattgctttggcaattaacatttggctcctggttacttatgcaaatttctacagcagcgttgaatttcttttctgtagcacagactgtgaattttccaaactcttatgctctgctaccctccccttttaaatataagttccaatttcagatcatctctctcaagttgaaagttccacagatctctagggcaggggcaaaatgctaccagtctctttgctaaagcatagcaaggtgacctttgatccacttccccacaagttcctcatctctatctgagactaccttagcctggacttcactgtccacatcactatcggcattttggtcaaaaccattcaacaagtctctaggaagttccaaactttctgacatcttcctgtcttcttagccctccaaactgttctaacctctccccattacctagttccaaagtctcttccacattttcaagtatctttgtagccatgccccaaactcctggtaccaatttactgtattagtccattgtcacactgctataaagaaatatctgagactgggtaatttataaaggaagcagtttaattgactcacagttccacatggctggagaggcctcaagaaacttacaatcatggtggaaggtgaaggggaagcaaggacatttttcacatggtggcaggagagagaagggggtaggaggaacttccaaacacttataaaaccatcagatctcatgagaactcactgtcatgagaatatcagagggaaaactgcccctgtgatccaatcaccttcctccctttatgagtggggattacaattcaagatgagatttggatggggacatagagccaaaccatatcagatttgtttccatttgtttgtgtcatctatgatttctttcagcagtgttttattgttttccttgtaggtatcttttcctccttggttaggtatattgctaagtattttaatttttttttgcagctgtggtaaaagggaatgagttcttgatttgattctcagcttggtcactgttggtgtgtagcagtgctactgatttgtgtacgttgattttgtatcctgaaactttactaacttcatttatcagatctgggagctttttggatgagtctttaaggttttttaggtatacagttatatcattggcaaacagggacagtttgacatcctctttaccgatttggatgccctttatttctttctcttgtctgattgctctggctacaactttgctgagggttttaatcataaagcgttgctggattttgttaaatgttttttctgcatctattgagataatcacatgatttttgtttttactcctgtttatgtggcatatcacatttattgacttgtgtaagttaaaccaactctgcatcactggtatgaaacccagttgatcatggtgtcttatctttatgatatgctgttgaatttagttagctaggattttgttgaggatttttgcatctatattcatcagggatatttgtctgtagttttctttttttgttgttatgtcctttcctggttttggtattagggtgatactggctttatagaatgatttagggaggattccctctgtctctgccttttgaaatagtttcagtaggattggtaccagttcttctttgaatgtctgacagaattcagctgtgaatccatctggtcctggactttttttatgttggcagcttttttattaccatttcagtctcgctacttgttattggtctgttcatagtttctatttcttcctggtttaatctaggagggttgtatatttccaggaatttatccatcttctctaggttttctagtttgtgtgcataaaggtgttcatagttgccttgaatgatcttttgtatttctgtggtttcaattgtaatattgcccatttcatttctaattgatcttatttgaatcttctctcttcttttcttggttaatcacactaatgatctattggttttgtttattttttcaaagaaccagctttttgttctatttatcttttgtgttgttttttgtttgtttcaatttcatttagtgttactctgatctttgttatttctttttttttctgtttggtttgggtttgattttttctttattctctagttttttgaggtgtgaccttagattatttatttgtgctctttcagactttttgatgtaggcatttactgctatgaactttccttttagcagtacttttgctgtatcccacaggttgtgattggttgtgtcactgttatcattcagttcaaagaattttttaaattccatcttgatttcattgttgacccaaggatcagtcaggagcagattatttaatttccatgtctttgtatagtttcgagagttctttttggagttaatttccaattttgttccactgtggtctgaaagggtacttgatctaatttcaattttcttaaatgtattgagacttgttttatggccatgatatggttcatcttggagaatattacatgtgccagttaaaagaatgtatactctgcagttgttgggtagaattttcataaatatctgttaagtccatttgttttagggtatagtttaagtccattgattctttgttgacctgtcttgatgacctgtctaatgctgtcagtggagtattgaagtctcccactattattgtgttgtcatgtatctcatttcttaggtctagtagcaattgttttataaatttgagaactccaattccggtgttaggtgtatatagatttagaattgggacactttcctgttggactgttctttttattattatataatattcctctttgtctttttaaactgttgttgctttaaagtttgttttgtctgctataagaatagctactcctgctcacttttggtttccattttcatggaatatctttttccacccctttcatcaagtttatatgagtccttgtgtgttaggtgagtctcttgaagacagtagatacttggttggtggatttttatccattctgccattctgcctcttttaagtggaacatttaggccatttacattcaaacattactattgagatatgaggtactgttctattcatcatgctagttgttgcctgaataccttttttttattgtgttattgttttataagctgtgtgagctttatgctttaaggaagttctatttttggtgtatttcaaagttttgttttaagatttaggacttcttttaccattttttttgtagtgctggattgtagtcacaaattttgtcagcatttctttttctaaaaacgactttatctttccttcatttatgaagctttgtttcactggatgcaaaattcttggctgataattattttgtttaaggaggctgaagataggaccccaatcccttctgacttgcaaggtttctgctgagaaatctgctgttaatctgttaggttttccttttgggttactgatgcttttgcctcacagctctttagattctttccttcatcttgactttagctaacctgatgactatgtgcctaggtaataatccttttgctatgaatttcccaggtgttctttaagctttttatatgtggatgtctagatctctagtgagatcagagaagttttccttgattattccctcaaataagttttccaaagttttagatttctcttcttcctcagggacaccaattattcttatgtttggtcatttaaaataatccaaaatttcatggagactttgttcattttttaaaattcttttttatttgtcttttggattgggttaatttgaaagcgttgtctttgggctctgaagttctttcttctactttttcaatactattgctgaaactttcctgtgtattttgcatttctctaagtgtgtctttcatttccagaagttgtgatcatcttttctttatgatatctatttctctggagactttttcatccatatcctgtatttttttaaatttctttaaattagttttcacttttctctggtgcctccttaagtagcttaatagtcaaccttctgaattctttttctggcaattcagagatttcctcttggtttagatccattgctggagagctagagtgatcttttgatggtgttatagaaccttgttttatcatattaccagaatgacttttctggttacttcttgtttggggagactgtttctgtgggaagatatgggactcaagggctgctattcacattcttttgtcccaggggtgctcccttgatgtggtgctctcccccttcctctaaggatacggcttctaaaaagccagactgcagtgattgttattgcctttctggttctagccatttagcaggattctggggctccagggtggtgctaagaactgtctgcaaagagtcctgtgatgtgattcatcttcacgtcttccagctatggataccagcacctgctctagtgaaggtggcggggagtaaagtggactctgttgggagtccttggttgtagttttgttttagtgtgctggttttagtccttggttgtagttttgtttagtgcggtggttttctcaaatgctggttatgctagcagtgaagttgtcacatggacagactcaggacctctggttaaccagggtgttgcaggtggtgaaattagctgttgttttctccttctttggagcagagttgttctcttatgagttgctgtaatggcttgagttgattggcctccagccagaaggtgctgctttcaagagagcaccagctgcagcagtagaagggggatataattttgccctgccttggctaggataggtacttggcttcctcaggtaatgaacagggccatagagctcccaagagaccatgtcatttgtctttggctatcagggcaagtagagagaaaccatcaggtgggggcaggttaggtgggtctgagatcatactctccttgggcaggacttgctgtggccactctgggggtggggggctggttcttgggcaaatggagttatgttcccaggggaattatggctgtttctgctgtgtcaaataggtctccagagacatgggggaaagctggcattgaaagacctcacccagctcccacacagccagcaaggccagtctcactcccactgtgcctccccagcagcactgaggtttctgtacaggcatctggtaagcagggctgagatcttgccccaggctacaagcctcctgctgagaaagcaagcagggctctcaggccttgctcctccctgcctgccaggacagttggctgcagcttctacgcttgtatctttacttcccatttgtctcctcttctgcattctacttaggaaagtttgtgctcagttaaaatcattacaaagtcaagctaggagcttccttcaccctgtggcccctctccaattccactggctgccttcccttccccaagaacccctgtgagataagtccaggaatggctttcctggggttcaagctggagaccaggagtccctacagggctcttcctgctgctgcttctacttttatattttgcttggctgcctaaatccatttcagctctaggtaagggtaaatctttcccttgtcatctggattttcaggttccccaatggggatgtgtgttcggagaccaacttctcaccttctcacactttgggaactcaaatttttggccatcttgtgtttgcagcagcaagctgcttctttcaaagtgtctgtgaattctatcagttttcctgatatgttcctgcagcggttcatgcagcaaaagttcacagtgtgagtctctacatgctgttctgtctgtctaactgggagctgtacattagtcctgtctcctatccactgttctttttttcctctgattttcctttcctttggataaatacccagaagtgggattgctggatcatacggtatttttatttttagttttctgaagaacctcagtagtgttttccatgatggctgtactaattcacattcctaccaacagtgtgtcagagttcccctttctctgcatcctcaccagcatttgttattttttgtcattctggtaatagccattctaactggggtaagatctcattgtggttttggtttgcattcccctgatgattagtgatgttgaacattaaaaaaaaattgattagccatttgcatgtcttctttcaagaaatatctattcagattatttgctcatttaaaaaaattgaattacttgttttttttcactgttgagttgttgatttcctatttggttattaatcccttgctggatggatgctttgcaaacatttcctctcattctgttggttgtctcttcattctgttgtttcccttgttgtgcagaagctttttagtttgctataattctgtttctctattttggcttttgaggctgatgcttttgaggtctcatccaaaaattgtttgcccagaccaatgtcttgaagcagttccccaatgttttcttctagtagtttaataatttggggtcttagatttaaatctctaatccattttgagttgatttgtgtatatggtgaaaaataggggtctagttttcttcttctgcatatggttatctagttttcccagcatcatttattgaagagaactcttcttgctccaatgtttgttcttgacacctttgtcagaaatcacctgactgtaaatgtgtggatttatattttggttctgtatcctgtcacattggtctatgtgtctatttttatgtcagtaccatgctgttttggttactacagctttgtagtatattttgaagtcaagtagctgttgtttttacataatgataaatttgtttttaacctttgttcattagggatggagcctatagaggtgcctcttgaggaaaatagtgaacggactcagattcgccaaagcagggtctgtgctgacaggtgagactctgaagcacgtgaaaatctcagctttattgacaggctggcacagagggggaagagggtaatgccctatgcaatctatcctttgctacccttcagtccagttgctgtccatttctcccttgcatgcttctctctaaccacactcttggctctttggtcttcaaacctcccaagcatgctcccttctcaggtctttgcacttgctgttccctctgcctggtgctcttcccctagttatacctccacagggctgttctctcacctctgtcagtttcatctccaacaggtctctgttcaaaagcccccttctcagagggccacatgactacccacagaaaacaacctctccctcttcatttccccttttgtattcatctcctttgcctttgttgtttccaagttaatatatatctgtttattgatctttagtccctcccactagaatgcccatgttgttcccttcagagcctgggacagtgtcaagaggacagtgtggggtgggaagaaaaggtgacacagaaggaacagtctggagggcactgcaacactccagaggaggcctcatagggagggaaaagacctgatttgcatgttgagaagaccagctggtgcctgtggagcagttggaagggggaaggggtgcaagcaggaaggccacataagcacctgtgttagcaacacaggtgagacaagatggaggcttggaccagggtcagagagaaagtcaggaagctgcaggtatgtattctggaaatagaataacctgaactagctgatgattggataaggaagctgagggtgaggggggttatcaagacatctctcaggtttctaaaacctagctttcaggtgataactcacagattatatacccatattatgggttattatctaatctggtttgctgatgataaatcatctactgaattctaggaaatgtaaagtggggttgaatgtaatagcattgctattttgtttattgattgtacatgtttctaagtctttttattgaataaatcaaatgtctgcatcccttgttatctaatcttatctgtacctgaatacatgtggaatagcaaattttccaatcttgggaaatttatcctatcttaagccccaaccaattcccctttcacccccgcccatatactaaaacagttaactatataacacttcactaaagatttatgtataataaaaaaccttcagagtgctgattgcctaccagttaacacaatgcactcattagtgggtaggtctgtgctcagtagatggtgatactgcatggtatcaaaccatattgcacgtctttgtgcactgccctgaacatatgctgtcatgcaaggcaggaaatggtatgttaaatgctaaagctacatccaagttggaccccagtcgttagtgctctgggtgataggcagaggatcactctgggagtgtgaagggctatacccccaggaaagcacaaaggtgatgatgtgatgattgtgcttgacacagtggagaatcctgggccctggtcccaggatgccttggaggctaaagagtgaagcacactctacatcttcttaccagtacttgcaccaatgtcaccaacttacacattcatttagcacattttcagtcagaacaatacattttggataaacaaaattctagaggattcttgagttttcaaacaccagattggtaaatgcagtacttatatctgtaactcacaggcacagtgttcattttacaaaccaaacacgtcagtccatgtgagagaagatatttcaatcaggcccatagtgaacaaataggacatatttctgggttcaagggcttctgaaagcaacatatcactctggaagttctcaaattctaagcattctaagctttgtggttctctgtgtcaataattaatagtaaaaaggtctttccaggagaaatgttgaagctttttatttggtctgaaagcttcacataagccccagatggcaggtcgtcctgccttggaaatctccttgcagcatctgtcacttcaggctgccttcagggctcatgcaatgttttgttttattttattttgtaaccaaactttttgcaattcagattattatttaaataaatactatgtaacagttcactctttctctctctcttttgccagagtaagtacttatgattgtggagaaaaaatttcaagctggttgtcaacattttttggccgtccttgtcatttgatcaaacaaagttcaaactctcaaaggaatgcaaagaagaaacatggaaaaggtattacattttgaattggttcgtagagaacaggaaccctggcttacccttgcacacatcaaaacagcccatgaactgcacttacgggtgacttgctgatgtatggaaagcaggggtcatcagcctttagcagaaacctactgcagtagccccaggtcagcaggcgaaatgggctccaggatcttcttaaggaggctgaggagggcataaagccagctgtccagcctctgcccaaacattcagccttagtcctgcatgttcaaaagcataattaatccaattgtattaaataaaaaccctaatagcttgctatgtcctcagattggatctggaagcaaggaaacctggcttgctagtttttagctctatcaccaatcaatggcgtgaccttggtgaatccttgaaccccatggtgcctcaacttctatagacctcagctcctcagactttcaaaagtttccacaatttttcccaccttaagccattgttaggatgaagtgaggcagtagagatgaaagtactttgaaagttaacagtcccaggtgtgcagaaaagatcattttcatgtgtccgctcaaatgtcacctccttagggaagcctggctgactaccctcttcagaacagcaccctgtacctgaatctgcagcaacgtagcaaccttccctgtctcatttttctcagtggcacatttttttcacattcttcttgctatatattttgctcacttattttgttctgttttccttttagtagatgtaagcaatctctatgaggatagggattgttgcctgtttttttcagtgctgtctccccatgcttaaaatagcacctggcacatagttgctcaatacatggctagatgaatgaatgaatgattaccagtttgttcagatattacctggcctagtgatcagttcccagaggaactagtttgtaatccaaatagcatttagagtttgggtgtggtagctcacacctgtaatcccagcactttgggaggctgaggagggaggattggttaagcccaggagttcaagaccagcctgggcaacatggcaagactctatatctgcaaaataagatacaaaaattatgaaaccgtatctcttcaaaaaatacaaaaatgagccaagtatgctggtgcatgcctatagtcccagctacttgggaggctgaggtgggaggatcacttgagcctgggaggtggaggttgcagtgagttgagatcacaccactgtagtccagcctgggtgacaaagcgagactctgtctcaaaaaaaaatttaaaaaattgctaggtgtggtggcatgcacctgtagtcccagctgcttgggagactgagatgggaggatcttttgaacccaggagttcgaggctgcagtgagttatcatcacaccagtgcactccagcctggctgacagcaatattttatgtttcatgtttctaaaacataaataaaccaaatggcatttgaccatatatggactgaaaactgggtctaaggccctgcatagtttaacctacaaatccctgaaagtgtatgctatagagaggagtcaaaggatgtaatgtacttagagtttttaaagttctgatgattttcacgccataagctgttaagaatttgagttgctgtgtgatagaaaaggggaatagatttatactcattttattgaagttagatggtggtggttggggtatggataagcttagagacatgattaaagggagagagaaataggcatttccaggggtagaggcatgaaaggagtaggatttgtcaggacctgtgtaccacccttgtaaattatctggagaagtgagcagcagtgaaatctctaagtgccaattattcatagcacccattgcctacctggggtttactgggtttcaggaggctggctgagatagttaagccttagtcctggtcctttggagtctccgttggtgagatcaattgccagcagatagcaatgctgcaacgtaagagatgtaataaaggtctatgcgaagggcagaatcctctacacctggaatgagtcacagagggcttcagggaggaggtgagtttggagctgcaacttaaaaggagagtaggaggccaggcgcggtggctcacgcctgtagtcccaggactttgggaggccgaggcgggcagatcacgaggtcaggagttcaagaccagcctggccaacatggtgaaaccccatctctactaaaaatacaaaaattagccgggcatggtggcaagtgcctgtaatcccagctacttgggaggctgaggcaggagaattgcttgaacccaggaggcagaggttgcagtgagccaagaccacgccactgcactccagcctggtgatagagcaagactctgtctcaaaaaaaaaaaaaaggagagtacgaatttttcaggcagtcacaggcgggatggttaccagggagcagcatggcagggcttggcattcatgggctcagagaagggtttagagggtcagatgtgagcaggggagtgacgggggatagatggggagaagggttgagtgtgccactgaggagtcagtagtcctttacctgtggctgcggaactcactggaggattctaagccgagaagcttcataacactgcttatgttagaaagtcagccctgacttggcgaggtggctgcatcgagtgggaaactcaggcagtaaaggcacaggtgggaggcagctgggactgtcctggtgggagatggggccttggtggaacaaaggtggtaggtgcagaggaaagaagaaagcctgtcttcctgctccctgcacgatgcagaatcagggagtgtcagcttgtgactgtttacacttagaggacaccccttagggtcccatgttctctggcagtctaagccattggtcttgaaacagtttttttgagttggtataccttagaaggattttttaaaactatattcctcactcatactaaaatttttacgttgtcatctaaattttaaaaatagtttaaacagctacaaaggatgtgatttccagtatattgtaaacattgtcattttaaatttaaacttgtacattgttcttttcaacaaagccagtagaatctcaatactgcagcatttttttaaaccacaacaatttgaatctcgtgagtattcattacaaaatacattatctctgtgtgtgtgtgtgtgtgtgtgtgtgtgtgtgtgtgtgtgtatagagagagagagagcgagagggagagagagagagaacaaactgtcctttaatagtcagttttatttctttccttttcatatatatgtgtgtgtgtatatatatatacacacacacatatatatatgaacgaactgtcttttagtggtcagtcttttatttctttccttttccttctgcaacttgtatttcctttccatgccctcaacagaattttatcttagtgttatatattctgtgcttggaaatctttcattgactactaccctatcatacttctgtgaaattaaaatgtgtatataaattgacatggataaacattttttaaagtttactgtgattgtaagagtttaagtgctaggaaatttcttctgcattgagttcttattttttattttttatttttaatagagatggggtttcgccatgttgcccaggctggtctccaacttttgagttcaagcagtcctctcaccttggcctcccaaagtgctgggactacaggcatgagcctttgcacccagcccataatttttcgtagtacacagttgatcaaagcaacataagtatattataacttttgaaaaataattattaaacgtaagaaaaaaattagcgaaaatgagcctcttaatgaggtggctgggcaccctgccatttgttcctattcccatgaatgactgtcactcatggccagaatagctggtgctcagcctcgggtctcttctgagacgcttaaataaagggctagggaaaggagtttcgttagtgcagtgtcactcaaaccttgcttctgaagtatgtgaccgaagcactggactctaagattgaaatgcctttcatcatctgtctcttgacaacttaattaggtcctgcagttttgtggagagcaaataattggaatccatctgacctacaggaggatcatttgcccaagctttagagacttttattttctcagctcggactccagggttttgaatggggcttttgtcttccactctggagattgttggtccctgagggagtgtgctttaggagaccttggcctttcctctgtgaaagaggaagggtctttgtggacagggctgggattgcacctcccttctctggcagagccgttttagcaaagaggatatatgcaagtggcagatctggagggcagttctctcaaaagtatccgtttgcgtctactctggggtccacacacctgatttggaaacaactcagtaggtcctggtccaggcaaaccttttcttcaatatcttggataatgatagtgatgccgggcctgccaaagggagatgggaactgggtgatagggtgccagctattctgaatacacttaatattttctttcaatagtttcgtcccccttttagtagttttttttttttttttttttagacagttttgcagtttcactcttattgctcagactggagtgcaatagtgtgatctcggctcactgcaaccttcatctcctgagttcaagagatcctcctgcctcagcctcctgagtagctaagattaaaggcaagtggcactgcgcccagctaattttgtatttttactagagatggggtttctccatgttggtcaggctggtcttgaactcccgacctcaggtgatcctcctgcctcggcctcccaaagtgctgggattacaggagtgagccaccgcgcctagccctcccttttagtagtttttaaacatctactatctatttctaaactcaatatctggcacttgcccaagggcaaacagcttttccctgattagattcagaagctcttcctgggccttttgccctcaccagggctctctgccttgctccgtcctatccagggaaaggatgcgcctgctgtcatccctcctcctcgaagtcttgcctccaagtctaatttgctggaacaatttcatctcagcatttttcattttatttttttaattttctaaatttttttgagacagagtgttgctgtgtcacccaggctagagtgcagtggtgtgatctcggctcactgcaacctctgcctcatgggttcaagtgattctcctgcctcagcctcctgggtagcagggattacaggtgtgtactaccacacctggctaatttttgtatttttggtagagacagggtttcaccatgttggtcaggctggtgtcgaattcctggcttcatgtaaccctcccacctcagcctcccaaagtgctgagccactgtgcccagcccttattgttattttctccacgttattttaaacagagtattctagaatctccttttgcctctttattgagagatatgcaccatgcttaggacatttttattattgccaggacatcactttttttcccttgtagaaatagtctctaccttttaaaaaaatacaagtctatggaaacatgattcactggcattctgagaaagcaactcttcttttaaatgctccatcattttcagatcaacttcctggtacaatggccaccctttctctggtgaatgaggcacagtatctgctgatcaacacatccagtattttggaacttcaccggcaactaaacaccaggtaagacctcatacctcgggactagcagacaagcataaccatttgccactgggagcagggcctggcacctgcctggagcggagagatctgagagtcatgaagttcagccctgcttcatgtacagatgagaaactgaggccctgagaagtaagcaggcccttttgtccagcttccattcatctttatagagggttatcttttatcttacaaagatcctttttgatatcctcaagatggttaatggagaacccctagctctcactgtttaatcattcaatttcttaatgtttgttttaattgaattgccaccaacttgactaacttttattgcccaccctcccactatcccctgtccccgaggatctctgccctacttcacacagtcattttaaaggctaaaaaagagtggttatgaaagcttttaaagttgtaattgcaggcacactttatttgaaagatgcaccacagatggaattagcacccctccctgcccactcccacccagtgctctcccaaggaccctaacagcattgggaggtcagctccagaaagggtcatggttgggccaaccctctcgttgttctttagagcaaactgaagtcccaaggtagccaggcaatgaggaaaaatcacccagctctcatgccacagggtgactgggacgggctcctcattcctggtccacaggccagagatgagtgttgttagtggctcacccctaacagcactgtgaactgggggtcctgtgactgtcttgcaccacgtggtcaagtacacacacatacatatttgcaaagacatacaaatacagtttaataaagctgactaagccacctcgtccgcctctgcagggatgggctatttgtagtcactcttgtttctatccattgttgaaaatatacaacatcattctcatactgtggcccagctcgctatctttgagagcaaaagtgtgatgcagccacatgttctctgggtattcactgagttcttctggcactgagggacccttctcctcaggcatccagagtcctggaaaaagtgggtctgcagttttttggggttcttcgtgtggaaagataggaggtggggagaggcttgctgtcaccccagttcctaccaggaggggccacgttccccaccatctggtttatagcagggtggacccgctgggcagctgatccaagagcagagctagggtcccctgctaggtatttctctgtgctttatttgcaaatttgagggactctatcatgcacatgttaaccatgatagcttttggacataaaacatgcccttttacgaagcccaaagtgagggtttataacccagagagttgatccagaatcaaaggatttgaggactggaaaagtgctaatcctcttgttgcagatgaggaaattgtggtcctcataggttgtgggagttgcccttagtaagtggcaaaaccagactcaggtatcccggtctctggcttttcatacgttgtttgccattcaaaggagattgggactcctccttcccaaccccatagtctttcaaccctgtctctggcgcatactctaaccatgcctgaggatttacctcacaccaacttaagcaattaaaaattgattgaagcacaaaaaagtgcaaaagtcatcagtacacagttaaatacagttttacagatgtatacggctatgctccatcattttcagatcaatctcctggtacaacagccacccttcctctgttgaatgaggcaaagtatctgctgataaacacattaagtgttttggatcttcaccagcaactaccactacctagatcaagctaagaatgtactccagaaacctcccttgtatcccatcccagtcagcctcactgaaggtcaccactattctgacttctttcaccatagctagtttcacccattcttcaacttaatatggtgggatcatacaggatgtgttcttttgtcagagaagttttaagatgtattttcagtgcgttcttctgggtgggggtggggggtgcagagggccattttttttggaacctcatggcaataaataaaaattacaaaaataagagttacaaaaataggctaggcatggtggctcacacctgtaatcccagcactttgagaggctgaggtgggaggatcacttgagcccaggagttcaaacccagcctgggcaatatagtgagaccccatctctaaaaaaagtaaaaataagttagctgggcatggtggcacatgcttgtagtcccacctacttgggaggctgaggcaggagaattacttgagcctgggatcttggtcaaggctgcaatgagctgagattgtgccactgcactccagtctgggtgacagagcaagaccttgtctcaaaaaaaaaaaaaaaaaaggtatcagaaaaatagcagatgttacactgcaaatagaatggaaattaggaaatactatcttctttatttataatgttttaatacccaaaaaaaaaaaaaagagtgagatctcaacacctgtgaaaagaagggggaaaaaagggaatgagatctcagtgcttcttaggtctttgatcattaagcctgttgacaggtttttaaatgccttatgccgccccaccttatagaactggtgtgttctcagaagttcctttttcactggagttctgttcttctgatttccaaagtccttcatctcttcagctaagatctgctcgccctttgcctggctcttgtgggactctcactggagatgggaccgtatcccaggggaggccctgatgcctgtttagcagatgggtgtctcttggccttgcactcatggtaaaagtctgttttgattatccagggcacaggccacagtagagctgatgaagttaggtgttacatggcaggcatgatgaattattatagtggtacaattatctgccatcctccccctacttactctttttggttgctttaatcagtgatgagaatggaaaggaggaattattctcactgaaggatctcagcttgcgttttcgtgccaatattattatcaatggaaaaagggcttttgaagaagagaaatgggatgagatttcaattggctctttgcgtttccaggtaagtttggggaagttctattatccttcctccagggttgtcaatgaagattgacctcaatcccagacctggatagctgcaggtgggactccctcccagtccttgtctcttaactacaaaatcttggtgggaggttatgtaagcttagccttctaagacaccccatggaataatccatcctttatttcccaagaggatggtagcagtcagtttcgcacacaccacagaaggtgtgcgagggctcgacactgcctctgtgctgtcgttatgtccagacttaaactctggttttttggaatgcttgtgtcatgagactgtcatcctcctgaaacttgttggactttgtggcagtctggagcttgtggagggaggcccagaagcctggcggtgcctctttgcccatggccacccactcttccacacgcttcaccttttctgcctttgctggtggctgggaaggagattgtcagaggcaaagccaccacgatgtcctctgtccctggctttggactcccaaaacctttggctatgggcttcaaagatatgagaaagaggcgaaaggtcttaggctaaaatctgtgctcctcacatggttgacaaggccctacgagatcccatgctgccactgtctctgagctcatcaccccttccctctctgcctccgtcacagtgaccttctctctgttccctaaacagccacccttcctgccttagcccttgccatcccttctgcttagcatgttgtccaagggtctcagctcagatgtcaccttcttggaaaggatgcccctgacctgccgcagggtcacgttctgcttattcctgcagtgtgtgggagggtgagaccaagtctgttttattccctgctgtacctctatggccttgaatgacactggcccagagtcagtgctcaataagtaattgttgagggaagaaatggacagaagagataaggaatatctaatgccagagaatgtgctctgttctttagtgggggctgaaattatttttataatacaggctgaacatccttaatccaaaaatctgaaatctgaaatgctctaaaatataaaactttttgagcactgacatgacattcaaagaatatgaccactggagcattttggatttcagattttcaaattaggaatgctcaactggttaagtataccagagatatataatgtaaatattccaaaattaaaaaaaaaatctcaaaatgcttctggtgtcaagcatattggataaggaatactcaacctgtggtagtgtaattagccactggtataaactgactataacgagctaccttgtattcaggctctgcactcagaaggaacaccactctaacatctaggaaagcagtaaacagtcatttgaatctttattaaagaattttagagatctggggtataggaaataaattgcatggcacaataaaatgttccaatgatgtttttgatgtttttaactccctagacttcctcttaccctgacagtggctcccccttgacaagcaatctatattatgtcctacattctctcccacaagcccatctcaggcactagccctcctgccgtttccctcatccctccatccttacttactcttccttattttctatccctgtgtctctgccatgttttttaaaaaaatgcctactgttacacatcctgctgggaacaaaatagacactaaatatacattatcaaataggtggagagtgagaggaagaaaggaagaaaaaaaagggaagagaactagaactagactgagattactctcagaaacttacctggcaacagtagcacctgtgcctctccaggtatctcgagacataaatataaggaagactctttaaggaacctttctgagatgacttagcaggctttgctttctttaggtcaccattcttaatagaccacaactagtaaaaatcaaaatatgcatgccctttgactcaataatttcacttgtagaaatctatcccatagaaacgctaatacaagtattaaaataagtataaaattattttcaccagcctgggcagcatagcaagacttcgtctctctctacacacacacacacacacacacacacgaaaaattagccaggcacggtgatgtgcgcctgtagtctcagctccttgaggtgggaggattgcttgagcccaggagctcaagcctgtagtgaatcaagattgccccactgtactctaggctgggtctcagagcaagatcctgtcagtcaatcagtcaatcaataatagctatatgcattagtccagcacgagcattaaagagcataagatatggttaatactgcacctttcttttttttgagacagggtcttactctgttgtccaggctagagtacagtggtgcaatcttggctcattgcaacctctgcctctcaggttcaagcaatcctcctgcctcagcctcctgagtagctgggactacaggcgtgcaccaccacacctggctaaattttttatttttggtagagatgggatttcaccatgttggccagactggtttcaacctcctgggctcaagtgacgtgctagcctcagcctcccagtgttgggattataggcataggccaccacgcttggcaatactgtgcctttcaagaaagtaaatgcttggctgggcacagtggctcatgcctgaaatcccaatgctttaggaggccaaggaaggaggatcacttgagctcacaagtttgagaccagcctaggcaaaacagcaagactttatctctacagaatattaaaaaattagctgggcatggtggtacatccctgtggtctcagctactcaggaggctgaggtgggaggattgcttgagcctgggaaatgaaggctgcagtgagctatgatgaagccactgccctccagcctgggtgacagagcaagaccctgtctcaaaaaaaagcaaatgctcaaaagatgtttgttgatgataatactcagtgccgaagcaattactgtgaaactagcacatctcttttggaaaacaattttttactggatgtcatcaagtcataaatattttttattcctgttgaccttataatttcattttgggagactgatactacaaaaaaaatgaaaaggaaagacagttatgtgaattaggcctttattgcaaaattattgatcacaggaaagcattagaaactattcacatggcttcaaaggagaagaactaagtgtttcaacccatggaatgccaggccatccattgtgaaaattgcaaaatgcaaggatgaggtggctttctatgtcctgactggaaggatgtccttgcatattgcagagtaattgaaaaagaaacccaagtgggctctgagatcccagcgagtgtgtttacacaggtgcacatacacagttgtatgcagttacatgacacagtctgggatggtctgggatggtttggatgtcctaggatggccggggacaatctgggatgtcctgggatggtctgcagcccatgagcagcacctgtctctgtggatggggagagggggatcactgctgttgagtgctttctcttttaattcttcaagcttctgtattgtttgacttgttttttaatgaatatatatgctagtaaacacattttaaaaatactagttgctaagaataccagaaaagaagctttaaaatgaagattttttaagaaaattgtttcttttgtattggtgtttggggctgggtgcggtggctcatgcctataatcccagcactttgggagactgaggtgctcggatcacctgaggtcaggagtttgacaccagcctgaccaacatgcagaacccgtctctactaaaaatatgaaaattaggtgggcgtggtggctggtgcctgtaatcccagttactcaggaggctgaggtaggagaatcgcttgaacacaggaggtggagtttgcagagagctgcctgggtgacaagagtgaaactccagtctgggtgataagagtgaaacttcacctcacaaagaaaaaaaaaggtaaaagaaaatagtgtccagaaaatgcccctttcttctgctagtttgagaaactgttctaagagggcctttcattgaagtgacaggatttttacagaagttgttgcctgtcgggtggctgctagaggctggggctggtgcaagctgcagggccctggcatcctttctgcaggagctggccccatgcatcagctgttttctaggcaaagaggtaagaggtaagagggtgcaggagccacactggctcctcgaggacacagctttgtggcgttacaaaagcctcgttccactgcagggatcctcgtgtataatagtgatagtttccactctcgagcacggtcaagtgccaggcctgggcttgagtccttgtatccctgatgtagttctcaccaaatacagccaagaatctagacaaggaaacgatatctggagaggtcacaggtttgccaagtccttggtagagctcctttccagcaagttctgggtgcttacgtggcctgggaatcttgacttcggtaccacagggagcatatatttccgctgatttagtacccagtgcagaatgtgagcgtcaacctaaaaaaaaaaattagagctttgtacagtgccagtatcagagccaatgaggtttttctgaggtgtgattattgctaattgaaaacttttcccaattaaaaacaaaaacaaaataaaatttaaaaaacacaccagagaaaatgatctcctaatgtgacgaatttattcaggagtaagcaaaaaggattataaactaggatgcatagctatggcaagccacaggtgcacctgaagaggagagagtaagggaaagcttttattggcaaaaataaagtcatacaagctgcttgaaaacagaatttattggttcctggggctcacagccagaattggcatcagttcattggtggagacgctgttactgggcaaatgttcctttaagagcatcttatctgaactgctgcagtcctgaagaatgtctagtgataaaccctgtctagaaatacgtgcatacatgcaagacatggatcatgaaaagcatgagatgcatgaaggacatggaggaatttcttgtgggattattttagaaagtccttgagacagtcgttatctcagaaatgcaagcatgaactccctgccttcgtgccatcctggctccaatttcttcgggtctaatcagtgatttcatcctggtatctgcaactttcacaccagtaacaggaacaggccaagacacatccagattaggtgagtgtttctaatttcagtgcataatttgtatttgcccgtgagtgagctgaggagaaaatggttatgagaaaatagttttaagaaaatcaagtacctttgcactttttacatgtgcaataaaagaagcatctcgttattgctgagctgcatgctttctttttgatgtttatattatgggggattttaagctccaccagacagtatgacctgtattaagaaattgtaacaatgcgttttaagtattgtgtatgtgtggcatgtaggcgtgggtacgtatggatatatatatatatatatatgcatacagatatgtatattaaaaataattttgtttcctacttattacagttacaaaaacaattccccattttatttaaaggtttttatagattccttttaatacgtgcatgatataattttaatgcctgaaccgtatacatcatatatatgtagcatggtttacttaaccatttctctccactatatgacgttaatgatgttaacaagtttttcctattatgaacaatgtgaggataaatctttgtccatgactgtggttgggcttctcgttcctttcttaggttggatttttagatgtgaagttgctgggtcagcgggcattgacacatgaaagttctctctgatgaccttctcacaggggccagcgctggctctgcgacctcctcctcctctttcttctttcttgctctgttgcccaggctgcagtgcagtggtgcgttcttggcttactgccacctccgcctcccgggttcaagtgattcttcttcctcagcctcctgggtagatgggattacaggcatgcatcaccacgcctgggtaatttttgtatttttagtagagacagggttttgtcatgatgtccaggctggtcctgaactcctggcctcaagtgaacagtccgcctctgcctcccgaagtgttgggattacaggtgtgagccaccatgctggctttctgcaacttttctctttttccaatttgtcttcccagtcactgagtgctttccttcctcaaatccattctccaacatttcctgagaaccgtcaagatctcagtccctcttttctttgtctgcaaagaccttaagcagtggtcttttagctgacaaacaaatgcagatgattccccagcagagacggtgaacaggtgccacgttctggctctccatagttaggggactgggcatttctgtgtgattcctccctctgaggtgcaaggctctggtcacttttgtggcaacgctgtgttttccttctcacctgccaggttttggggccttgtcacagatgccagatgatttgcatcgaccagcaaactgggcaacgaaaccagcatgttttccaaaaactttctgagagtcgtgaaacaaaggtaagcgtgattgcaaaatatgacacctggtttccaatcctggtgttatcaataccagaactatgttcataatagcacagagttatttttttaaatgggggatttgctgcccatccaaagctgttgggctgccattaacctatccttgtttgtagtttcattttatttttcctttccatccaagttctcacttttttttgttttacttcatgtatttttatgctttccaatcttgttgaagagatatggagtacaaaaaaaacaagtaattctgttgtcttgatcattattttctttaacacagagagctcatgaagagtaaagtgccttaatgtgaatagagtagctgcatagaaagagtcagtacatttcattaaactggaaatacattcattaagcctggaaattcattttcttgagggttaaaacaacaaagtgttgttatgaattccagattatagaaactgaacttccaatgtgttgattctttagaaagatttattttcaggcttatactttctgttaggactttttgttttcaaagaattccaggaagccaagaaaagcagtcaggctacatagaacaattcttgaaaattaacagaaataatgcaaacactgtatctacttccaataataagctggcaagttaattcatggtaaaatgtgctacattgtttcctgtgtttcttcaaagccagggttttgtttcacagtatagacatttgatttatgtaagttttcttaccaatatgggatagaaatggcctgcagagtagtgcatttgactgttacagcagcatgtctgtcaatgcaggctgtgttgtctggggtgtggggaccttgagcctgcaccatgcaggttgccaggagaagaaagaagaaggcacaaatacaatactaaggtccatgaaaatagtgtttctcagcatcactgcaattttcatgtgcatgatgaaccttttatttttaaattttggaataattttagatttacggaacagttgcagtgagagtgcagaggctgcacttttcacccacatttgtacaaatcatgaggaattggcccaatcccctagcctggggcctggaacatgagggtgtccaacagatgttatcacaagaactaacagatcggagagcatgtcaagtcctccaaagggtcctgagtggttcacttgcattgatggttaacattgagcagacttacctactcttcattttggaccttccatccttattcaggagaatttgacaaaattaacttgcatcattctttctcaaggaaaatgcagagttctgccactgtcttccccaaaaggcttttacatcaggcagcaaacaggaaatgggcctgatggtggtcacaagctgagagtaggaagaaagtccttctgcaggaagttcagggcatgtgggacagagatgtgcccagcaagaaagaggtgtggggtgaccacagggaaaggatgccttagaatgagaatctttggggtctaaagttaggattctcttaatgttccagtgcattctactgtgtaacagataggagatatcaagtctcagtatatgtctttaaaaatctgacttgattttagttaaacattaatatttacaaagttattttaattgctaaaataatctagccttttttgttgttgttgctgttttgttcacaggtgaactttggcatgtacctgatgcatgcatcattggatttatcctccccatgtttcctgtctgtaggatctcaggtgctccctgtgttgaaagagaatgtggaaggtcatgatttacctgcatctgagaaacaccaggatgttacctcctaaaaaaaatttttagcataaagtttctcttttacagtg

SEQ ID NO: 637 - DNA, 1286 bp, Homo sapiens
gataagctacaacataaacacatctaggttcttgttcttagaatacagcatgaagaatttgctttcttctttcttcctaacattttcatgtgagatccagaaaggacacattgtctctggccattcgaagaaagaaagaaagaaaaaaaaaaaaggtatttagagacagagagagaaaaaggctgaaatgggttcgctgggttctaaaaatccgcaaaccaaacaagcccaagttcttcttttgggacttgactcagctgggaagtctactctcctttataaattaaagcttgctaaggatattaccaccatccctacaataggtttcaatgtggaaatgatcgagttggaaaggaatctttcactcacagtctgggatgttggaggacaggaaaaaatgagaactgtttggggctgttactgtgagaacaccgatgggctggtgtatgttgtggacagtacagacaaacagcgactggaagagtctcagagacagtttgagcacattttgaagaatgaacacattaaaaatgtgcctgttgttctattagccaacaaacaagacatgcctggagctctgactgctgaggacatcaccagaatgttcaaagtgaagaagctttgcagtgaccggaactggtatgtgcaaccctgctgtgccctcacaggggaggggctggcccaggggttcaggaaattaactggatttgtgaagagccacatgaaatcaagaggagacactttggcgttcttcaagcagaactgaggctgcgaaaaatccaagtctctacagagacactgatgaagttgaaagggtaattgtttttccatgccaaatgaggaaatcaaattaatgagttgacaaacttttcctgagatgttatttcatctacatttagttaaacaacttagaatgatatctagaaaatatttattttcagccaggaactttagcaaactgtggcaatgatcactgggaatgaaaacgtataatgttctacaatttttgttatcacattggatgactttgaatatagtagtgacacttgggaccaaataaattattttatatgactactagaacaaagttttagtaagctgtctgctaatagagtcagaattcttccagattgtttccagctgtaacaggtattgaatttccaccgtgctcctatgtaacagctgggtggtgtaaaaaatgaacttcaaattatggagtggaaaaagcgtaatgttaatatcttgtaaattcgtattccctattaaataaagctttcttattccct

SEQ ID NO: 638 - DNA, 121874 bp, Homo sapiens
tgcggcgcgcggcggcggctcccgggcgtcccgggcccggtggcggcgcggctgtggttggctgagcgccgcgggccgccccccgcccgccccctcccctgctcccctcccccgcctcccgcggcggctggcgtcgggaaagtacagtaaaaagtccgagtgcagccgccgggcgcaggatgggatccggctcctccagctaccggcccaaggccatctacctggacatcgatggacgcattcagaaggtagcccctcccccacccagacaccccctcctccccccgggtgacagcgccggggccgggcgcggcggggcgggactgtccgtgcgtctgccggtccaggctgcggcctccgtgcgctccgccagctctggtcgggggcgggggtccccacgcgccggctccccggggaaaggggcgactcgccctggggggtggggggtgggggggcgggctagtgtttccgtttcacaggcagagcttttctttttgaaaatctgattaggctgagtttttacattcaagggctggcacatgaagcctttaatttccggtggatcggcccgccgggcagccccggggtcgtggtccgcggagggggcgagcagccgccgcttcctgtcgcgcgggggcaggtgcggggggcgccggcggggacactgctcccccgcaggtgagtagctccgactgcagagggggactcgggccgctgcacctccggggccccgcggagagcctggggggcagcgggtccggctctcccctgctgtgcggagataggaagtccctcgaatgtccagcgttcctagcggacttgagttacacgggagaggggttcagaatagaccccctttgttcgtggccccctctgacgggcagggagggacaatgagcgcgccggcttggaaggggctctcatgagctccccctaaagtccccagggaaaagccattgtgaggaaatccctcaaacctcagctgggcgtttcaggaagcccttgcagctgcttctcacctttctgcccacggagtactccactgaaggaggccagggagagatgccccagccaggcacagagcaggtgccggccaggcttgagtctttcctgttcccagaggtgcatttggccagtttaatcagtagatttaagccaacaagcctccctcaccctgtgcccggcttgatccccgtgaaatggaaagtacagccctctcccaccgtagcccgctttgagagactcagataaccgggaggaggaagcatcttcaaggacaggtggtcacccccttatttaatcagtgctgggcagctgggcagctgggcagcggcagacgcacaactagacccaggtccctgactccaggactaggcgtctgcaattgcatgggactgtaacagcctcctttctccccaaaggaaggagtggccctcccttgaatatgtcactgcaccagcatgcacactcacacacacacacacatgctccaatgctcacacatccactcacaaacacacacacgcacacacgtgcatacacacacgtgcacatgagcacacagacatgcacaccacataggcacatgcacacacactttttctgcccgatagatgagaatgtatcaaagacctgcctttaaaagcaaaagtctttttaaagtgagttgtcaccagatcaacagtagcaggtccgtcctaagaacttcctaaagatgtcccgggagcagctctcttggaagcaggtgaaaagtggaggagagcttcaggaggggtgggaggaggacgctgggcatggcaggccaggctgttattgtgggcagggtagcttttcacagtggacacgctgaggttggggtgatctccagaaaagcagcctgcaggtgggccctggggaagacatggcatgtggcacctttgcgggggagaggcggattgactgccagctctaccacttcctgtaccacgagcaagcccctgggctccccaagctggcatccccgtccataaagaagggataataaaatctgctttatagactggaatgagaagggaatgagtgaatgtaaacactgcctggaacactgcagaacacgatgagcattattcttccctcagttccttccataaacgtccttttgtggtgcaaacagggaggcgccagacgggtctccaacccccaccccgccccccatctccacgaggtctgttgcttgctcctgagctgcccccgccctctgccccttgctgtgaaccccgttggaagctcctagctggactgtgagtcctggttgaagctgaatcgtttgcccaagccatgtgccgggcaaagcatgataacttctcgctcacctcccaggctgcacacccagcagtgctgtcacggatgggttgcaccgggctcagctgagagcactttcagtgccgctgccatcagccgccattccttctcttaaagtaccaggcactgggtaaatcctggaatttccagcgtgaatctgtctccctgccatccgccccatctcctctccatcaaaggtcatggaaacaaacccatgttgcttcctaggagggagccctgggggtcactgggtgcaggagataagggatgtgttgctttccgtcactgtgttcgtcggcaccacctggccatgagtcctggcgatgggcacacccgccccttcgttatctctgctctttgtccctctggttacctgacccctggccatctcagtttccccctgagaccgcagagacggggaggaaggagggaacattagaaactgggggttctgccgagttctgtgctccggcaaagctccaggttgacaatctgaagttgtctgagggaggccccgggcagcaagtgccggtgtctcctggcttggccttacctgtgcaggtaaccctgcagacatgcccagtgattcagaggagccgctgcagccacttggcgccaggccaatgctttatttatatgaagaaaactccagacacgcacaggtgtcacatcaccagagtgacacagtgggagtcagcaacaggaatttgggggattgtcttccctcctcaggagcttttccttcagaggttgtgcagaggaagctgggcgtgtgaagtgagtcggaggttgcctcctgagccctacacgaaggcaggactctgtgccctggagtccaactgaggctccgttttcagtgctcccctctcatctcgagaaccttgggtcagttacttcactctgtgcccctgtgctgctgtgctaataattaaatgggataaggcagattgcctggtcaatgagcccgccgtgtttattgagcatctactatgtgctgagtgctggggtccatgggaagctgagtgctggcggaatgggaaggcaactacaaatgataaacagcagcagacgttgcaggctgggtgggccagccccgtgtggggcctgatgaacaggtttttttccctgacgatcggctttgcaggctttgtgggctttgtggggaaggagccctttgtgcagaactggtagccatgaggatggcctggtgagaagctgctgaagggctggggacagcctccacccagccagcagcatctgcaccggcctgttcccgtcatctgttccttggcttgccagggtgcacagatcaggacttggcacttccccagcaccaggtgaagccctcctgtcacccccaaccccgtgtctagaccctcaggtgggctgttaaagaaggggagaggtggaagccaggtccccaaacctagggtgctgaggtccttgcttcagagagactgtgtcctctaggagctgaagcgcttcgtctttccccagaggattcgttttttcctttcctcagctgcccctaccctggggggccctggctgcagcacctgctcctttctcttgcctatggagaaagggtttgctcagctgagctgcccatggagtgacagggacgacgcactcagcactggggagctggagggggtcccacctggtggcacatccaggcttgggtttgccaatcttccgaatcggggaagagagaggcctttgggacccctgggccaggctgtgggctcgggtgtggtgaggagccacatctgggcaagactgaatgctccggggcctctgtggtgccactgccctgacctggcggccccctcgggacactcgcactgtgcgcggcctccctggcgcctctgggctgtggtgttctggtcttggccttgctctgcagctggaacccaggtctgaacacatcggtggccgcttgagtttgcggggctgtttctactgtaaaccagagcagtgaatgcgcacagcccaaagggaggagccgcgctagaaagtgttcaagcgtccgcagaagtcggctcccagttcttaatagtttgccacccaccgtggctacgccacacctacgcttgcctccacccgacctatgcctgcccccttcacatgcgggagcccagggctccgtgccctgggcagctggtggggtctgcccaggccttctcgtgatgcttccacccagcctggtcctggcacccaaggccaacctctgcgggccccagagctgtgcctttttggctcaggtcctccccgcagtgcttggagtccaggcctctgcaccctgctggggtggtctgtggtcctggcccaagggaatgtcgctccctgctgcctggttctactgatctgtcctgttcaggcccctctgccttcatttcttgctttggcacaagcatgagctgctgtttcccccagctcctcaggggagaggagtgcactgccccaaccttgtctggtgtggttagcatggtggggccttaagccctacccggctcctgcgtgcctttcccctctcctgcccacgacatggtcaaatgcaaacctcctttcattttagaaggcatgggctgctcagcccacacgcgcagtgccctttcctgtggctgcaggcatctctgctcaattgtgcagggctgcgtcccccggccacactgactcctctccaggtttctcggctccagcaccactgtctgcgccctccttcccaggtggacggcggctctcctcgccatcctctccacttccagcctatcatctgtctgcctgttacatgtttgtaacttttgacctttaaattggtataaaaatggtactgtaagttcactgaaccaagaaaatctgctgaaggaagggggtcagtcacacccttttggggtttccagtgtatgaatggagggggtggcggtggtggagggacagggagcaatgagagttgccagccttattgctgtcctgacccctggctggggacgactcccctgtctccacctgaattgaagctgggctgtgaaaagtagtaagaaccctcggtttttggttcctttttcaaccagcaatcagccatgaagtgcctgaccacttgagagctacagcaggtgctgtctcggagagggcacaggaaactgggcccttcccaattttagcccaagggtgccgaaaagtcagggagctgctggcctccacactccttcccattggtgtggtccgaattcccctttagccagacatttccaatgtccagaggcccaggaggggacagctggaagccagaagcccacctgacgccatcaggaatttccatgaatgacctggaaacctctcagactaaaccaatgccgcccaatctgggaatccaggagggctggtcccatagagtggtggggacatggtgctgagacggacagcctcgcctcatccgcctttcccacttgccagccgggaggcctgggcaaaatcactttctccccagggaagtggaggctcactgtgcagtccacgcggagcaatggggtgaagtttccagagcagggcagggcatgtggggaggctcaggaatgccacccttgccctcaggcctgggcacagcatagcccccatgacgcttctctcatcctggacccatcagcccggaagactctggaagcagcagtggcagcaccttcctgtcacttgtcttgtcactccccgagtccactgtgagctagaaccacaggctcccatgaagaaggagccagaaccacaggccccatgagcccaggtcccacagcccgcaccttcgtcttccagccagcctctccggagctcagtgtgggtggaggggctgtctggcctcagaaatgggcaaaagacagctctcgttgtcagcgaggtaaatctagcgcagaggaagggcacactgtccccgtcagacgcctcagatgaactgacatgcaaatgagagatgaaacggggacgagccgggcagctgatctcagtgcagcaactgggacacctcggggcataagccgggcagggaggcggcaggaactgggccccagggggccaagacttcctgagaggctgggcccggtagcccagtcctgggcttgcttcccagggggtggtgggcaaccctgaaccctctctcacccaatcacctgctcccctgggtgcaggtgacccagcaagccgcactcctgggaaatttcagaaggttttgggcaagaagggcccagagagcccccagagaccagacggcacagcccgatagctgggcctgccccagacaaagcgtgtctgcactccttggctttctccccagacaaacccaccctgagctcaggatccctccagcttccaggagcaggtgcggggcctgcagggacggctcgcagagaaggcagtttgcgagtcagtgcctggcttgtggaggttgagaccaaggccagttgggtgcttgcatttccaggggtccaaatatttttgagaagaaaatgttctaagaaagtgcacagggtggtggatgaaagaccacgctctgggtaccgtgtacaccgctcgggtgacagtgcaccagaatctcagaaatcaccactaaagaacttacccatgtaaccaaacaccaccccttccccaaacactattggaattaaaaaaaaaaaaaaagattaaaatggttaaaaatagaaagtgcacaagcaagggtccatctgcaggagttggaggagcgcatgcctgtattcctggcactgcgggcacagtcatgccatgggcaccagggacgcccagtgcactcagccacccaggggtggctcccaacattttcaagctcaaaaagaaatattttcacttgagggtgcaacttatttgtcttgaacccatccctgactgcctgtctcccccctcaccctgaccacatctccccaaatcccgaagctggtcacgcaacgggagcattggccctgaacagaaacccgcagtacccctgaaaactcggtctagaaacaactaaaagaagaaccacagcattttattccgtttgctttagattctctgccaatttttttttttttttgagatggagtctcgctctgtcgcccaggctagagtgcagtggcgtgatctcggctcactgcaacctccgcctcccaggttcaaggaattctcctgcctcagcctccggagtagctgggactacaggcgcctgccaccaggcccggctaattttttatttttagtagagacggggtttcagcaccttgaccaggctggtctcgaactcctgaccatgtgatccgcccgcctcagcctcccaaagtgctgggattataggcgtgagccaccacgcccagccttttttttttttttaattttaaattgtggtaaaatatatgaacaataaaccctccctccccatccccctcccccagcccctgacccccactgtacattccgctttctatctccatgaaactgctgagtgcggggacctcacagaagtggaatcacacaggatcgccctgctgtgcctggcctccttcactcggatcatgccctcaggtgcatccatgttgtagcacgtgtccgaatttcctgcctttttaaggccgagcggtattccattgtgtgcgtggaccacattttgtgtttccattcaaaacggatgaatcgatgaaactgcctgatatttttaaagcctcagtcattttcattcttagttcttcagtttgcaaagggccggcctgttgtgatgggtttattgttgcatcttctgaaaaactttgtgagttcccgaaggcctctccacgtcttgagtcatggctgtgctgctttgcgaagctgtgtgcatgtctgtggtgtagcctgtgtacagcctgtgatgcgtcgcagcggaagggtagggggctgcccagggaagacagatgcgccaggttccgctccacggagctcagctaccagccctggtggagagcgcagatggggccgatttgtcatttgtctgcgcttgagcccagcagctgtgtggcctccctggggcaagtcattcaccctctctgtgcctcagtgtctctgtgaagtggggggaagtttttggaagattaagtgggctaatacgcgtcaaatgctagaacacactggcacttggtaaatgctatataagtgttatcatttttgtttgtttattatttatttatccatgtcatggatttaaggcagtctaatctcagtgcctggtggagacccgggcgccacccccccaggttgtcaagtggtccctgtgcctcccactatcgtccccagcacggtgccgtgtccgggcgtgcgtgaagggccagctcacctcacagctctgcttcccaggttagctcccatccaccctccccctacctgtttcctcaccgaaggaaggggcagaaagatgccctccatgccccttccgactgttgcagagggatggaggactatggtacatacacacatatacacgcacacacccaccacacacacacaccatgcacatgcacatcacacacacgcacacaccatgcacacacaccacacacgtacacaccatgcacatcacacacaagcacaccacacacaccaagcacacgcacatcatacacatgcacacacaccacacacaccacacaccacacacacgcacatcccacaccatgcacacacacaccacgcacacgcactgcacacacatgcacacaccatgcacacgcacatcacacacttgtacacaccaggcacatcacacacaagaacgcacaccacacacaaggacacacaccacacacacacaccaagcacacacacaccacacacacgcacacacacgcacacacccaccacacaccacacacatgcacatcacacacgtacacaccacacacagcacacacaaaaacacaccacacacaccatgcacatgcacatcacacacatgcacaccacgcacacgcacatcacatgcacacgccacgcgcctcacacacaagaacacacaccacacacacgcacaccacacacacgcacatatcacacacatgcacatcacatacatgcacacaccacacttacacacatgcacatcacacacaagaatgcacaccacatacacgcacatcacacacatgcacacaccacacatgcacatcacacacctgcatatacatcacacacacatcacacacatccacatgcaccacacccaccacacacatgcacgcacctaccacacatgcatatcacacacatgcacacacaccacacacaagcacatcacaaacaccacacaggcacatcacacacatacatacacaccgcgcacacatcacacacatgcacacacaccacacacgcacagtatgaagatgacagagaagtcagcagagcccctgggggtttcaggagttgagtggggacgaggcaggtggccacacagctcggagggagggcagaaggcacccgtcttcgcagagtcacagtggggcttgcctcctatacgtgccggaagggtgaagccccttatctcattgcccgatgtgatgaggtttgaagtggttgagcttggagggtatgggctgagcccacagcagacaggcctggcagtgccccccgtcttcccaccctgcggtcatgcagcccgactcttgggggcggggtgccaccgtgatgtgccgtcacttgcagcagtatgtcctcatgccaggctgagaccagcactgtgtgaccagcctgccccatgtccctcagcgctgtgtcacactccacactgaggccccactgaagcatgccaggccccatcctatttcttccaggtagtcgtctgcccagcacctcccctcccaggccttgccctaaagcccaggcctctcagcatccaggactctggaatctcccaggtgttgatggctgaggtcatcagctggatgccaggacacccaggatgctccaggtccttgctggggtctggagtttgtgattcagcctcagtccctgtggtgagtccaccatgtgtcctcagacaatggatcagagagcccccagaggacggcccggggccgagtcgggtccagatgccaaaggggcttctcgaggcatctccagctcccacctgcccctcggagtgccaggcttggcttctggaagagaaagctgggggtttagtgactccagccaactgctgtgagcccaaggcatcaaactaaaaatagcgaggccaagagggagtctttgtgttcggctcagtgggcaatggtgcctcacctcgcagcatgacacagggctgatgacacggggcacgttggtcacaaagtgccagtctcagcctggcacagggacgtgccacctgcaggtgatgacacatcacagtggcagccgctcctgatggtgctgctgcattgagtaggagcccagatccagggagacagttgcagcagatgaggcaggaggccagcgaggggttctacctgctttccgggctggcctctgcatggacacaaagcagaaagggcataaaggtgaccctggccaccaaagcagacctggagcaaactggaccagcgcaaggccccggtgccagcactcagagacatttcttttctggcaggaaatttgtgcttcattttctaatgaaattccaaggcaatcaaaaggcaaggaaagaggagggaaaggaagggagggagggagggggttccattcccatccgaatggaagcccccaaggcttctgtagctccccccatcaccaacttcactcaccactcttatctgatgcctcctatttgggtacacacggccgggtcggccttgcgagagactcagtttcctctcgacttccgcccgcctgcactgtcaccacgtcctgccattgacctctgttcatccactcatggtcactgctgtgagttgaattgtgtctcccaaaaaagtggatttctgtgctaacctgtgaatgtcccgttagttggaaatagggtatttgcagacataatcacatcaagatgaggtcatactgcattgggatgggcctcaagcccatatgcccgccatccttctaaggagagggaaaggcagacacacatttgtccatggaaatgagaacggaagacgtagagacagaatcaggccatgtaaagacagactcagagaccagagtgatgcatgtacaagccaggctctgcgggcagcccctagaagctggaagaggcaagcctcctccctggagtcctgggaaggagccagccccgcccatgcctcgagctcaggcttcaggcctccggagccaagagagataaacctctgtggtttcatgtcacccagtttgtggtctttgttatagcagccccaggacactcagggggttgccttgtccacccccatcctggccctctgagggactggttggctcttagaagaccgttcaacctgccctctggtcctcctcccccacccagagacccctggctacaccctgcccaagggagctcaccaaagcccacagggtccctgtgatcttgtcacctgggctcccacaggccagcagtgttggaacctggacatctggctccagccttggtggccacccccgaccttgctctgctcctacagctcccggccttccctgccctggccggcccttgctgaatgtccccgctcctaggaagccggatgtgtcgcgtgcaggtgcctctctgcactgtaataactcctcaccaggcacccttggagcccaggatcaagtcactcaccttccaaccctgcccctgcccagagactggcacgagaaccagtaacagttgttgaataatgaacaatggatgcatgcagctcacccgtgagagggcgttgctcggctgggccagggatgaagcttctcccgcgtggctccaccgtctatccctcaagctcctgatgctcccctgggcacctctgcgccatgaggccccgttgaagtcagttggggaggcagtgtggaccgtgagaagggagtcctaagcacaggaaacgctgccttcctggggccctaaagaacaggctcaccttccccaagggccttcaggccctgacatctaaaaagatgttctttatcaaaggggaaagcagccctggggtgggggcgtggccaccagtgcagtgggcgtggccacaaccgagagggcgtggtcattcgtgcagtgggcgtggtcatcaagaaagggcgtggctgcagccggaagggcgtggctatcagctccagaaggcccttcttgctgtccttggacttgggttctccttgtcgacgaggatctcagctggagctgccaggggcagggctggcaccaaagcacttctgaagtctccccgcctcccaagtgtgaggctgtggggaaggagggagggcagctggcttgtttctggatgagcccatctgactcagcagctgggacccagcaggagcgcagagcaggtcctgaaggtgccgaggccccacccgcagctccgtctcagctttgtgagggctgcactcccccgtgtgcatccggcgtcacaaaggaccacaggcccggcggcctccacagcagacaccaaggccctcgcggtctgaaggccgaattcccaggtcaggctgcagcagggctggttcctgaggcctctcctgggctggcacctcctccccgtgtccatgcagggccgagcctctgcatgtctgtgtcctcggcgcctcgttttacaaggacatctcattttaaaggcccggtctccaaataaggtcatatcgtgaagtgctggggtcagaactacagcatgaattttgacgggacacagttcagtccatagcacccgctttgggaagtgggaatgacctctcccttccccatcttctggcctttgtaaccctaatgtgggaaagcaggagggatccagaacgacattgggtcaccaaagagagcatcgcagcccaaaaggttgaaaggcggcaccaaggtcccgcgcctggtgaccgccgactcgccctcccgggctccaggctgtccccactcccccccgccccaaccccagcatgttgaggcgcctggtcccaactgcccattcactccctgtacacagactgcttctttgtcctccagccaggggtgaagggccatgctggcgaaacagcaaacaaccccaacatgctttgcagcctggccaaccacatgaccagtttgaggaggttggctggagatcacaatgaggaagttggatgagggggtccaacttctagcagcccataagcctatccattcagacaccaaatccatggaaaacagagagacaatatactgattttcaaaagggagacataccccagcaagtacagaccagggaacagggtgctgacgtggccacagttcttaaactactcgacttcatggatggggcacagttttttttaaaggaggatttagaattctatttggcaggtggcatgaaaaagagttttgaatagaaacacacccctccctcccagttgcctgcccagtatgtttgttttgttctcttgaaacaaaggaagagagtggtgaggagggagggaagatgaaccaggaagaatgaaagcacttggcctgcttctcagatggtcttggactgtctccgctcacaggagttgcaggtttttgggttttatgcaagttcggatcacaacaggcctcttgcaagaaccaggcattacctttattccaaaagccttgctgggccttcttgaaaggactggcagccaccacttccctagaaacccgtggcaagttccctcctcccgaccccctgctgtttggtccaggaccccctgcagtcctgactgggacccacttggcccttctcaagggacccagcacaggacgtgtgtttctgctttgatgaaccgccctttcccccctgcagttctagtggaatctcccctcccttatcccattcccacttggaaatgatgatgatggaatgggcgatgccggcttaccaagacatccaagctctctgggtcgaagttggagagaggggtgcacaaaaaggattccactcctgtctgccttcccctgcctccccgctggggtgtccctttcccatggtttcctctaaatcttttcacccatgtccagccacaccattctcacatactgccttgaaactgggctcgaaggggctgcgtgctgagagaaggtcctctcccccagtgatcctccagaggggctgccgcctgggtcccccgagcacctcctaccccaccctccccattcctgccatccccagggtccagggagcccagattccagggaagggttgcattagctcccactcggagtcctgatgcagcagagacagacagaggccctgggagaagtgagcatgaattattaagacaagacaagggtgaggccccagagagggggtggcggaagggtcatgttcatgcagcgagagttgcttcgagcttgaaccgcgtatccaggagtcaagcagattgcaactggcgagaggccttcagaaatgccccgtgagagtcctgtgtgcagagctccatctcagcacacttcctgttcttttggttcgtcgatttttgcattttcagtcccctgtgatccattatttataacagtggagattggcctcagacactagcagtgaggaaaacaaaagcgaagctacgcagaaaaatgacaagagtgatgagcacagcagtcatgacaaatgagccctgtgcggaggcccgggatccgcgcagatgccggcgcgggggaaatgggccctgaaatcccaccgtcaggccaggcagctctgagcgtgacctggagggctgttcagacggtctgggtagccgtgtcctgcgcatgaacatcctccgtcgggagaggaattccccacggattatcagagctgctccctccaccccccgccacgtcccacgcgggccacatcaactccctctgcagcctctggccagcggctgagccctccgtgtctcccctcgttaatgcctccttcaccatcccctcctgaagtttcccccattgcatacacgcgctgaggcccacccggtatcaaggactcccattgcttgcgaaaaagattccacccctcttagaacagagaccagggccgctgtagcaaatggccataaatgccacagcttaaaacaacagaaacggattatctcgcagctctggaggatggagtccaaaatctgaatcgctgggctgaaatccaggtgtgggcagggccgcgctccctctagaggctcccccggagattcccttccttgcctcttccagctgctggtggctgccagcagtttgggaattgcggccgcatcacaccacctttctgtttgttgttgacatccccgcctcccctgcctgcggggtcttagatgtctctctccttcccactgagtttcactccacatttgaattggattaactcatgccatgttaggcaaacgtgcccctcaaatccttccacttaacagacatttattgaaggttcctgtgtgcggggcccaagagaagggacattaaattaggagatgaaccttgggaggccatggcatgcttcggagcctcggcgtcaaaatgacaacccacaccccacttggcggttcatctggggccctggaatcagcagactgaggctggaacccagcaatggcacatgctggctgtatgttctcgggcctcagtttcaacatcagtgacatggggatagaatctgcccagcggagttaagtcaccgcatcccggagagccgagtgtctcatagaggctcctggtgtggtctccatgctgctgctcagcacggaatgaagaggttcaggaacttgcccacagccacggataatgagggacagagctggaattgagcccgggaacctgcacacacagcccagtgtgaccgtgccttctagagagaggccagccctggcaccaggtgggcatgccagcatcaccttcaaggtgtgctttaaggatccaagataatgtgggtgcttcaacagatgcatggcaataaaaggaaagcaccatgtttcaccttcacacacacacacttacacattcacacactcacatacttacacacattctcatacactcacacatatgcttacacacattcacaggctcacacatgcttacacacacattcacacgcacacacattcacacgcacacatacacttacacacattcacacacatacacttacattcacacacatacacttacattcacactcatacacatacatacattcacacacatattcacacattcacacatacacattcacacacatacacttagacaccacactcacattcacacacattcacatacatttacacacacatccacacacacattcacacacattcacatttacattcacaaacattcacacatacattcacacgcacttacagtcacacatacacttatacacagtcacacagacttgcacatagacttacacacatacacttacacacgcactcacaccttcacacacacaggcaatcacacattcacactcacgtacacttacccacacattcacacatacacacaccacatacacgcatacacttacacatgcactcacacactatcacattcacacacacatacacttacaaactatcattcacacacatacacacatacacatgcattcacacacatgctcacacactcacacatacacttacactcacagtcacatacacccacattcacacacatacactcacattcacacgcacatacactctgacacacatatacatacattcactcacacatacattcacacacacacggatgcattagttttcaagtcaggatcctagcacagcccacaccctgcatttgcttggtgtctcctgaggtctctagttatacttcccatcccttttcttgccatgtatttcctgaacacatgttatctttgatccttaaaccatgacttagagatacagatgtatgacaagctgagagatgatgtgagactgttgttaattttttctccatgtactaattacattgtggttatcttaaccacaaaggaagcgttctactccagagaaccgcgtggaaacagtgcagatggactagcacgatacctgagaggagctttaggataactccggtgctggggaggttggggcccagttcaagcaggaggggaggcgtggggacaggtgttgaagctgtgggtgtgcagcggaggcttcatgacgctttcctcctgctcttgtgtacgtctgagcatttccataacagggaagtgttttgttttgttttttaaataacattttaaatgcctctggcacatgggaatccatggtaatttctgtcgttgttgtatattctttttcaaatgcaaggacctgaaaaatatctcctaaactggaaaaggaaatgaggctgaatacagattttattttagcaaatagagaagcagtgattgtctggcggttaactgtaatccattctgagtgtgactttactgttaagtattctaaaaacaagagaccaaacaaaatgaacaatatgtccaaatgtgtatatatataatttgtaactagaggtaaattgcagatgaattgcagatgtacacagacagatggatggacagatgattgatatagattgattgacagatgattcatagataacttgcaatgtttcttcagtgaacgcatatttatttcttgggtaataagaaaaaacaatagaatgtggaatttggggcttggcctcttttagctcatttaaaaaaatattaaacacttggaattatcgagcgctgaaaaaggcaatagaaaattcaccttttaactccctcaaagatagaaatgtgtgaatctgctagtgggttgcgtttggctggtcctgcaggctgatttggtctgttctctctcccagagagatccccaagcccggctgagatgtgcctgtttgtcttgagggcagacaaagcctagcaaaatcttatggaagctgatataaaagcttaatagcttataaaagctctaaaaatgattcacagtctaggatagagaaaataaaaggaatttgaattggtttattttcctttagaggagcctaaatcaatatttattctgagtatgcaatcagaaatatcagtaatttgagaacaaggcaaacagagctgcacatcccgttatggccacgagcccacctcgccttcgttcagaccacagctgaaggtctgacttaggtgcagcacgcacccctggagctgagggcctggagcagggccaggccgggctcttctctctcttgtctgtcctcgtctgtgggggaatgaagatgacacagcactcaggaggtccttttcaggacccagagtcactgggcttttagggcgtttggctctggttctagcccgagtgtggtctcagtccccattggtggttgtggttgtggcatgggcatcattagtcacacaacataaaaccacagaacgcagaatttgctcaccctggttcacacaggagcaagcttgggcaccagcaccccctgaacgcatgccaaagggcaggtccagctcagtgctggggtgtggaggaacccacctggggcctgcctgcaaagacagatgccctgccgtgtttagaaaaagagaaaactggcctaaaccacagtgaggtcaaatggatcatttaacccgtcgagtttggtttcttgttcatccgacgcggttgatcttattaacgcatatgtgtttgtgttgatgtggcctccagcttctgtcgcactgtggacacagttggatgtggctgctaatcaatgcggggctccgtaggtcagtgagagcaatcagagcctgctgtgcggtggcatccccgagttaagacaggcttttgtcccatactctattgaaacacccagaaatgctgacatgttgaagttaaggccatgtgccttggtgctacttgcttgcgaaacagcctttgaaggaaaaaggaggaggaggatccatgagtttcaagggtcccctcctgtaatcacggctgccactcaacggagtaagtaatgtgtagcgggccctctatctgcatgacgaatcctcctaacattcctgtgggcgaggtaggatttgtctcgctttgcagccgaagaatcagagcctcagaaaagttaagaaatcttccctgggtcaagctggtaggaggagggactggaactgaactcacatctccacctcctctcttcctactcctctgcctttcttgcacctagagcagtgtacaacatcaacaactgaccagggcgatcctagaggtaagagacagccgaatggcacggacccagccaagcccaggcctgcccaggtggaacagagccagctaggagcattcggtagcagaggtcagtccgctgattgactgttctcacttccaggcccacagcctcctccaccctgatggtctatgagtctagtgcggccctttgcacaattttagcaactgaacccttttcctcacagaattgtgataccgtcctaacatatgaagcatatataaacagttgggcaaatcataatagtttccattatttcataaatttgcatttgtggcaccaaggagagaattaatgggaacaagagggttcttgtgtgagttccgcatttggatttgggggttcgaggtggcagctataggctcacattagtgtctgcatcactttgcttcagtttgtcacggtggccccccaaatccagaaccgccctcctcgctgtgtgaggagggtcctgcctgcaccgctttgcagacatgggccagcctggatgcctgggcgacgctgccctgcgactcgctggcctgcaggacatctgcaaaacattcaggtctcacggcagtggccatgaacggcctcacagacactgagtggacctgaccccaaagagaatgcgtcgtccttgaacgtgtcgatatttaggttattacacaatgagtgtgttgctttgcaattagtgtctgaaagagttagagcagatgtacatatagaaacgaagaaacgaaatctgaatccatgctgacagattccccctccccaaaccttgctcaaggtaacacaggcgaccaggagcaagtcccggccggccccctgctagcgtggtctgagtggcccaagcaggacccctgcccaggctcactggactctcctggagcccccagacacgacacccttcctcatcactgaaaatccacttccacagtgtaggagatgcatggatctgagggccagtaggaagtgctggagctttaggctttagacattctttttttttttttttttgagacagggtctccatttgtggcccaggctggggtacagtggcgtgagaaattctttaacactctgccgagtcctggcccttggggagtgaggcctggctatgaggcttcttgtcagaactccgtgtgactctcaggatggaagaacagggtgggggctgctcctcccctccctccctccagcccctggcctttgtaaaacggctccgcctacgcgcctgtagccagtgcagaaccagggaggcctctccccttcccttcccaggaggggccccgccttgtcctccatgccggattctgttcgtcctcccccaggtcctctctgctgcctcccactgccccatttcctccaggaaccttcctctctcctaccaccagcctctctcctacccccagacacacactctttacatgccgatttctgtcctctggttaactggcgtttaattttctcagctgcttggcttaatgccaaagagtgttcttccaaataaaaatggtaaagaccttttttctcccatgagaattttatgtaaacgcagtgcagcatgctcgtaggctggttctgttatcaatttctaagctcagcttccagagctagagaacttttttattggttataaaaaccctacatattcagtgcagaaattctgaaaaatgcagaacagtatcagggagaaaataactcatcccccactacccagagaaaaccgctgttaacaccgaagtgccacagttgctggcgttctcacacaggtgtgcgtttaggagtgtgtaagtgcgtgtaagtgtgtgtctggctttctttcacataattttgtgtcctgatcattttcactcagcattacatcagcagcggtttccaatatagcattaaattgtcttcaaaaacatgattttaatgcctctataaagttccatcatggaggctcactaaaatgtaatcacttcattgtttatgagatactcagcttaattccatttctctgcagtgaataatccagaggaacacgctcagtgtgcatctttgcttgcagcagggcagcgcagggcattggttggggtataaatccgggggtgcagtggagattagattagatcgtccgtggaaagcaccagaatggtgcctggcacttaataaatgctcttattagtatgtttatcttcattatgtccctaagagccattcctggaaatgagactgtgagtcaaagggcacaaataccgccaacctgctttccgacagcgctgtgtggatacacgggcccgaacggcgccagcctcactgcctctgcgttagtgccgccacttcatctcagatactctcctgaagataagaggagagtcccatgcagccataagaaagacaacggagagatctgtgtaccctccacccagtctcccctactgggactgtcgtgcaaaattatggcccagtcttacaaccagggtattgacagcgagacaagcccccatctgatccagattctccagttgtacttgctgatgtcgtttagatatttgtccccgccaaatctcatgttgaattggtatcctcagtgttggagtggggcctggtgggaggtgactggatcgtggggtgggtttctcacaaatggtttagtgccatccccttggtgctatccttgagatagtgaattcttgcaagatctggttgtttatgtgtgaaggtagaaggcatctcctctctctccctcacgggtgtgcacgcctcccttcatcatgtgatatgcctgctcctgtttcaccttccatcctgagtgaaagctccctgaggcctccccagaagcccagtgatgtcggtgccatgcttatacagcctgcagaactgtgagccaattagaaattggctttataaatgacccagtctcagatatttctttatagcaatgcaagaacagcctcatgcacttgtactcacttgagcatgtgcacttacttctgcacgatgttcttgcctgtgtagactcttacatccacaaccacagtcacagtctagaacattccatcgccgcaaggctgcctcttataaccaaccacatcccctacctgcacccatttccaacaccccatgcctaactcgatttccagcaccccgtcctggtgaacatgaatctgttctctatctcttcaattccgtcatttcaagaatattatataaatgggattacacagtatgtaacctcttgagactggctttttccaactggcatcattcccttgagatccatccaagtggttgtgtgcaccttttccttgctgagccgtgttccatgttgtgggccgaccccagtttagcactcgcccattggagggttggagggcatccgactcatctctagtgtggggcagtgcgtcaccttctcacaattgtcaacgggattgtcactagtatttgccttccatgtcttggaggccaatgtggctgctcttagaaatcagtcctccttattttggttggggagatttctgatgtcagtttgacgtttataattaataagcatcatcatcaagttacaagagtaaataaaaatatgaggcagggtgaaatgtaagatgctcgagaggctgagatcagtagctgtgtgaatacagcagggcgggcaccagcagtgagctccacggggcccagcgtccggcctcattaaccagctgcccttggggaggagcagagcccgctcttccctcctggggaagggtagtgtgatggaaagacaggctgcccttctctcctgcaggagctcagcatcatgctgtgtacatgcctgggctctcttcttcagccctagccacttaaaaccacttggagggaaagattgtagaataattataatgaggaaaatttcgctccagattcgttactccaagttcagagaagctctgtaaaaattgttgctaaggcaattgaataaagaatgtcagccgatgtaagcgataacagcaagacaatgaacataattgcatgttttacaacaaccaacctcaaagcatgacttccctgacatagatatgttttttaatgattttgaaaggtaacacagacattttcagggatttggagaggaaactaatgccatcctggtttaccagctttatggggtcatctctccggtgaaaaagactgcagccagccttgcagagagggcgctgtcttagggaggcacctccaactgtccccgcgacccagcccctaagtgcttcacatcaacactgttcttttgtgacggtgctgctgtctttcattcgccagcctgtcatgctcaactcaaacctcagttgccatccagttatcttttttttttttcttgagatggagtcttgctctgttgcccaggctggaatgcagtggcacaatcttggctcaccgcagtctccacatcccgggttcaagtgattctcctgcctcggcctcctgaggagctgggactacaggcacatgcccccacgcccagctaatttttgtatttttagtagagatgggatttcgccacactggccaggctgggctcaaactcctaaccttgggtgatccacccacctcagtctcccaaagagctaggatcacaggcgtgagccactgagcccagcctagttatcttgtttgtccaggaattggagcatttctaggtagcaccacaaatgtctgtgcaagaaacccacaatttccagtggtcattggctttgtgccaatccaaactagagtctgacaaacccagcaagaaatattcgcggcagctgcaaggaagctcctcaaatagaaatagaaaaatgaaccagggtctgctcttcccttccgggtgtggaatcaacggaagccgactcaacacagagccctgggggcgtgaggggtttggcgggatctctgccggctgcagatctctgctctgttattaccagcccttctgcccagctcctaattgctctgaagagggaataattttctcagcagccattgccagccacatttggactgaatagatgctgaaatggcaagggtaaatggggcagagacagtgaaaagccattttctatctggagcccaaataaaatcttcctcccacactcctgcctggctcctccgcagcctcaatgcccttctgagagctgcctgccccagtaggaggccaggctgggaccaaggacacccagttctgggtaaccatcttcccatggctccttggacaaccaccttaaagaagggaaaggcaagaagcagaaggaaagcagaggctggacattggaatcagcctttctttaaactaaaaaaaagttttcacatatgtgaatgcgtgtgtgaatttgaagtcgtatgtggaaggggccatatatccgtcaatgcatgctccaaaaatcagaactgatggacggcaaacagcatcggatgtgcagccagcattcttccggcggccacctcccgggggaaataggtgcagcagacaggaccgtctgtgggacggggacaggcaagcatgacagcaggtaccacagatcagggtgcacagacagggctgggggaggcagcgtggcacggcacccacttcccctcggcgtgtctgggctgaagcccagtggactcccgctgatcagaaggatcctccactagaaggatctcactggacgagtcccctccaaactggaacatgcaggtgccttgggcttcatgctgcacctttcagataaaaacacacaggtgagctgggagagctggagtcccatggaccccagagatccaggtcacgaggaggggatcgcgctgcaccaggacacattcaccaaggtgagccctggttcctccccacaggctgtgggcaaggaagtgtcgatgccaggctggctcagtaggtggaagaaccttccggaatgcctgcccgcaggctgctgctggcatcgagtctgtgtcctattttccattcactgcatgcatcctccaagtatgatttccactcggaaccctgagctgcctcatccctcgctccgtctcccctccctcccgcccagctcacactgaaatcacgcctcgcgttcagcggctggagtcctggtggattgctgcttcggggctctcagaaatccctttacttgagtcttggttttacaggaagaccatgaagcaccccccaggagctggagctcctccttctggacccagtgtctcttctcagcctcacgacgaggagacctgctcatggagctgctgcgccggcctgagctctgatccctcctccgacccagcctcaccctgcaagcagcaccatgtggggctcagaatggggatcttaagggacccttcccacaacctcccgataagcctttccacggagggcccaagcggagacaggagaacactgtatttgataaaatagagtcaaatccaggaaaatgcctctggacccggaaaggaaacgactcaccccccacccatgagagacccttctgtcctgtcccttaacccagaggccctgggcatgggtttcgcagccccctggaggccagaccctcaaactccagccttgtttcttctaagtgtgccagtcaagatgcttctcactgcaagaaacagactctttctcaagccagttcaagaagatctgcgttgctgcagaggccgatgggtgtggggagcaggctcagtgagagactgtcgtaaggaggctgagaggtcttcagaaaaatccccaggacctggggtgccaggagcctgggcgggcctgggctctcgcagcctgcagcccctcccctccctctcacagcctccgctgcccccgggctcagggcccctgcctgtgccttctcctgaggcttctcctttttacctctcagggtcccagtgtggccagcccggcactaaacccatgcgaccctggctcactgacagtcgccaccagctccacatctctcagtaaaagttcccccaaaagagtgtgattgggagctagccagcggggcttaaggcagccccctgctccagtccccttggccatggagacagggcagggttagcaggaggcaaggcatgcgcaggacagctggccggcagaggtcccgtgtgctgtcatgggtgcagggtggacactgtgaccctgggtcccccacttggaaggggtgatctagagggacttttgtcagaaagacccccacccagccaatctgactgatggggccatcaccttgacaacaggcttggtggcaaagcaagagggtacaaccgaccagagccccgggtcccctgtgccctcctgcactgcctgacagggctgggccatggcccgtaccaaccgtgagctgagccaggaatccagtcaaaccgtgtgcctgagtgacacgtagctctcttccttctctggattcactgctgatcaaccccaacaagcagcaggactgtcttgctgtgaacccaccgcttgcggacccctccccaggcctccattcccgcctttctgaaggtcaaggcagcgccctccccaagaaacggtgggaacagaggagccaggtgttcgttcttcccagctccggaaacgctgcagattgcgcactcgagttcctgctgacataacagtggctgccagacaaaatgtggcgaaaagtttttctaggtgcctttgttcactcagagacttcctagagacttgtgtgaaaatcacaggatttgcaaccagtggggacgttgagattcgtggcaactgaaatgatacaaacttgaactttgtgtcaaaccagtagtgttttgtgtaattcttttcaaacctgtcatttcacttactgcttctcacagccccaaggggcaggtggagttgatgccatcaaccctatttacagaatggtaaactgaggctcccactggttatgcgcttgcccacagggttgaaagagaagccatggacaaaaggagtcactggttacccaaagggcttcctgttctcaaatccactgctccttccattacgtggtgtctagaaggaggctcttttggatatagacattaaataatctgggagtcagtgtatgctgtgatcaagcatgtgcggtccgcagccgatggcccaggatgcagtcctgatgtacacttctggctgggtgcgtgggagccacacacatctctgtgtgccttggtttccgtgtgtaaacatcttagactagtgcttgcctgtggttggcacctggtaagtgtcagccttctctaatgtaggcagcttgagggctcccagacagtgatgttcccgctgacattcccaggtctcagctgattatgaagaggcatcaatttccagtgggggagccgccctctgtctcatcatttgtttctctcatcttgctttaatatcacagcactgccagtcaaaccacacaaaagggtttgtgatgacctgccgtgcattctcgtaagctccagccctgactcgcctgcaagccagaagccaacataaaactttcgtttttcccttaatcttgctgcctctgcatctcattttcaaatttcattttatcaactttttttgcactatttgtttctggataaaggatttgcaaaattcttcagcatgtggtcaggaagccctatggcctcctgacgaggcagcctaggggtcctcccgtggtctgaagctgcagccgggctggcctcccacagtcaggagcagcatcaggctgggtgcttctgacaccagcgaagagcgcggctgtccaagcccccatccctagggctcacgcctcatgcccaaactcgcacccactttggcgccgctggagactaatgaacagcaaaagctgaagtcatgactctcatccagatctaaaatgaccgtgtgtcaaacatttttactgaactgatgaatcgaatgggaactggtaagaaggtacgaccagttcaaaagagaaatccaagaaccctaaatgtataaggagtgaagcaatgttgaaatggacttacaaacggatgcagctatattctccagtggagacagccagtgccaacttttgtgcttattccaaatttcctgacagcctccccaccttttttccaacataatctcaaagagagattattctggatggcagaataaggctggtccccctaggtgtggcatccttgcttgcatagaggtggcaagagtgccaccataccaaacaggcctttttcagtttgttttgctggaagacctcagaagatatcagaagcaaaagcctctgttgtttgctatcctaaggttaggaagccaagcataaaaagctctcctccagatttcaccggcagtacttataaatttgatgaacccctctcttctcaaggcccccacgatattccaaaaccctggcctgccagagtagagccttttttcccatcttggaggctgtgaccctgagagcccctaccctcccccaggggactttgtgggcatggacgttgcacagtcaccctcggcccctcaagagcggtcacagcccagcaaatgagcgtcgttctcacgcacgtctctcaggcttaggctcggttgcataaaccttccccaattttatcctggcaaggaggaggacagatccttccggaacctttgcagatattgccaccaaaagtaaagccttcataaaagtttgcatttggggaggaaggagagcagatggtgaaaatcagatatcacttaagaattactcatttcagtttacaaaaaatctaggtcgttaaaggtgactgatagcttaagaagacagggaaagggcttcataacagagccggaaagtccaacagtacaacgacacgcatgatgccaaaaagtaaagcgttcctcactcattccactcagtgctccgtaactgattctccactggctcctgggctgcagcctcatgaagccagctgttcctcaactgaaaagagccctggaagccctgggcagcccactggcagggtctgaatatcatctgagcgaggccatcagaagctgtccccaggagtctgtgcttgggggtcagtcatcggaggtgcttactgcggtccttttccatggggctcgaagcttctgcattgaatcacgagctctggcctccagcctggtgcagaaccttccagggggcattggagtaaaagcttctgtagatgacagctaccccttttttggtccattttatagcagaggaaatttaggttcaaagaagttgagttgagagtcccaggagtaagaagcagtcaaggatccccccaggcctccggggccgcctgggctgcctggcctcacgacctggccccatgctcctgagatggagaagccccaggcccatgagcctgttgcccttggcaaagccacttcccttctgagtaaagtcagacgagcctgcccagtcccaagagactgcgattccgtaatcgccctcccctcgccttttgaggtcttgctggtaggtgcacccccttcaagccagcccaaggagccatgatttgagtcggtcttgccagatgtgtctggagagaatttaactccaagatcatcccccgtgcactctgaggggctgggacaggatgtggtgccctttgtgcccaggaggagaagcacccagtggggcggggtggggcgaggactttataaaggcgtcatttgctgcggccacccaggttggaacacagggaccacagggccccccgccttctgcaggaccaccccgctcatctgagggagacactgtagaaacacatctttgagcagtggcttctaatccaagaaacccaatagaagtcaaacgcagattcctagggcccaacccggacccactgcgtgggaatccctcagccggggccagaagcacgctttgaagacaccaacctcctcagcaagcctcttgcaaaccacatcctgcttctccagaagctgcagatccagaatgttcaaagaaagagccctccttgccttcctcttcttccacccctgccctctgcagactggggttctgtagacccccaaagtaagtccgccacaccggaaggaagtgagttacacaggggcccacatgggaaccgctttttgtcctgtcttggtgggaaaatggccacgaccccagcccaggctctgccacgccacaactccacgggcatagcctgggaggccgcagcgtgaactgtgactagggctgaggatggtgccatggtagaagtgagggcctggcacccggccaagtgcaggactcctcggcagtggggttgggagaagcagcctctgcaggcgaggccaggaaccaggacacaggaggagaagcacatctcagaggagggagctctgggaggagccagcagagtcctgcaaaggaggatgtgggggaaatggggtgaggccaaagtgggggctgctgaaggggctactgcacccgtgcgagcagggccaggaccaagctgcataggcagccagggacacagccgatgccacagacgtcaggaaccacgcaatgacacaggccacctttgaccgaccgttacccctggggcaaataccagtggggataacgggcaaggagaggtgctgtttactgtcttattgttgccagttcagcagcccacaggaaatggtgttagtcacagaaaaaaaaaatctgttttctatatttcactgtttccaagtaaagaaaaaagaaaactaatcttagcttaaaaaaaaaaaaaatggtgcgctgggcaccgaaaaataaccatcttcctaggcctgcgtttcccccacaccggggacttgtgctggaaagaaaagctgcgttggcagccaggagccggggaaactgtccagggaggcatcctctgcgatgaaggcggggcctcggcgtggcccgttccgcgctctgtccagccctggagaagccccaccctcaccgagctcgaaataccccctccctgagagccgagactcatggccgggaccccttggacagaagatgcggatgctaacccggcgcttccaccacagccccggcggcactggggagcgagcgcggccatcccgcgcgtaggtggtgtttctctgcaggcgccagtttcaccgcgggcgcccaggatcctcaacggttctgttgtgatgtgattcccctcttcgacttcgtcattcagcctcagtccctcagtccccaaataccgaaaggcagtcttttttttttttttttgagacggagtttcactcttgttgcccaggctggagtgcaatggtgcgatctcggttcactgcaacctccgtctccctggctcaagcgattctcccggctcagcctcccgagtagctgggattacaggcacctgccaccacgcccggctaattttttgtatttttagtagagacggggtttcaccatgttggccaggatggtctggaactcctgatctcaggtgatccacccgcctctgcctcccaaagtgctgggattacaggcgtgagccaccgcgcccggcctttttttcttttttcttttgaagttaatgaacttgaattttattttatttacagaatagcccccatgagatacttgaagacccggtgccaagcgacagtgttgaccccaggtggtcagtcctgcctggccccttccgagggatgcgccttcaccataaccatgtcacggacaggcgtgtgggcaagggggcatcgctgtatttttcacaactctttccactgaacacgacaatgacatttttcaccacccgtatgcatcaaccaaatgaaaagatgagcctgtgacattcccgtgcgtagagttacagcttttcttttcaaaacgaaccttcagtttggagccgaagcggaagcacgtggcgtctgacgtctccagggagacccgccgccctcgctgccgcctcaccgcgcttctgttttgcaggtaatcttcagcaagtactgcaactccagcgacatcatggacctgttctgcatcgccaccggcctgcctcggtgagtgcgcgctgcgggctctgcccggtgacgccacgcggcctcctcgccttttcgggatggctgggaggggcgggaagaggcgctgaagggcccgaggcaccggccttctacaaggggctcttcgaaatcaatcaatgcgcagaatcccgagggaggctcagccgccctccgggcctctctgcctccacaggtgatggctgtgtccacaaggaggaaaccgtcgggctgaattaaacagaaccgccctcctaagagtgtgggtttttctgccgggcgtggtgtctcacacctgtaatcccaacactttgagaggccgaggtgggcagatcacctgaggtcaggagttcgagaccagcctggccaacatggtgaaatcttgtctctactaaaaatacaaaaattagccgggcgtggtggcgagcacctgtcatcccagctgcttgggaggctgaggcaggagaatggcttgaaccctggaggcagaggttgtagtgagctgagatcatgccattgcactccagcctgggcaacagagcgagactccgcctcaaaataaataaataaataaaaaagagtgtgggttttttcctctcacttcttcattcacttttggagaaagcggggtggttgtgtgtgtttggtccccagccccacatcaccccataggtgccttttctacccagggggcttgacccagatcaacactgggtgaaaggctgacttcagaaatgggttgaaaagaccagtgatctgccttatcgagtcctcagagtcccacaggagttaatgtcctaaatcaacagtgtgttcgagccagtgaattttctaattatcagcaaactttccaaatgtaaagggtgagcaggagtagctttggctcaaggattaactttaaagttaggacggaggtggagaagggcaattgaagtttctcacagacaggtgagaaaagggagatgaaagtacacgtctgaaagtgcagcaaatggcagttttagccgcaaaaatagcccatggtctggggcatctttgggcaccatatatgaagcaatgtgccaataaataaatatatatacacagtattccgtatagcagccctgggatttgagtatcacctctatttcacagattttaacaatttacaactgaagatcagagattaacttggtcgaggtaacacatcttgcaagaggccccaaaacatgtgaggttggaggaagactcatcctaagcatttaaaactattttgtaggagagacttgcgcagttcagacggactcccaaaggcactggaagcggaaagacaaactatgagttcgtcatctgctgatataaatgttagttcctattttaccacagttttttaaaaaaaatctcccaactcaataaagtagacttgctccaattcccattttaaagtatttcagcatctacacgcacttaggattatacgcagctgtttaatttcatttacaatcggagtctcaatgccctggggacggcctcccacccttcccatcccaccacaccttggtcaggctggtcctgggactgtcctggttgtctcagggctctggccccatgtgtacattcaagtgtacatcccagagcacactatgggcgaaaacacgggcttgggtgtgttttccaggaacacgaccatctccctgctgaccaccgacgacgccatggtctccatcgaccccaccatgcccgcgaattcagaacggtaagaggctccggccgcgctcctcggggtgtgcctggcacttctctccatgacatgggaggctttctgtgattttgtaaatgtgctactgcagaaaggtgtgaattgacagcagagatggagagcgagggtaggagccagtgtgaaggaagcttgactcgtcgtgttcccctgcagaggagctgggcacgttccaagataacaattgcagccgtggctctgcacctgcttctcaacgggaggaggcattgtacagaggggaaactgaggcccaggagggtgagccaagagctgcagagccaggccccgggatccccacattaaccccaggaaggacctcgggagattccctacagagcccctggggacatttcgtgtttacccacttagggccggtctctgtgttcataaagtgatgcctgtgggagattctaagcacagaagggccagggacaagggaggcccaggaagtcaagaggagaggccggtgaaagcctccgtgaatgtctgtgaactaggtcaagccagcggtgtatggcccaggaaggacgcggagcaggggccctcaggtcagtgacctgcccctgttcctggtgacctggggagaccccagcagcctccactgctctttgtggttgggcaaagtggaacttagatttcctcatgaggcgagggagcaggtgagctgggggcggggcgtgcgacctcaggacccctctctggcgtcctctgttcctcccagagtggggctcactgtgcctccaagggactcagtagatgcgatggtacacttgtcaatctggtcatcagggtgtcctgcccaactgacccatggccagctctgagcccacaggagaaagtgcatgtcaggcagacccttgtgtcagtgaggtcccagtgggcgtggccagcaccgtccccctcagtgaggccccccagtggacgtggccagtgctgcctccctcagtgaggtctcagtggacatggccagagccgtccccctcagtgagcgctcagtagacatggccagtgccgtcctcagcgaggtccccgtgggtgtggccagcgccatccccctcagcgaggtcctcgtgggtgtggccagcaccatcccactcagcgaggtcccagtggacatggccagcgccgcccccctcagtgaggcttcagtgggcatggccagtgccgtccccctcagcgaggtcccagtggacgtgtccagagctgtcctggtcagccgtcctccctgtcaccttgaggcctcagccgagctcctctcatctggctgtgcccgtcagtctcccctcctgccctagccaggatgcccgtctcctgccccacacagtctggctctgactcttggcttccagactccccggaaggtgcagtgctaattggctccccagagactccagtaagcatcttgtcagcctcagcaccagctccagcctggggggtctcgctcagaagcaaagtcactgagtgacctgtcctcctgacacccacaagactaaaatgatctctcagaggggacctcacagaaaccagcaccttgtccatgccagctgggtatctgagagaaactgctttgttttcctgaagtcatttgaaacagcgtgcagagacatttaaactcggcgggaaataggagaagcccaccttgacccttctaattctctggccccaggtgccttattaacaagagacagtatcagacacaccagacaaaagccctcctgagcccaaagagcccaaatgtctggaagctctctgctgagatgccaaaatgcatgcctttctgataaagagacagagacagatgaggtaccatgatatggacatggcagtggacgtggacaggggagcagtggagatggagaagatggagacacacgcagttgaggatacaggcgaagaagatggagacacacgcggatgaggatacaggcgaagaagatggagacacacgcggatgaggatacaggtgaagaagatggagacacacgcggatgaggatacaggtgaagaaggtggagacagacgcggatgaggatacagatggagaagatggaggtagacgcgggtgaggatacaggtggagaagatggaggtagacgcgggtgaggatacaggtggagaagatggaggtagacgcggatgaggatacaggtggagaagatggaggtagacgcggatgaggacacaggtggagaagatggaggtagacgcggatgaggatacaggtggagaagatggggttagacgcggatgaggacacaggtggagaagaggaagttagacgcggatgaggatatagatagatgcatagggtgtggatctaaccgggtacaggtgatgcggaaacggatctagacagcgatgtggaaatggatctagacagcgatgtggatgtgatctagataatgtggctctggacgtagaaagagcttcagatgctctatctatgatcgtgggtgtggatataggcatagacatggtgaagaggagagaatagactctcctctctcatgacaaactgatcgtggctgggggcggcacgtgctgagatgtggctgtatttgtcccccaggctggtgcctgcgcctcctgcacccccgtctcctttgtgccttcttccattccctctgccactgttaggtccaggcctcactgagctctgacctccctgcctccagcctgcctctcccacacggctgccaggttcaacctggtaagacaccttcttctccatggtggcctcccaatctgggccctgccaacttatgcctcaccaacttctccaacttacccctgtacccacgcccgcaccatgcccagcccacaggatcctgccttcccagctctgcagaaccagcttctgcttatccgctaggtgccagcccagccacctgccttaagcaccatccacagtcacccagcccatcaccatcactagcaaagtcacccagacccatcaccatcaccatccagagtcacccagcccttcactatcaccatccaaagtcaccagccccatcaccatcactatccagagtcaccagccccatcaccatcaccattcaaagtcacccaccccgataccatcaccatccaaagtcacccagacctatcaccatcatcatccagagtcaccagccccttcaccatcaccatccaaagtcaccagcccctttaccatcaccatccagagtcacccagtcccatcgccatcaccatccagattcacccagacccatcaccatctccatctaaagtcacccagacccatcaccatcactatccaaagtcacgcatcctgtcactatcaccatccaaagtcaccaagccccttcaccatcaccatccaaagtcacccagtcctatcaccatcaccatcctaagttaccagcctttcaccatcaccatcaaagtcaccagccccatcatcgtcaccatcctatccaaagtcatccagtaccaccaccatccaaaatcacccagacacatcaccatcaccatccaaagccacctagcccatcaccatcactatccaaagtcatctagcaccatcaccatccaaagtcacccagacacatcaccatcaccatccaaagttaccagccccatcaccatcatcatccagagtcacccagatccatcaccatcaccatccaaagtcactcagcccatcaccatcactatccaaagtcaccagcctcttcaccatcactatcaccaggcccttcaccatcatccgaagtcacccagacccatgaccatcaccatccaaagtcttccagacccatcatcatcaccatttgaggtcacccagacccatcaccatcaccatccaaagtcacccagcccatcaccatcactatccaaagtgaccagcccctttaccatcactatccaaagtcacccagacccatcaccatcaccacccaaagtcacccagccccttcaccatctccatccaaagtcacccaacctgtcaccatcagcacatcactggcttcctcccctcagtgtgcgcctcagtctgaagtgatctcacttacttgtttgaggttctcactgctgctggccccgctggacggtcttctctcataggaaggaaatttcaccttgctctctgctggatttccagcccctaaacgaggcggggcatgctgggtgcaggatggaatgagttggggacggagtgaaccagtccagctcgtgcgtgcctccccctctgcactgcccagagcagttttttcttctggggacgcagggcaacgtctggagacatttctggatgtcaccaggggtaagggcctgctacttgtatctgatgggtggagacccgggatgccaatggcatcctacagcgcacaggacaggcccacaacaatgacacacgtggccggagacatcagcggtgctgaggcggagcacctggtgtctgaggtctcccctgtgctctgtcgctgtcctctcaccctcccccaatcttccaacctagtagttctcagacaactgcgtcagaatccgcagggggcttggtggagcacagagctcccctcagtctctggtttgtgacggaggtgggccccgagaatctttctgcagcagaaagccaggctttctgcaggttcccagtgaggaggacgaggctggcccgggacacgccactgatgctcttctgacccaggggcttttctctcccgcttccgtccctcttccctcgccggcaggtgacgttactggccttttcttttttggccctgcctcccccttggcttctcccctcttcctctcctccactcggtgcctggtgacatgcggccatcctcagagatgtgcttcggggcccgcacgccttgctcctcgcactcttcctgcaccggagccgcggtgcgaggcctcgggaatgctcaccgtttctctcccgccccccggccgcatgctgcagccattccctcaccacatgtccaggagggagccggcatcctttgctgactttcttgctgtgactatggtgctgcgtggaaaaggggccgtgggaaggctgggcaggtggctgctcagagccccacctgacacggtgacccacggggcctggaaattcactgccccgatttccacacaggtgcctgagctcctgcagagaatgcctgagagcgagacgcatgcccgtcaatttgtgctttcaggcgtcctaagcacacacgcctgctcttatttgaaccactccctgtaagctagttccactaaagagtggctttccaccctggctgcagattgcaaccacccaggaatctttttttttttttttttgagacggagtctggctctgtcgcccaggctggagtgcagtggcgcgatctcggctcactgcaagctctgccttccgggttcacgccattctcctgcctcagcctcccgagtagctgggactacaggcgcccgccaccacgcccagctaattttttgtgtttttagtagagacgggatgttagccaggatgatcacgatctcctgacctcgtgatccacctgcctcggccccccagagtgctgcgattacaggcgtgagccaccgcgtcctactttttttttttttttttttttgagacagagtttcactcttattgcccaggctgcagtgcaatggtgtgatctcagctcactgcaacctctgcctcccaggttccagggattctcctgcctcagcctcccaagtagctgggatcacaggcatgcacgaccacacctggctaattttgtatttttagtaaagatggggtttctccatgttggtcaggctggtctcaaactcctgacctcaggtgatccgcccacctcagcctcccaaagtgctgagattacaggcgtgagccaccatgcccagcccacccaggaatcttttaaaaggtaccagttgatgcccagacccctcaattaagtccagatttttaagagattttttttttttaaagctctgcaagtgattccagcacacagtctggggactaaccgctgatataaggtctggaaaatctaagaaaccactctaccccaccctctggtgaccagaagcttatgtctaccagacccagggccttcccttgctgaaacatgctgggtaaactctttgtttcttcctagcagacagcagccctctccctctagctcagaagctacgtcagcagttggttggttggttggttggtgggttggttgggttgtgtctctctttaacttcctccacttctgaagtcacctgcagtgacttggtgtggacttggtcacctcactgtccccccagcctcaggcccaggaaccatgtctttggaggaggctctcctgctggcagctggttgcatctggcatgcttggattcctgcaggtggctggttgcacctagcttgcttggattcttcccagattcacagccatagggtgggcgtttcatgaaatctccaaattccaagggctcttgacagaccacctccatcctgatcagaaggggtgatgccggttgcacggtctcttagagcttaaaactctagcttcttctctgctcctcattccaaactaaacaaattgttgcattggattattctttcaaaatactccttgccttaatgccatcctttagattttggtggctggctcctgttgtggaccgcatctcacaggtggacttcctggtttctgcctcctgttacccctcacagttatctctcccttgagtcctgctaccttccagaaaaataggctccaaacacactttcatcccatcactcccagcatggagttctccagtggcctgttggctacaggacactctccagccccccgcattgggatgtctggccccaatccaccataatgtacttgtctccaatctgctgagctgcatgaatgcccaccccagcccagcgggcactccccttctgcaaacctccaagcacattccccctctgcacactgccaatcttcctgtccccgccccaaatccaaaggcccctcctatggctggggatccactggcagctgcctaacccttcctatgctcctggacgtttggtgcaatctggagcacgctcaagccggcatttgaaataacctggaacacgtttacatcatggaaaatatggaaaataggctgattggcttccactcccttttagagctggcaagaaaaataattgatgactaaacaacctaacgaccaacaaatataaaaagtcatagcccaaccatgatcaaataaggctccagcattcctccttggagggactctgagccatctggtgtcattttcctttccaatccgggaacattctggagatcctgacatccagctaacatgggcgttgcttcctgacaaccctaccccttccattccccagtcactactgcttcaagatgcagtggaaggagataaatcagacacctcagtagcgtgagtgaaagtggggtgtgtggtgagacacatacagaggggagagggccagaggacggcgccgtgcgacacacaccattgctccttttgttcccggtttcggccaagttgtgccgcaggtgactctccaccggctgagctctgtgcatgcagggccagtattctcggccattctggcttagagaaaagctttctatattccagaatggctccaggcctcctcctcctcctattaaatgtgttttaaaagaggtcttagagcccaggcagttagatcttagaaaaagacaaatacagtagaagctggaggcaagcttatcctttccaaagagggagtgcttcctgtgttaatttgttattgagcatgatgaagattcagctccattgagactgagccaagagttgactcattcatgggagcaacataacgggttgtgagaagccaaaggattaagcatctgggagccaagactgatcttgagtggcccagaaatgcaacccaaggatcttgggcccaagggccaggaaggtttctgcagcctcctggagcattcacagaggctccctgtccgtccacttttccctctgttgctgatgtgatggctcctgccctcagcttaccagactcctcggagaggctggcctctgaattggttgaatgggcttgaagggggctggactccatttgggtggatgagcaggcccagtgcccctgtatgaggggaagttgtcttggtaagcctgtttttgtgtcaggtccccaggacaccttcctctgagtctcttgcgtgggagaagttgctggacacgcctctctggctctgtccccgccggcactgtgtgggatccatgctgttctccctccagcccttgccccacctcctggagcccttctctgcgcctggtcactacccgccccccacctccagcattaattttctagggacaaggggcaggggaaggaggagaagaaagagtccttgctgctcctcagagaagacacaggagaagaaagtcggagaggagtggggagccagggtggcaaagccccttcctgctgcccacgcaggtcctggctttctctccacccactgcaccatttccagggctgctctcatggtgggagccggagagacactgagaagaggaaggaaggaggatccaagaggagcccagcacacccggcttctctgctgcccaccctccactctgtcctcccagcccaggcccttcctaggcaaccctggcacgggtcctcactggccacactgaggccatcagcaaagcacctggcctcttcacgccttgggctctgggtctgtaaggcagtgaggctgaggttcctgggacagctgggcactgtggacttgcccagctgagcacaggcatcaggggctagaggggccctagtcccgatgacgaccgagtgccctctccacctggggagcttggaggactttgctctgcacttagggccacgcttcaagcccagtgcctcttatgaccaagtctctggggagaaatgagccctccagtgccaaatgacccaccactaaaaggccttttgaggcagggcctctcctgagcccacgcaggcacgtggtgggagatgagagggtgtgggctcacttcttgacattctgtgtgagtgaggtcattcatagggtgaggggagaatcaaggggacagagggccctctagtccccagcacttgggctcagctggcaagtccacagtgcccggctctcccgagaacctcagcctcaccgccctacagacaaagggcccaaagtgcagggaggtcagtgccacacaggttttattttttcacattattggtgtttaaaattgtaaagattttccacgttacctgtaaccatcaaaccacatgtattgcccccagttaatcaccatgaacagcttggtgtgtatacccctccatattcactgtgtttcttcttccaggaatgagctcattctctatacatcactccgtaacttgttgtttttacctagtaaggagtcatgggcgtcccaccaggtgaatacttgcatgtttgtcttcatcttcttaacaactacctgacactgcagtgtctcagtctgtctgaacttaaacagctagacattgagttctcagagtctggaggctgaaatccaagatgagggtgtgggcaggttctgttcctggggaggcctctcttcctggcttgcatacagctgccttctggctgtgccctcatgaggcagagcaagagacagctctggtgtctttggcccttgtaaggacaccaaccccatcccatgggccccaccctcaggaactcctccaaacccaatcacctcccaaggccctacctcctaatcttacccactggggatgagggcttcattatatgaatttggggtgggggtgcctcaacattcagaccccagcaccatgggaccactaatgtggcatcctgcctgtggagagatgcacagactgacccatccagacagcacagtggagcacgctctttcaacccacctgcacctgaccacagtgggcactcaggaagaaatgggtagagcgagtgaatgaatgaatgagcaagtcaaagacatgaacacatgacatctgactgtctccctgtgtgcttgtgtttcattctgatacatccctccctaaattcatctgctgagacaaaggattttaactggtgtttctacactgctttccccaagatgtggcaacccacaccccaccagcaacacctgtgatgtctgccgccctgtgtccttgtagcacctctcttaccaggtttccaaatgttgctaaactgctgggtcaaggaatagcatctgcctggggttagcctcacttgtgtggattttttcttactcctcttggccactgactgctcctggtctatgcctgttccattggctgcactgtccttccctgcctcttggccagaggctgtcgtgtgtcagcgacagaaacgttttggctgtcgtctgcacagccagtattctctccccatcacgctgggcctcgtgatgatggggggaggggggttgacatcacagagatcccagtgcattttcgacttcatcactgtcaccatcctctcttgttcatttgggggatacagccgccatcagctcaacagagcaaaagagagggaggccacctgcatccgccaggtgctgaaatgggtccaggcagctgccagagtctgacatttccaacttgatacagcacctgtgatcggcagtagtacccatgacaacatttatttaattgaccaaacacgaacattatagaggaaggtgatcatttaaatgatatacttgaaattcatctgagtaaggaagctgagaacagtcaaagaagctaatttaaaaaataaaaataaataaaaagaaccacctaatccgctgatttctaatcatgccgagtgcttatctctcctgccaggcatacagcgagcgccttgcagagtctcacagcggcactgtcttctcttttgcagcactccgtacaaagtgagacctgtggccatcaagcaactctccggtaaggccctgctgtcgttttttaaactaaaagaaggaaaaagaaatcttgagcttgcccctgtgataaaatatatactagttaagcatttgaatctaagcatttgaaatatatatgagttacctttgaagcatttaactatatgttagttaagcatttgaatctgcatttgaagccgatacaactgcagaatctgaaaccttgtactactgtaagggctctgcctttctaaccccagggagaatagcatctgcctggggttagcctcccttgtgtggattttttcttactccttttggccactgcctgttcctggtctatggccgttccattggctgcactgtctgtccctgcccctcggccagaggccatcccaaggactttgcagttgcagggcggcatccactctggtcttcctggcccagcacctgtcctccccgctccactgtgagttgccaaggcaggcatttgtggcccctgggatgccttggggtgcctcatacagttacttgggccgctgtgttacaatcctttttctttttctttttttttttttaaaaaaaaacggagtctggtcctgtcacccagggctggaatgcagtggcacgatctcggctcactgcaacctctgcctcccaagttcaagtgattctcctgcctcaccctcccaggtagctgggattacaggcgtgcaccaccaagcctgggtaattttttttgtatttttggtagagacgggattttgccatgttagccaggctggtctcgaactcctgacctcaggtgatccacctgtcttagcctcccaaagtgctaggattacaggcgtgagccacagcacccagcctagaatgccttttccatttgatttttatcacttttatttatgtgtgatttatacatcataaaatgccatttaagtgcctattttgatgacttttgaaaaatgtgtacacccttgtaaccatcaccaaaatcaagacatttgcaccacctagaaaagctctctcttgccccctccagtgtgtctcagtccacaacggacctgctttctgacatcatccatgagatttctttttgagagtttcatatataagaaattacatggtatatgtactctttttgactcaacataatgtttttgagatccatccatgtgctgtgtgtagagacagttcatgctttgtattgctaagtggtatcccatggtgtaggttgtaccacagggcgtcttccattcactgtggatggacatttgggttgttaccagtctgggggcttttaagaataaggctgctgtgagcattaaagtacaagtattggtggaaacgtatatttttatatatttcatttcacttggctaaatacctatgatacctataaccttgccaacttttttatacagttaaacatatacttaaccgtcttccctaagagtggatataagagtctgtagagtgttccccagtctgggtttgtctgacgtttctctcacgaccagcctgggtgtggtgggttttggaaggaatacgtggggcgcatgacagccaggtaggaccacgagcttctccactgcagagttactgttgatctccttccctgctcttctttgaaagcaagtcacgaagtccagcccacccaaacacaggagagaaaaaccgaggttcgttttctctacacagatattcatttctccagcaccatttgttgaaaagatgatcttttctcccactgaattaccatgacacctttgtggaaaatcgatgggccatgtatgtgtgagtctttttctggactccagatcctgtcgtgtgaatttacatgtcttaaaacaacagcacaccatcttgactaccgtagataaatagtaggtcttgaaatcaggtactctaagttatctctggtttcttttttctttttcaaaaatgttattgcttttattttcaaataaattttagaatcagtctatgaattgcttccaaaaaaacagtctgctaggattttgactgaagttgcattaaatatacagaccaatgtgggaagaattaatatcttaagaatgttgagtcttctggttcataaatatggtctatctccccattcatttgggtttcctttaatgtttctcaataatgtgttaccattgttaatatgaagtacttaataaatactgataaatacatcactatttcatgtatttaatggtactgcaaatggacttttttttcatttcaatttccggtagtttttagtttataggaattggcttctgtatgggaccttgctaaactcatttattaggtctagtacctttttgcagatttcctgtgattctatagatgattttcttatagtgctggtcttctgacaacaaattccttctgcttttgtctgaaaaagcttttctttgctgttttgcttttttttttttcaaagagagagagagataaagtctttgtctgttgcccaggctggagtgcagtgatgcggtcatagctcacgacagccttgacctcctaggctgaagcaatcctccctcctcagcctcccaagtagctgggactataggcacacaccaccatgcccggcgaattttttaagtttttatagggacaaggtcttacagtattgcccaggctggtctcaaactcctaaactcaagtaatcctccctccctgagattacagacgtgagccaccatgcccgactgacagtgtttttatttcatcttcattttgaaagggtattttcttgccatagagaattttagtttcacagttttccagcactgtgaatatgtcttctcattgtgttttagctagtacagcttctaatgagaagtctgtgatgtcttatctttgttcctctgtgtgcaatgtgtctttttccctctggcaacttaagatgttttctttatcactggtttgcaggaatttgattatgatggccttggtgtggttttcttttggtttaacctgcttggtgttcattgatcttcttggaactttgggatcatatttttcatgaaatttggaattttttctgctctcctctgtctctctcctttcccctgggaccctaactacctgaatgatagacagcctgagagcgtcccctgactcactcacactgtttctttctttccagacctttttttctgtttgctttatttttcttagacttttccgtgacgtcttccattgcactggtcttccctcctgcagtatctagtctgctgttaatctcgttcagtgaaattttcatttcagatattgcattcttcatccctaggaattatgtttccctcctttttcgtatctcccatttttacatctcccatttatgcctcattatgtttatatttcctgtaaatgcttatacctcattataattctgtttcatgccattgtctgctggtttcctcctctctgccatatccgagtctgtctctgttgattgatttatctcctgggtatgggtcatatttttctgattctcgtgaatctagtagatcttgatggaatgctgatcacaggaatgcacgctggttcatcatctggttttgtttctcccagttaagagtgttgggctttgccttggcaagcagttaagttacttgcacatcagtttgatgcctttgagccccacctttaagctttgtgagaatggctctagagggcccttaccccagggatagctcagtcctactaagacttgatccctttggggtctcccccaaactcctggctgatcaccaaattccactctggctgtttagagtgcaaatgtttggagatgagaatgaaagcgccagggccttgaaggtcgttgcaaggatgctggcttttatgctgagtggcgtgggcagctattagaaggctttcaggagaggagtgacatcatcacatttgtgttttaaatcttgctcagggcgctgggtcgagatcacgaaagggaagtggcagcaaaggtggaggcagagaaatccaagaggaagctatttttttgggaggaggcggaggcctaggccggggtgggggccatggaggtgatgaggagcgcaggttccagcaggttctaaaggaagagacaagctttttcctaagtggaagcgggatatagagacccatccggggcttctttgacctgagcactgagcgccacggcccagggagggggttgctgcgggtgggcttggtctgctcatcagacatcaggtgcatgaggagcaggcagagtcagggcaggcggcctctcggctgtcggctcccaatggatggtgttgaagtctgggacttggtgaggccagcagggagtgagtgagcaccagcaggaggggccaggcctgagccggacggagaccgaacccatccgtgggagaaggacgctggtgacaggacaccatcgggagcagaggggaagccataaagccctggaggcaggaagaggcaaaggctggccgggtgtgggtgaggtgctgcagggctctcgcaggccagcgaagacaggcgagatggctgtgctcagagttagaagagcatcgctgggagcagaggaaagagggatttctgtgtcacctggggacccatccaggaccagtgggagatggagttgggctcattgagggaaagaggtgaatggaaggaagttggaaccagctgtcctaaggccggagctgctcctccctggaggactccggcaaaggctgctggccttgggctgtgcgggcacccagtggctgagagatcgttgccctctgcagccctcctgcaacttggatcctaggagccacaaagaggcttgaaaaataatccatcctgagaaacacaaaggctcacattaaacttcgcatcgtaaagttttgagtaaaagaacaataaggggcatttctgctaaaggtgccaggatgagaaaaagcaggaaacagtgctgcaccgccaggctctgcaccgtctctacagagggctggggttggttcaggagcattcggcccaggctgtgatctcgagaaggtggtcagggcccaggctcccgccagccctcacggcagcacgaggctggtacgagacaggtgcttcaggtgtttgttgagagctgcacacacttctgctgggctgggcaagacttccctcttcagagaggatgagcggccacacggaaggccaggctgggtgtccctccgggccagccgaggagcgctgcgcttattccgcagtgaggagtcgctggctgtccaggggagctgcattttcctagcagcgacaacccctcccacatctccatagtcacatcctggctgggctaacaccacctttccccgcctctgggtgcgtggggaccccgctctccaaataggccagtgttccaggcttttctttaggagacaaagtcggtgtcaggtagaccccccccaccccaccaaacacacacacacacacacacacacacacacacacacagctttcctgagaaatgtgtttacagaacattttttccatttggggtttgtccttaggaattcttcactctctctatggcaacaaccttccctctcccgtccatcggccttgggtcccagagccactgagccgtggcccaaggtcaggagttagctctagcgacgccgccctgagttctggcctgtaagcaaccccaggtgcccttgtgaatcaacagaccacatttccagtggcagaaaaggaaatgggagctgtttctagactagcacaaggctcagggggtggggggtgggggcagggtgcagggaggccaacgccacacagccccacacccagcctttcccaaggccctgggttcctcactgattctcagcaggtttcagtaaatgcctctaacgggcccggtggaactgtgcaatgcagaaacaccccagggttttgctgttttgctacttaaatattcaggaaatagtaaagagaagagtattatcaaaaacgtgacttttcatagaaaagggagaataggccagccctggcctgggtccacaaccccagtgtgagctgcagagacttctctggagcggtgaacagctcctgccaggaaagagcatggcacagcctcgttctccagcgtagagtagaaggaatggccccgtccacgcgaaggtctgtgttcaccaagcatcttctgtagaaaaatgctctcttcgcctgatcatgggagggaatcaaatggatagagcatttatcccttttgtgactaaaataaaggtaatagcaactacaaaaaccacgacacaggcttctcagcatctttttataacgatagtgctgattttttggaaaatccttgagcctcaatcacttttatttgatgtaagccgctcaaactcaaagagtgttgttttccagattataaaacacagatctcagctgatggcggttgacgggtgtcccccgagtgccctcggctgccaggagctggcaggggagatgcctgtgatgaggattgggtgctgtgatcacagcacgcgggaaaaggacagggcctccctcagcgtggcagatcgcgtgggtccatgggtccgtgtgatctcatgaccgtatcaaggggattgtgtctttttgaccagagcgttagggaaagcgtgctgcagtcacacgccaggacggccccccacggcccaagtcctataggagagccaggggccatcacgattttcttaggcacagcagcagttgaaccgtgctgtcacacttaacccaagtgatgacagcctcttcaactaggacagtgctgtaggggtctggttctgcttgttctcccccacattcctgcctgccctaggacccaggacctgtctctagtcacacacaccctgttcagcctctgcatctggcccccgcggagacccacaccacattctactcccctggccagagaccgagggtgactcggaggcttccagttcccagcagctttattggcgttgctgtttccatagaaggacaataaaagggggccataaggaggcgcatccgcagagtgcgtgcttgagcttctgcaagccagaggaggccggcggccggcagggtgggcaggctggctggctgtgccccacaacatgcatgtggagaggttttgggggcagccatggaaccccggagctgcccccacatgagagttcccccaggtggtgaccaaatgcatttacagtccagccgcagtccagatgcagatgcgctgtaactgtagaacacacagcaaattctgaaggcttagtatgaaaaagaatataaaaatctcagtcatttttatattgatttcatgtttcctggttgagatgtcattgatataacataaagcccaccattttaaagtgtacaacctcagccaggcatggtggctcacgcctgtaatcccagcactctgggaggctgaggcgggcagatcacctgaggtcaggagtttgagaccagactggccaacatggtgaaaccctgtctctactaaaaatacaaaaattagccgggtgtggtggtgcacatctgtaatcctagctacttggaaggctgaggcaggagaatcgcttgaacctgggggtagaggttgcagcaagccgagatcacaccactgcactctagcctgggtgacacagtgagactctatctcaaaaaaaaaaaaattgtacaacctcagtcttttttagtgtcttcattttgttgtgcaaccatcaccactatttaattccagaacatttccatcaacccaaaaagaatccctgtacctgtgagcagtcccccctccatccccttcaccccccagcccctggcaggccctgttctctgtcctgtgcattctgacctttcacataacagaatccgtggcctttccagcctggcttcttccactttgcacacggtgttgcaggctccccgcgttgtggcatatgacagctctttgttcctttatggctggatgacgttccgttgcgtggctgcgtcctgtggctgcattgtgtggctgtgtcacgtggctacgtcacgtttggttgatccgttcatcagctgatggacatttgggctgtttccacaaaggctcttgtgaatgatgctgctgcaaacgtttgtgtgcaaatttttgtatgaaagatacatggtgaaatgaggtattttgaggtacattggattaaatgagatattaaaaatttttttaaagtctagccgtcttgaaggggagggcctgagagaagtgctgaaagttcacagcagaggataccggatgctgcgggtgtgccaggctggcctgtccaggaggtccctgcagcctgggtgggaggtcccttacccactaatgggtgcctcctccaacccctgagtccccctacctgaggacttcctctgtgtgtggcatacgcggctgccccgaggtcagtcctccccagtgaaagggagctgaaggacaggtgcccagcttctttgctccacagtgggaccaatctctgacatcatcaatgcagttgctcaaagggagctcagagcgaggagtcacctgtacatcaactcaccctctgggagctctcttcccttccatgcctcaatcccccactccctcccagggcttcctgggctggcctccaaatgcaccactagcccccagctccttgtctccggtgggcttttgaggatttccaactaagaaccttagactccaagacaggtcaagccccctggcatactcatttgtcatttggatgaaatagccttaggagagctacttaaccccactgaacttccatttccctgacaaaataggaattctaatgcataccttgcatggttcttggaggataaatgaagtaatttatgcaaaatgctgagcacagtgcctgccacttggtaagcgcccagtaaatggttgttatcattgaaaatgacttagggggcatttttgaatggctaaagttatgtctctctggaattgctgaattttaatagaacaggaatgcttcctaaggtctaaaacaaaaggcggaggactggctgtgtctgccctggaagccaagttaatgctggatgtctgcgcatagacatgttgctcatgagaaataataatgctccttaataatattgtctatttcagtgcaatttcagtctagaaggctttataagcaaagccacagtcatccttacttgcatttttttgaaacaaaaagactgcagtgtataaatgaaaaataaccatttctggaatggtgtgttcagacggattccccttagagtagcctagccaacaaagacagcagcagcccttagcgtgccactgtcagagatattgatggcaaacagtaatacggaagcctgcggaatggaagtgtcctgacggcagatttgagtaaaatggagatgatgacagctgaacattgctgcacggacctcaagactgcaaacgttaggactgccctccctgctcctaggcatttgtgagaaccaggccaacccatacccacccactgctgtgtcctgcctgactgcactgaaatgcacagatcctgtgggtgcagtttgatgagttttgttttgttttttgttgtttttgtttttgaggagtttcgctcttgttgccgaggctggagtgcagtggcgcgatctcggctcactgcaacttctgcctcctgggttcaagcaattatcctgcctcagcctcccgtgtagctgagattacaggcgcatgccaccatgcccagctaattttttgtatttttagtagagacaaggtttcaccatgttggccaggctgatctcgaactcctgacctcaggtgatccacctgcctcagcctcccaaagtgctgggattacaggcatgagccactgtgcccagccacagtttgatgagttttgatagaagtgcatgtgttagatctttcaggaatcaccacccaaaccagaaataccatttgacccagcaatgacgtttatatatatacccaaaggaatataaatcattctattataaagatatatctacatgtatgttcattgtagcactattcacaatagcaaagagatagtatcaatccaaatgcccatcaatgatagattggataaagaaaatgtggtacatatacaccatggaatactatgcagccataaaaaggaacaagatcatgtcctttgcagtgacatagacagagctggaagccattatcctcagcaaattaatgcaggaacagaaaaccaaacaccacatgttctcacttataagtgggagctggacaatgagaacacatggacacagggaggggaataacacacactggggcctgttgggagggttgggggagggagagcatcaggataaatagctaatgcatgctgggcttaatacctaggtgatgggttgacaggtgcagcaaaccaccatgacacacgtttacctgtgtaacatccctgcatgtcctgcacatgtatcccagaacttaaaattaaattaaattttttaaaagtgcacgtgcatgtaaccgccaccacaatcaagacagaggacatttccatcaccctagaaaaatgtccccgtacccccttcaaggcagtcctcactgtggagtgctctgcctatttttgagtttcacggagttgaaatcatacagcacgagctctttgtgtctggactctttcactcaacatcatttttgtttgtttgtttgtgtgtgtgtgcgtttgttttttgagacagggtctcacgcctgttgcccaggctggggtgtgaggcacaatcatggctcactgcagcctcgacctcctgggctcaggtgatcctcccacctcagcctccgagtagagacatgttgcccacgctggtgtcgaactcctgggctaaagcaatccgcatcatgatgtttgtaagatccattcgtgcagttatttccttttgcactgctgagcactgcatgcctcgctcattcattcttctgtggagggacatttgggtcatttccagtttagggttcggctactagaattattgtacaagtcttattgtgggcatccttgtccatgatcttgggtccacctaggagttaaatggctggctcatatgctgtgtttgtttaacttaagacttacttgttaagtgtaagaaactgccaagctgggccgggcacagtggctcacgcctgtaatcccagcactttgggaggccgaggcgggcggatcacttgaggtcaggagttcgagaccagcctggccaacatggcaaaaccccatctctacaaaaagtgcaaaaaattagcagggtgtggtggtgtgtgcctgtagtcccagctactcaggaggctgaggcaggagaatctcttgaacctgggaggaggaggttgcagtgagcagaggttgcgccactgcactccagtctgggcgacagagcgagactccatctcaaaaaaaaaaaaaaaagaaagaaaaaaagaaactgccaagctgttctaccaagaggttgtaccattccacattcccaccagcagcatctgagtgatccagctgttccacatccctgcaacactaagcattctctgcttacattttagacattcgagtaggtgtaagagcaatcctatcttcttatagttttaatttgcatttccaagtaacttaatgatgttgaacatgttgctatgtcttattgactatttgaatgtcatattttgtgtagtgtctgttcaacaatactttgctcaggccaggtccggtggctcacgcctgtaatcctagctctttggaaggccaaggtgggtggattacctgcggtcaagagttcgagaccagcctgaccaacatggtgaaacctcctctctactaaaaatacaaaaattagctgggtgtggtggcaggtgcctgtaatcccaggtactcgagaggctgaggcaggagaatcgcttgaacccaggaggtggatgttgcagtaagctgagatcgcgccttgcactccagcctgggtgacagagcaaaagctgcatctcaaaaaaaatatgtaaaaaggattttgctcattttttaagctggcttgtattatttttgtcactggtttgtaggaaactctacataagctaggatataattcatttgtcagatatatgtggcaaacatttttcccaatttgtgatttgcctttttcgttttcttaatgaggtcatttgatgagcagaggtttttaatttggtgaattccatccaatgtaacaagtttttctgttgtggtcagtacttcttgtgtcttctctaataagttttgtttttttttttttttgagacaaggtttcttgttgcccaggctggggtgcagctgtgcgataagctcactgcaacctccgcctcccgggttcaagtgattctcctgcctcaggctcccgagtaactaggattacaggcgtttgccaccacgcctggctaatttttttgtatttttagtagagatggggtttcaccatgttggccaggctggtcttgaactcctgacctcatgatccacccacctcggcctcccaaagtgctgagccaccgcaccaggccccccaaattgctaggattacaggagtgagccaccatgcctggccctaataattttttttatcccaaggtcatggagatacattttagaagatttagagttatagctgttatgttttttcttaatttaaagaaaatttttaacaacccaatctgttgagatgttatgttttaatctgtcattcatttcaagttaatgttgtgtgtgttgtgaagtagagactgccattcattttcttccccacgctgacacccagctgttactgcaccacttgttaaaaagactccttttcccgctgaatccatggctcctttgttgaaagttaatggtatctctgtgtttgggcctctcgctgaactctgttctgcttcattgatctatttgtctatcctcacaccaacaccacactggctacgttactgtgccctggaatcaggtactctaagttctccatgtgttcttcctctgcatttgttttgactgtataggttcttttcttttccctacaaattttaggatcaacttgtcaatttcaaaaaaaaaagccatctatgactttgattactattttatttactatataatttggggagggtagtgtcttaaccatactgagtcttccaacccatgaacatgatacatccctccacttatttaggtctcatttaacttctcaaaaggttatggctttcaagataaaggtccttcatgtcttcggttaactttactccaaagtgttttctgttttctggttttattgtgaataagatttcattaattttccaattgtttgctgctagtttataaaaatataatagatttttggatgttggcgttggatcctgtgaatttgcttaattcattggttagttctagttgttgttttataggttcctataattgtccacagagacaatcatgacatctaagaataatgacagttttaattattgcattccaatttttggcttttatttcttttacttgtcttgttgtactagttgaaactgcaatacagttaaataaaagtgagagcagacgtcctcgccttgttcccaatcttagaggagatgccttcggtctctcaccattacatacgatgttagccacagatttttttgtggatgcctttcataaggttggaagtccccgtctaatgttagttttctgagagttttttgtctcatgttctttgacaaaattctttgttaacttttatcaaatgttctctctacagctactgaggtgggttgaggaggtgtcctctttttccttgttttctaatggttttgtcccataaagaggtattggattttgttccagtacctttctgcatctatgggatgagcatacatatggtttttctgctttattctattaagataatgaataatactgattgattttcaaatgttaaaaccactttgctttcctagggtaaatgcacttatatttccaggaaatgttcctaggaaatttcctggggtaaactcacttgtatttccaggaaatatttccaggaaaatacttgggaataaatgtaacaaagtatatgtaggccctctccctggtgtgtttgctttttatgtattgacttgtttttgtttttgtttttgttttgagacagtgtcgctctgtcacccaggctggagtgcagtgctgccatctcggctcactgcaacctccgcctccaggcttcaagtgattctcctgcctcagcctcccgggtagctgggattacaggtgtgcaccaccacaccagataatttttgtatttttagtagagacagggtttcaccatgttggtcagggtggtctcgaactcctgacctcaggtgatccacccgcctcagcctcccaaagtgctgggattacaggcgtgagccacagcacctggccgcttttcatgtattgctagatttgatttcctaacaattcgttaagaatgtggctgtctatgcttaaatgggatattgatttgtaattttttttcttgcagtgtctttgtcatgttttgatattggccctatagtggcctcataaaacacattgggaagtttactttcttctgtattttctgaaagattttatgtaattttggtattattttgtcctatgtccctttacacttaatgtatttgggttttttgtgtgtgtctttttaatagttaataacaatgtattttattcttgaaaatcactgagagtacattttgcattctcaccacaaaaaaaaactatgtggcataatgtgtatgttaattcacttgatttagccattctacaatgtatatatttcaaaacatcatcttgaccatgggaaatgtatctaatttttgtcaatttgttaaaactttttttttaattccaatttttttttttttgaggtggagtctcgctttgttgcccaggctggagtgcatgaccatgggaaatgtatctaatttttgtcaatttgttaaaactttttttttcattccaattttttttttttttttttttgagatggagtctcactttgtcgcccaggctggagtgcagtggtgcaatcttggctcactgcaagctccacctcccgggttcacgccattctcctgcctcagcctcccaagtagctgggactacaggcgcccaccaccgtgcctggctaacgtttgtatttttagtagagatggggtttcactgcattagccaggatggtctcgctctcctgacctcatgatccacctgccttgacctcccaaagtgctgggattacaggtgtgagccaccacgcccagccccaacttttattttacgtacagatctaaacgtatcacatgcaggtttgttatgtggtgtgtcgcacccagatggtgagcagagcccccaagtctttgttgatatggttggggttagctctcccagtctttgttcatatggttggggttggctctaccagtctttgttcatatggttggggttagctctaccagtctttattgatatggttgaggttagctctaccagtctttgtcgatatggttggggttagctctaccagtctttgttgatatggttggggttagctctaccagtctttgttgatatggttggggttagctctaccagtctttgttgattagctctcccagtctttgttgatatggttggggttagctctaccagtctttgttcatatggttggggttagctctaccagtctttgttgatatggttgaggttagctctaccagtctttgttgatatggttggggttagctctcccagtctttgttgatatggttggggttagctctaccagtctttgttcatatggttggggttagctctaccagtctttgttgatatggttgaggttagctctaccagtctttgttgatatggttggggttagctctacctgtctttgttcatatggttggggttagctctaccagcctttgttcatatggttggggttagctctaccacgttgctatttgctgtttcttgatcttgggttttgtttttctgttcctccttttctgccttctcctgtgttaattgaataaatttttgttttccattttattccttctgctgactctttagctgtctctttttgcattatttttcctcggctgttgtaagtgttacaatatgcatctttacttttttttttttttttttttacaattgatagactttgttttttagattcacggcaaaattgagtgaaaagtgtggagctcccacatgttccccccacacacagacattcagcctctgccaccgtcaacgtcctgcatcagattgtatattggttacagccgggcgcactggctcacgcctgtaatcacagcactttgagaggccaaggcaggcagatcactggaggtcaggagttcaagaccagactggccaacatggtgaaaccctgtctctactaaaaatataaaaattagccaggcgtcatggcgcacacctgtaatgccaactacttggcaggggaatcgcttgaatccggaaggcggaggttgcagtgagctgagattgcatcactgcactccagcctgggcgacagagagagactctgtctccagacaaaagaaaaaaaaaagactgtacattggttacaatcagtgaaccaacattgacatatccttatcagccaaagtctatattccacctcagaattcactctcagggctgtacattccctgggtttggacaaatatatgatgacctgtgtgtcccatcccagtctcagacagaatcggttctctcagggctgtacattccctgggtttggacaaatatatgatgacctgtgtgtcccatcccagtctcagacagaatcggttcactgccttcaaaaccccctgtgcgccacctattcatccctcccgccccaagccccagatctttttactgtctccatagtttggccttttccagaatgtcacatagttggagtcatacagaataaagcctcttcaggttttctttcacttactaatatgtctttaagattcttttatgccttttcccggcatcttagcattgaagcatattccatggtctgtatgtatcacagtttatttgcccactcacctattgaagagcatcttggttgcttccaggtttgggcagttatgaataaagctgccataaatatttgtgcacaagtttttgtgtgcacataagattttaacacatttggataaataccaagaagcacaattgctggatcttttggtaacagcatgtttagttttgtaagaagctgccaaacggtcttccaaagtgactgggccattttgcattcccagcagcaatgaacgagcattcctgccgctccacatcctccccagcttttgtgtttcagtgtcttggattttcaccactctgataggtgtattgcagtatcttcttcttgttttattttgcaattccctagtgacatatcatgataagcatcttctcatatgcctgcttgccatctgcatgtcttctttgaggtgtctgttcatatcttttggccacttttaatcatcctgaacttttcacaatctatttagaattaatactgtaccgcctcacataaaaaataaggacactgcagctatataagtctacttactcccctctcccaccacctttgagttattgtgtcatatgttttatatctgcatacattttaagccccataatacaatattataatttcctttttttttttttttttttttgagacggagtctcactctcttgcccaggctggagtgcagtagtgagatctcagctcactgcaacctccacctcctaggttcaagcgattctcctgcctcagcctcccgagtagctgggattacagatgtgtgccgccacgcccggctaattttttgtatttttagtagagacggggtttcatcatcttggtcagactggtctcgaactcctgacctcaagtgatccacccgcctcagcctcccaaagtgctgggattataggcgtgattataggccactgtgcctggcctataatttcttatttaaacagctagttgttttctgaagaaattatgaaaataaacttccagatagttttttaatagttgcctatatatttgccatttctgatgtttttatttcttctcaacttccaacttatattatatcccttcactctaaagcatttcttttttcttttaatgtttcttgcagtgcatatctgctagtaactaattctctcagcttttgctgattggaacatgccttttttttttttttttttttttgaaatgatgtcttgctctgtcgcccaggttggagtgtacaatcagttcactgcaacctccgcctcctaggttcaagcaattctcctgcctcagcctcccaagtacctgggattacaggcgcccaccaccatgcccacccaggcactccacccaggaggtggaggttgcagtgaactgagatctcactactgcactccagcctgggcaagagagtgagactccatctcaaaaaaaaaaaaatttttttgtatttttagtagagacgaggtttcaccatgttggccaggttggtctcgaactcctgacctcaggtgatccacccacctcggcctcccaaagtgctgggattacaggcgtgaaccaccgtgcccaggcaaggaacatgcctttattttgccttcattgtgaaggatgagttttcatggtgtggaattctgcattcacagtttgttttcttcaagaagcttaaagatgttgactcactttctttctggcctccattgtttctgatgagaagtcagcttaatttgatcattattcctctgtatgaagtgtgtctttcttctctggctgctttctttggggtttgtttgtttgtttgtttgttttgttttgtttttgagatgaagtttttgctctgttgcccaggctagagtgcagtggtgcgatctcggctcactgcaacctccgcctcctgattctcctgcctcagcctccaagtagctgggattgcaggtgcccgccaccacgcccaactaatttttagtagagacaggatttcaccatgttggccaggctggtctcgaactcttgacctcaggtgatccacccacctcgggctcccaaagtgctaggattacaggcgtgagccactgtgcccaggcctctggctgttttcaagctgttgatttctttcctttatctttaggtttcagcagttggactatgatgtgcttcagtctcattttcttcttatttatccttcttcatgttcattgagcttccatggactatgaatttaccttttcagcaaatttgcaaaattgtcagccattacgtgttatatgtgccattctttctcactaatgacctgtatgttagaaagtttgctgttgtctttcaagtgactgcagctttgcggttttttataatcttttttttctttgcccttcaaattgggtaatttctgttgacctgtccttgatttccctgactcttccactgactccagacttctgtaagttgatccatgaagtttttttttgtttaggatattatattttaaaattctaaaatttgcacttgactcttgttcatagatttgtctctcgagactcccctctgtttacgatttactgacgccgcttttgtttcggtgtttgcacgtacctgcaattgctgcattaaagtctcgtttgctcattttggcatctgagccggcaagcgtccagggtgtctgagggatgattttctcttggccatgggtcacattttcctatttctttgcatgtctattttttattgtagactaagattatgaataacacctaggagagacattggattttgttatcatcctctgaagagtgttaattttgctccagcagtcagttccgttactcactgatcatctgaacttcgtgcagcctggttttatgctttgttggggtagatctctagactgacccttctgtggttttagtaggaagcctgaggtatttatcaagcctctctaactcgactacatttaaactccaaactttgtctcctccacagcaggagctgaaacctctgccacactaggcccacaaacatgcgtcattcagggatccaccaaggaacagggtagtttatacagaatttgggtcccactgccatggcttcctcctttgggaactctcctttccatttccatcctctctgacaacctaaaactgtgtcatctgacgcttcaacctggaactttctgcttaagttttagccatctacattataagggcactttatagcaagaaatagaatattattccattctaggccaagtacagtggctcacacctgacatctcagcactttgggaggccgaggtgggtggatcaactgaggtcaggagtttgaaaccagcctggccaacatggtgaaatcctgtctcttctaaaaaaaattttgaaaaaattagccgggtgtggtggtgcatacctgtaatcccagctactcaggagctgaggcaggagaatcccttgaacctgggagccagaggttgcagtgagccgagatggcgccactgccctccagcctgggtgacagagtgagagtctgtctcaaaaaaaaaaaaaaaaaaaaaagaaatattccttcgttcttttataggagcatagtacttcattttgtagatgtactattgtgtatcctactgatagatacttgtgttgcttccagtcttgtttttacagcgatcagatggttcttcttaatttctcttgctacaaatgttgctgctgtgtacaacctgttaaagtccacagatggaataaaagctttggtttgcaaaaatgactcaatctttacaaacattctgtcatttgtaccataatcaattagtttattggatcaccgaattgcctgacagaatccttcctggaactagtctatggggtcatttggcatagagtcaaagcctcagacacgatgagccagagttgatttcctttggcttcacataattaaactttcccagaggattatcaggttacagtgacacacacacaggctgtcagataatggacaaagtcccagcagcgtgtacaaccagctggtggctcccaaattcaaattcccccagcggcatccgttcggttattcgtacccacaccctcccttagaagtttacccctccgccaggcgcagtgactcacgcctgtaatcccagcactttgggaggccaaggcgggcggatcacctgaggttgggagttcgagaccagcctgaccaacatggagaaaccccgtctctactaaaaatacaaaaattagccgggcatggtcacgcatgcctgtaatcccagctactcgggaggctgaggcaggagaatcgcttgaacctgggaggcggaggttgcggtgagccgagatcatgccattgcactccagcctgggcaacaagagcaaaactccatctcaataaataaataaataagttcaccccactacgggcaagaagccacacagaaagaaaaataaaataggtatctctggggttttctgaagggaaagtaagtgcagctctgtcccgtctttgcagctctaaataggaacatggtggagtagggcaggtcgggcttgacgatgtcatgacttggcctctctcagtgtcacgcagcccctgcaggttataaggaggattgagctggccaggcacagtggctcatacctgtaatcccagcactttgggaggccgaggtgggcggatcacctgaggtcgggagttcgagaccagcctggccaacgtggagaaaccccatgtctactaaaaatacaaaattagcccggcgtggtggtgcatgtctgttaacccagctgctcgggaggctgaggcaggagaattgcttgaacccgggaggcggaggttgcagtgagctgagatttcgccattgcattccagcctgggtaacaagagcgaaactccgtctcaaaaaaaaaaagaaggatagagctaacatgcatgaaccacctagaacagcacccagagcatagtaacagctccttgcagatgttacagtaccttgatctatacaacagtaaagggaaatgcatgctagctgccccagatgctgccagcttcacaggcatttttctgcctgcaaactaatcctaaggaagagaggagggcagggggagaaattgcacccagtcaaatgtaaacgatacaaaatgtgaaattcccctctctgaaaatgaaagggaaaaaactcgattcaatgcctgcccctgaggtgaacctgaaatgacaaggcagacactctctagaacttcacgtttggccaccagggtcttcggttgattttcctttcttcgtcatatctgagtggctgaaacgccagtgatctgggatagtcctttggctgctgatagacttatgcaatcccttggcaggcaggacaggccagaggaagggctcctgtgcctttaaggtcactgttaatcatgtaactttattgtgttcctgggctataaaggaaatgtcgtccttgatctgaatgtctgttttatgatgtccataaacagtgaattgccagtgactgtaccctgagtgagaacatcctcagccagttgaatagttcaagggcagttgcaggggtcaggagagagcaaaagtgggacagaagatgagtttgcttcccaggaagagagacagtgccaccccacccctcgctgacagggaagccttccagcccttcctccaaagagccttggctctcaggggttggaggttggacaagagcagaaataaaggcaccctgctcccaccccccacaatcttccggacgtctagagtgcttatctctttgggggcaagtaatgtgaattattttccctaatgcaaaaataaaaaataagagaccccttttacccttttctgaaaggatagcagaggtatttttcttttcttttttttttttgagatggaatcttgctctgtcaccaggctggagtgcagtggcacaatctcagctcactgcaacctccgactccctggttcaagtgattctcctgcctcagcctcccgagtagctgggattacaggcacgtaccaccatgcccagctaatttttttgtatttttagtagagacggagtttcaccatgttggccaggatggtcttgaacttctgacctcatgatccgcccacctcagcctccagaagtgctgagattacaggcgtgagccaccatgcccgtccagcagaggtattttttctaatacttgagaagtgtctgctaagtatgtattcaccggagggtgctcagcacctcgccctgttgctctgggttgggactaacaaggtgaaacatggctcattgcatcatattaatagcatgcaaatctaagcccagtgatgccgtgcaatggctacgatcaagggcaatagaatggatcgtgcatgagctcccaggccacacacacacgcccttgtgatgtattattccctctactcttgcaggtcggtgcttgggatgctagtgcccaagctgatgttcctaggtcacctccctcaatgcatgggtctaggggccagcatgttctattgctagggccatgtgtgcattcgtttgcctaggggagaaaagtacacattcccatcagctcaggtgcgtggaggacggaagaactgctgttgctgctagtattctcttcagcacaagataaaaaggagataggcaaatcagctggctggccaatcaaattaacttattgttacactaatttttagaatcagaattatgggtcaggctgtgctagcaatcagtgaaatcaaatttcatgtcattctgcactgggtagactcaggatttgcctgaaacaagtaaacaattcctggaagaagtgggcgaggcagaggcttgaactatccactcagaccaaggaggagtcaggcaatggcttctgggcatcgtgtggggtgggggcagcccctgccctggacacccgtgaacacggaggcagccgtgtgaacaccatgaggcagggtgtccatcctgccacccacacagctgcgtcctgcccaggaatgaggctggcagcccataggcccctccttggtccctctagaggtttgcttcattccagtacccttggttctgtcaagtgggcagggcctgggcccctctgctgcaaacccatggcccaaagcggacctgatccggcagcatctaaaaacaggacccggagaatctgctggactccaggattgccctggaacaaacctaaagtctcctatgacatgcaaacaattctgccagccccggccagcattccctgcatgtgcttatcaagtgaggaggccagcaggacttagcacccaggtgagcacacttcattgagtccaggtgtgtgcagatgagaagcagccaggagttgaggctgaagaggagcctacctaaacctgtcattacaactgattgatccttggtgtagtcaaatcttctgcctttatgaaagtcatggtatctagaggtaaatccccatcagcttggagcagcaccatgaaatccactctagcatgcagactcgggggcacttttagatattctattggttgttcttgggggacagcttcctttggagaacatgtgagttgtctgtgaatatcagcttgctctccctaggtttccatcacatggatcagcgagagttaatgctgactccccctccctcgggggcttatttgcaatctcccgatttgctcaaaaacttccaggtccagagggaccctaaagaccctgtcatgtccccctgtgaattaccagcatcccaggccattgctgggttttcttaaaactattaagacactatcaacgtgaaatgacttgaataggctttaatttttaaaattcattatacgtcctgcagcatttaggaaaaagagggaggtgtcacacataatatcaaatttggctgacacaaggtgattttgccacgaaggttgggaaggatgaacatttgcaattgaaaactgtttgttgcccccagaatccagcggtttcaggctctctgaggattccagaggtgctagagggggtaaggccacattcaggtggtgcaggtgggattcaccccttcacagcctggaggtggtgcccggagcgcaccctgtcaccccaaggatgatgacaccccagggaaggtggtggaagcaggaaggggaggtcagaggaaaactggggccctcagtgggcatccgtgatgcggaaacactaataatgccaacagcaatagcagaggcaggcagggcttacgtggccagggctgggctggtgctgtcctgagcacttgacatgcatgaaatcacagttgttttaagttctgaactcccctgggaggaaactgtggccacagcaggaattccaatgattctagggtcaggagaggaggcacccacttcctgatcagggctctgtttgtggatgcgtgggtgtggttggcctttgtgcacactggtggttttgcttctttcccccagcaaaagaatgcagattttgcattatctaaagaggcggttccgtgagcccactgtgctgagtcacatatattccatcggtgtaagtaccaccacctgggcagtgcccctggagtgttctcactgggagcgcagctttgtgtctgtacccttcctgagaatagctgacatgctggcctgggtggcgcattggccgaggtgtggctatgacagaccaggataccagcatctgccccagcactgaactgagcacaccacagaaggtgtggacagagtggcatgaaacatgacagctgcttgtgctcgaaattagatgtagccacacaaatcctgtcgtgctcaaagggttccatctccaaagtccaaaggaaaactcttccttaactgttattccattctgtctatacatttcttattttgaagcaaggataggttcacacgctgctgtaatgatgcatgcagagaaagcccactcatggcccggtttctcccagtggtgacatcttgcaaaactctagcacaatgtcacagcctggcattgaccgtgacacggtccagatccggaacatggcgtcccccacaaggatcccacctgccgctctttaatagccacgctgcttcccttccattccccactggatccctgtcccctggcaaccaagaggtctctctcttttttgtttttgtttttgttttttttttgagacagagtttcgctcttgttgcccaggctggagtgcaatggcacaatctcggctcaccccacaacctccgcctccagggttcaagcgattctcctgcctcagtctcctgagtaggtgtgattacaggcatgcaccatcatgcctggctaattttgtattttcagtacagacggggtttctccatgttggtcaggctggtctcgaactcctgacctctggtgatccacccacctcagcctcccatagtgctgggattacaggcatgatccaccatgcccggcctctggtctctatttgtatgatgttgtcaattctgtaacgttctacacatgtaatcatgcagtaggtgactttgggattggcgccttccacccagcacaaccccctggcatccatccgggttgtcgcctatatccgtggttcattcccttctttctgagtcatactccgcggtatggatggaccacggttggttcaaccattctcccttgaaaggcatctgcatcgtttgcatttgggactactacaaatacatccgccaggaacatgtggacaggcctttgtgtgaacatcagttctccgcgtacatcatctctctgccctggtgcttgcatctttagttggttttttctgtcttttgaagaacctaccagactgttttcagaatgactgtaccatttttcattcccaccagccacgagtgagtgagccgtgtttccacgggggttggcattattttgtatcccagccattttgataggtgtgcagtggtgtctcactgtggttgtaactggcatttcctaatggccgagtggctctcagcatctcttcatgggcttctttccatctgtgactttctccagtacccatctgctcatctcttgcccgctttcaagttggctggttttgttttctaccattgagttttgaccattctttatacatgctatctgcaagtctttgtcagatacgtgtcttgcaaatattttctgccacaccgtagcttgtcttgtcatcctcttaccaggatctttctctgagcgaaaattttcattttgatgaagtccagtctatccatttttctttttctggtttgtgtttttgctgtcaagtctaagaactccccaccttaccgaagaccctgaagatttctcctatcttctctctgtgttttatagtttcatgttttacatctgtggtccactttgcattgatttttatataaactgaattctaggtcaaggctctttttcttgttggcctgcggatatctaatttttccaacactactgaaacactatttccaacactattactgaatgccaccacgcctggccatatatatatatatatatatatatatatatatttttttttttttttttgtagagatggagatctctctttgttccccggctggtctcaaactcctgggctcaagcaatcctccaacctcgacctcccaaagtgctgggattacaggcatgcgccactgtgtgtggctggtattttatttataatttcagtgtctacatggtcattgctaagctttcttttctctgttgaattgcttttacatctgggtcaaaaatcagttgggcgtatttgtatggacatggtcataggccctctgtttctttccattgctctacctgtctgtctttctgccagtacctcacagtcttgattaccgaaattatgtcataagtctcaaaaataagataggctgattcctctcattttgtctgttgtttttcaaaattgtttttattcttgtgaatcctttccctatctaaatgttagaataatctctatttctacaaaaaaaaaaaaaaaaaaaaaaagtcttgctaggctttcaatgggaattgtgtaaaacttgtttacctatgtggggagaatttactatgttgagtcttccaacccattaacatggtcagtcttgccatttgtttatatcttctttgatttctttcatgaatgttttgtagttttcaacatacaacttctgcatatgttttgtcagtttgacacctaggggcatttttgagtgactgtaaatggtactggtgtttgtttgtttgtttttgagacagggtctttgtccctgaggctggagtgcagtggcatgatcgtggctcactacagcctcaacctcccaagctcaagcaatcctcccacctcagcctcctgagtagctggaaccacaggcacatgccaccacgcctggctattttttttttttttttttttttttgtagagatggagatctctctttgttccccaggctggtctcaaactcctgggctcaagcaaccctccaacctcgacctcccaaagtgctgggattacaggcatgtgccactatgtgtggctggtattttatttataatttcagtgtctacatgatcattgctagtatatacaattgtagtaaatacaattgaattttgtatgctttccaccctgcaaacttgctaaactcgcttcttagttctaggagggttgtgtttttttgttgttgttgtttgtagattcattggggttttctatgtagacaacatgtcattggcaaacaaggacagttttctttcttcctttctaatctgtttgccttttatttccttctcttgcctattgcactggctaggactcccagcactatgttaattagcagcagtgagagcagacagctttgccttgtgacagtcttagacaccaagcactgagtttttcaccattaagtacagttggctcttctgtatctgtgtgttccatatccatatatccaaccaaccgctgatcagaaatgttttaaaaacaagaaaaacaatacaaattagtaaacagtacagtatagcaactctttacataacatttacattgtattaggtattctaagtaatctagagatgatgtagcgtgtacgggaggatgtgcataggttatatgcaaatactataccatcttatataaggaatttgagcatccttggattttggcatccttgtggggagtcctggaaccaatccctcagagacaccaaggaacaactgtataatattggctgtaaggttatggttgatgcttttaatcaacttgaagaagttctcctccattcctaattttatgagagttttctcatgaacatgtgttgaattttgtcagatgttttttatgaattagttaatatgatcatgtaatttttcttctttagcctgttgattggagactacattgattggttcccaaatattgagccaaccttatatccccagaataaaccccactaaatcttgatatgcaattatttttatctattactgaattctacttgctatttcattagtgatttttgtatctatattcatgagggatgttggcatgtagttttctttttgttgtttttccttgtctgcatttggtatcagggtaataccaacttcataaaatgaatggggcccaggtgcagtggctcacacctgtaatcccagcactttgggaggccaaggcaggcagatcacttgaggccaggagttcaagaccagcctggctaacatgctaaaaccccggctctactaaaaatacaaaaaattagcctggcttagtggcgggcacctataatcccagctactcaggaggctgaggcagagaatcacttgagcccaggaggcggaggctgcagagagctgggatcataccactgcactccagcttgggggacagagtgagactcagtctcaaaaaaaaaaaaaaaaaagaatggtagtgttccctcctcttctgttttcttgaagatattgttagaatcatgttgactttttaaacatttggtagaattctctataaatgtttagaaccatcttggcctggacatttcgttttggggagtttttaaattacaaattgacttttgctataggttgtttaaattacctgtttgatattgaatgagttgtagtacctcatgcttctctaggagttggtccattttattgaagatgtcagagttatgtgtgtagaggcatttgtagtgttcccgtattatccttttgatgtctgcagggtctgtagtgatgttccctctttcattcctgatattgacagtctgtgtcttccctctaattgtttctttgtcagtcttgctagaagtttgacaatttcttattttcaaatacctagctctgttttgttgattttctgcattgtttttctgttttctgttaccgggatttctattcccctatctttgtgatttccctccttccttcctttgctatcattgtgggtttactttgctcttcttttcctgggtgctcatggtgggatcttggcttattgagttgagatttttcctctcttcaaatgaaagcccatagtgctataaatttccctctcagcattgctttagtcatgtcccacagctaagttttgtgttgtattttcatttttattgagttcaatgtctttttaattttcccttgagacttcctctttgacccttaagttatttagaagtgtgttgttaagtttccacgtgtttggagatttgtctgctatctttctgttattgatttctactttgatcctcgtgtggtcagaggacatgctctgtatagcctcagttcctttagattgggtgagatttcctgtatagcccaggatatggtcaatcttggtacatgctctgtaggtgcctgaaatgaacatagcactctgctgctgttgggtgaagtggtctgtaaatattcatcatttgatggacttctaaatttatctcaagactctgagatcatttactctcaaaggttatgtgatacgctaccttttccagacaattcctaagtgatctaaacccctgctgagttcaccaagtggcctgtaaaaccctatgatgattcttgttgatgggagccatcttcccccactagtaggtgtgggcctttcttaaggtgagggccttgagctcgcaccagttcaacctatggctgtatgaaaattttctggctgacatttttacgcttgtaccttcaagaaatataacaaaacatcatttttcttcttcttatcaagtcatagaatgctaaaggcagcgggaatctagggtgatctggtctaccctctcgtttgacaggtgaagcaatgaggtgttgcgaagttaaactgattagttttttttaattttttaaatgaaattaatatacgttaattatagaaaatgcataagaaaaaggggaaatgcataagatagagggaagcaaacatttttaaataaaatttatataaaacttataaccaaagatgactactatttttattttggagtatactctcccaatatgttttcaaaagcaggatcactctctatgactgctttaaaatcttttttttgtactttaacaacagacatgaacatttttcaaaatattatttctaatagcaaaatatcattccagatatatgtctgatgatacagttttctcatcatttatttaatgagtctccattgggtgggcgtgcaggttgtgacagttttctctgtgttaaataacactgtgatgaatatcttttgtgtacatgcatgatgatttcctagaaatgggaccctgggtcagtgcttgtgaacatttttagcttctgagccccattgccaagttggattcttgaaattttttgtttgtttgggcagctttggttttgtttttttgttttcttttgagatggagtttcgctcttgttccccaggctggagtgcaatggcacgatctcagctcaccgcaacctctgcctcccaggttcaagtgattctcctgcctcagcctcccgagtacctgggattacaggcatgcaccaccatgcctggctaattttgtattttttagtagagacggggtttctccatgttggtcaggctggtctcgaactcccgacctcaggtgatctgcctgcctcggcctcccaaagtgctgggattacaggcgtgagccactgcgcccagcgcagctttggttttatttgttttgtttatagtggagggttagacatgaaatcaacatagaagatgacgtaaacttatgactaagcctggtgtgggctctcggtgttctggggcatgagctagaggatggctggagccaggtagagaccgctcccttccttagaatgtcaccttgctgacaaggacagcgctgtgagcatccacaccttcctgtgaggtatctggcattgagcctggtcaggaaacaggaagacaagcaggttccattgagcctgggacctggaccttgtaaagccagccacccagcccagttttacaggccaggcaacaaagggagcaaccggctggacccaggcctgcctcccccgtgcagacccgccgtgagaacaccgtgttctgaattgagacgtgccttgcactcactttgtcccagtaattgcccccataaaatagacctggacactaagaggaaacttcccatatttggaaacccagtcctgcctgctttttatagctggtgtcgaggacaagagaaccacaagccgtggccagtctgctgagagaccactgagggacagacgggttgtgggcctggagcagccccggagggaaggagcatttgaaagtggacaggtagagcccaggcccagagagccccagggctgctaccaggaaggccagcgcatccctccaggtaacgggcagctcctcggccacagcctccaccccccaacacgtgggattcgggctgcaatggcctacacatcttttcctcttgtccgtgttccatctgtctttcttctttggtttgtagagagagaagaattaatccagagcgtgctggcgcaggttgcagagcagttctcaaggtacagagtcttctaaacttacaaccagccagagatgggcacatctttctctaagagcgagggcaggccccaggctctgaggctggccttggccggcaagcgtggctgtctcacctgcctggaggagctgcccgcacggtggaagccttctgtggcttctgtaactaagccagcttggatggggcccaggaaacgctcaccttagaccaaagaccatgttgagtgggtgcattagaatgtgagctcgtgaggtcgagaatgttctccaccggctcttctgggatgggagaacaagctataagaattggctccactggaaaataagcttcctcgctgagcttctgtgtagttaggagacttccttttcatcggagtcatcccaacaatcctgacctggataccgtattttccatttctcaaactgacttctctgtggcgtcttactgcccaggttaattaaaatagtgaaaagcacagacgggtgggattttttaaaaacctttgaattggccgggtgcggtggctcacgcctgtaatcccagcactttgggaggcggaggcgggcagatcacctgaggtcgggagttcaagaccagcctgaccaacatggagaaaccccgtctctacgaaaaatacaaaattagccgggcgtggtggcacatgcctgtaatcccagctacccgggaggctgaggcaggagaatcacttgaacccgggaggtggaggttgccgtgagccgagatcacgccactgcactccagcctgggcaagagtgacactctgtctcaaaaaacaaaacaaaacaaaaaaacctttgaattgtttaactgactgggttggagcctccagagagcacaacaggtcctccgaaggtgtctgtgcccatcaggggaaggtgcggggactggaccatctcaactgcatgagcagagagagggccatgtgtccaccccagagagcttgggtccactgctcaggcccgaagaagtaaatatgcccaaccagcccagaaaatacacctcatgatactttggtgattctttcctccccatgggacatgatgatttctgaaaagcaagtcctagcatgttggcacctcagaccctcaccagcccacctagaggccttgcccatgcccacagcagggactcagtaggtgtttgcttaaccggttttggctctgagaattttaagggtcatatttactctctcttttctttttcattcctagagcattcaaaatcaatgaactgaaagctgaagttgcaaatcacttggctgtcctagagaaacgcgtggaatgtgagtgacgtttctgtttcctttttgcttctctgtcctttaacctctattcaaattaaccacttggaacggggaggagttcagtgccgaaggtaaatacaaataaatgtcttttctttgtgaaatacttgaaaattacctttgatgttaacaaaggctagcacagtgactaactaagcattttatttctattttaaaagaagcacagctcatggtataaagcattctttcagccccaaagaataaaaatgaacacacgaagccttccgcacttagcccctctgagaacctctgctgagtgtcttgtctgtgtctttttgtgtgtaaatgaagacattctctgcacactgatcggcaccctgtgggtcataattttttggaatatgtctactaagttgttatctcttggtttctgatacagtctggatgtcccctccacatctcacgttgaaatgtcattcgcaatgttggaggtggggctggtgggaggtgtttgggtcaccaggcagatgcctcctaaatggcttggtgctctccttgagatagtgagttctcgcaagatctggttgtttaaaagcacgtggcatctctctaccctcctgcttctccgttgccttccaccatgattggaggcttctcgaggcctccccaagagccaagcagatgccggcaccaggcttcctgtaaagcccacagaactgggagccaatcaaacctcttttgcttataaattgcccagcctcaggtatctctttatagcaacagaagaacagcctactacagcctccaatcaccaccaaaggaaaagcagaaaaaggactagggagccaaggagtgtcgattcaagtcctgattcaatgatcacaaagctcaaattctgggaagaaaacagcttcaagtcacccaccctttttgtcctcatccataatatcaagatcaatgcttgaattccataggcctcacaattctgtgttccactcacagcttgacaagtgaactctttgtcaatgacaaggcaaaggttaatgattaacaggcactgtatttaccaacttaggaactaaataaacagaatccagacaggataccattaagagttgcagcatcaccaaaaatatctggctgattgactgaatgtcgtcgcttttctttttctttttttgagagacagagtcttgctctgttgtccaggctggagtgcaatagcacaatcttggctcaatgcaaccttcgcctcctgggttcaagtgattctcctgaaacatgatttacatagtcagatttatacttttcaaagtgtgttgacatttctaaaaatgtatgtggtcactggatcttcaagacagtttcattttccccattgtcaacgaggaagccacagagaggttaggtaacctcaagttcactcagcaaattagaaaaataaataaagctgggactggcacccagggtcctggccgggctgctgtcacggcctgctacctgcccttctggaacgagtcacttccctgcacacctggctgaagaggaccaggcactccatgaggattccttgataacgcaggttagaaagctaaagctgcaagcaacagaaactgatcgtggctgctttcaacagaaaaggagtttttccctaaaggattttgggaagcttccccagatccccaggaaggcttgggaacagggctcagaggttgtgcagcagcaacaattccccaaatcccgtgcagagctgatgctgtgcggatgcctgtgctgccgtctctgagccccagatgcggcaccagctcccctgtactcctcactctggacctaggtcccccggaggctccacaaccacttatgcagatatcaggctgcttctccatgtcactggctacaggttcaaaatctagacagagccaggccgcgcacccaaggtctagctgcaaggcaggccccacgaagggaggctgtgagtatcctgaagctgcctcacaaagcaccacagactgggaggcttaagcatcaaaaactgactctttcacagctctgcaggccagaagtcagaaatcaaggcatgagcatgactggctatttctggaggctctgaggggccctggttccatgcctgtctcctagaaccttgtggttcccagcaatccttaccgttcctgagcttggaaggctacattgctataatctctgcctgtgtctacacgtgatgacattctcccaggatgtctccatgtcaacagtctctctcagctaggtcttataaagatgcctctctttgaatttagggcccaacctaaatccaggatgggcccatctccagatccctaatggattatatctgccaaggacctttttctacataaggtcccattcacaagttccagggagtaggttgtgaacagatctttctggaggacacaattcaacccaccacagcgagtgtttgcatttccatattctgcactgggaggctggctcagctctccaccaagccccatgtcgcagggaattctccaaacttgggtaggggtttgagccaaagcatgcaaaaaaggcttgctgcagagtccccacccctctttacggacacaaaaagccacgcagtcactacggggcgagtgtgcagatgcccgcgggcagcaggtgcctcccacctctcctcctctctccagcacctgggtttttcctcagccttccccatctcctacgccccacctggaagccagtgccagctccccccatgctcttcccggaaagtgcaaacaggcaagttgaagaggccatgtcgtaactctcaaaactcttacagagaattatgtcgcccacaacaagatgaatagtaaccctgtgtgtctttgaataactgaccctggaaaataaccatcaagccagaagaaaagtgttcctattttacctgcaagtggcaggtgagtcgaagaccactgaaggaaatggcccataggaccttcccccctagcctgttctggctgcggaattctccaaaatttctcacttctcagagggaagcatcttcccataaaaccctcagtaaatgcacatagatggcctggaaaaggacaccgctcttgacccaccgagctcaggctcactgcactgaccaaaattcctggcgcttctatgggtaaaaccggttgtgactagttgtactgatttctagcaccagagacctaggactgcagaaatgggattgagggagctcacctctctaaggagtagagaaggaggaacagtctaggagttgtggagggtaagggaggggcttgggtgaggtcaggggggactctcctcagtcctcctggctgccctcctcccctggcatgcaactcacacccccaccccaggaggcagccatgtccagacaggctgtcctcctcctgaactccacctggctttgggctcatcctccccgggcacttctggctgatggctccccactctccagcggatgtgctttagcgggaggtggccaggatgctgcacctgtgctgagccccagagattctgagttccagagacactacaagggcagcagagccttaacccaaagatgcaagagcccagacattttaggaagcttggagggcagaaacggaaagtccttttgaggagagggcctgcagctgaacctctcacgcaggccactgggtaggtgcgcgcccagcttctcagaaggtcagtcccaaccctgcacggctgccagaagctagccagatggggaaggcggccaggagcctggtccgacaccccgatgcacagggcctgggccagaggcagatgctcccatctacatatgcacacacacatataaacacaaacagagaaaggtgcacatgcactcacatatacacatgtgaaatcacacaggcatgtcaggatgtcacatatacatgcacacgtgtaagcacccaggcacgtgcagatacattcatatatatgatcacatacccacacatgcgcacacacagctgcttctgctatacatgagctgctgtgagctgttttgttttgtcttgtcttgtttttgttgttgtttgagacggagttttgctctttggcccaggctagagagaagtggcgtgatcttggctcactgcaacctctgccccccgaagacaggacacttctgtctcagcctcccaagtagctgggattatagctgcccgccaccatgtccggctaatttttgtatttttagtagagatggggttccgccatgttggccaggctggtctcgaactcctgacctcaggtgatcgacccgcctcggcctcccaaagtgctgagattacaggcgtgagccattgtgcccggccaagctgttttctgcctcttgagttaaaggattcatccactagaactggccaccttaaggccatattatattgtggtggacttgtcttaaatggaatttcctgcttcttcttaaatgtataattcctctgaattgaatataaatttcttcatttctcctcattgactttcaaagctcttcttccttttgatatacaaagtttagccttgttcgagagatctgggatttcccttacgttacggattattttgtaaacagaacacccaggctcctcccctcatgtcctggctggaggtgaaacattaaaaagagattttaaagcagggccctttactcccttccttcctggtttgtggccagggcacagggcagctctgctccatccaccctttgtccctgtgctctgggcttggaccaaaacctaaacacagcgtgggccgtggcaggagctgaccggctggggcaaagtttaacacaggccatacaaacagcccagagcctggatgctagaaccaagccttgcttttctctgtcactccggaagtgtgctctacgcgggctctttagtgaggctcctggaggaagtgttgaaacacaactctattcatacatgtctttaaacagctttcactagctctgtagccaaaggactgggcctgccaggttcccggcctcttgctggagcacagtgaggctggggaaggagcacagcacagagcctcctgagcctcggctcagctctccccgacccccagctcggctctccccaccctccggctcggctctctctgacccccagctcagctcttccccacctgccaggacgatttccccaaagccagcgtctgtcagaaaatcacccttagtttttcctgcaggtggcctgtgacttgtagaagctcacaaaaatctctttcaaagcccttttttgttgctgttttgttttgttttgagacagagtctcactttaatgcagtggagtgcagtggtgtgatcttggcccactgcaacctccacctcccgggttcaagtgattctcccgcctcagcccccagagtagctggaattacaggcagcctgtgaccacgcctggctaatttttgtatttttagtggagacggggtttcattatgttggctggacaagctggtctcaaactcctgacctcaggtgatccacctgccttggcctcccaaagtgctgggattataggcatgagccactgcgcccggcctacagtccttttaagaggacagcccggggtttccagataatactagccccacacacaggcatgtcctagggtccacacctggtcagcgggaataacaggcagccgtgggctgggctcccagccccctagcagggtccagtgggccagggagcctctgctttggtttgtggtgcgtggtctgtgcccgcctgtgttcagcgtttgaaggcagaggagcgggccatgatgggcagagccgacgtccaggctccacggtagggccgtcctgctgctgtctgcagacctctcaggcttgaggccccccgccccacaggactggcccgctcctccctctggattgaggtggagcagggctggcagtgggtcgaagaggggagctgtggaatcttccccaaagcagccgggtgtcctggaaaggccagggagtgaggaggcaggacccccggggacacaggcacacacatccaccacatgctcacctctgcctcctcctgcagacctccccgccagccccgtcatttcatggcatcttgctttctcttcattgaggaatgcacttttgcaatgttgttactcactatccatctacttggccaacagcctcttcataaacttaattgccacaaattctgcatctctgggatgcaaactagtgaagctgtgctgtgtcacccaggaggcttaattttaacatcacctcaataggtagccagggaagcggatctcggtggactctgcactgtcaatacaaacgctatgcacccatcaaaaaccatgagctggcttaaaacagagccttgtatggacatgggaaaaaaattataggtttgttgcaaactcatttagcagcaaaaatgtgatctgaactgacatgaagcccttggtatttatttatcctgctcagtatgataaatagcattttcctcgggggataaaaagaaaaacgtgagctgcgacagcagccactaacatggggaagggccgtgacctcctgatgagtgaaaatagcaagttagaaaacaacaaattttatcttttaaaattaataatagatatatagatacatagacacacacaggatggatagaagctagatagatacatacatacatagatacatacatagatagatactatatagatatgtaaatagaaagataggtagaggctgggtgcagtggctcatgcctaaagtggttccccagcactttgggaggtgaaggcaggaggattgctttagcccaggagttcaagaccatcctgggcaacatggcaaaaccccatctctacaaaaaatacaaaaattagccaggtgtggcggtgcacccctttagaccctgttattcaggaggctgaagtggcaggatcacttgaacctaggaggtaaaggttgcagtgagctgtgattgttccactgcactccagcctgggtgacagggcaagcccctgtctcaaaaaaaaaaaaagaaaagaaaagaaagataggtagatacatagaatgggtggatagagagatagaacggatagaaaaataggatggataaatagaacataggtagatacataaatatgatgaatgcatagatggatgggtggatggatggatggatggatggatggatggatggatggatgaatggatacatagatgaatggatggatagatagtatataaatggatggatggatagatacacagtaggtaggtaggtagtagatagatagatagatagatagatagatagatagatagatagataaacaggatagatagatagatagatagatagatagatagatagatagataaacaggatgaatatttagaaggctgggagtgggcagaaagcctggaaggacacacattaatacaaataatattaactgagttgttttctgggcccataggatcctagacaagtttttaaatattattctttgaagtgctatttcctacacttcctacaatgataataggatattttatattcagaaaaatgacatttaagacatagtcaatggtccatggaccttggacagagggcccagctgccctgtttgcagtctacaccgcatgcccaacccttccccagatctactcactttcagaatgtgctgccttccacgtgtgaaccagactgagctcctttctgccactgatgttgaattgtccatttgctcacgtcagtgtccacgtggcaaatccacagggcatgggtgggatcctgcagtctagacaaagccaaggagcaccgctggaggccacgttgggcttcccaatccacatgcaaacccaaaatgtgttcttgggtaccttttctgagaagacagcctgtggcatgcatcagcttccttgaggggcccatgatgctggagaaaacggagacccggctccaaaggagaatgtggactcttagtggttggacaaagacgtcccgacctcagacctcaggtaccctgtgtttccccagcggcagctcatctggactcggccatcacgacagcgaccacactggctccagccacatgcacttccggaccccatgtcctctagctgttgggtagaagaggggtggagaaggtttctgtagcacagaaacacatcagcaggaccagatccaaatattgcactctccagattcttcgtccttctggcagaaagaagcagtgtcccgggaacatgcccctacttgacccctgaccctggaaacgcctcgaaacccacccgggaggctgattccagctagtctgccctgggccactgtactgggagagtttctttccggagctgcagtacttcctttggggtgggaaggagttgttacaaactagccaaaggctctgagttgcttggtttttcctttagaaaacatttgctttttatttttagcagttattcagagccaaacttcatgaaaaggggaatagagtggtatcgtgggagtatccttttgcataaaaactaaggtgtgattacaaagtaacaaagctaatcttttttatttcaattggtttatgaaccaactctaattgaaaagccgtgcaaagctgcttgcttcatggcagcttttctggggtaaacgtgcagtcagccaagggtaaatatcttgaagtttaacgctcgctcggaggcataagctccagtttgtttttggttgaaaaatagtatcctaactgttgaggtacacctttgcagtgggactctgtaactgcccaaggggttcaccctgcctgctacctaaacagagctcattcatcaagacaggggaactgcaatggagaaagagccattcacccagtgccggctgtgcgggagaccagagttttattattcctcaaatcagtctccccgagcattcggggcgcagagtttttaaggataacttagtgggtggtgggaagccagtgagccaggaatgctgattgattggtcagggaggaaatcatagggagttgaagctgtctgcttttttttttttttttttttttttttgagacagagtctcactctgtcccccaggccagagtacagtggcgtgatctcggctcactgcaacctccgcctcccgggttcaagctattctcctgcctcagcctcccgagtagctgggactacaggcactggcacaccatgcccggctaatttttgtatttttagtagagacagggtttcactatattggccaggctggtcttgaactcctgacctcgtgatctgcccacctcagcctcccaaagtgctgggattacaggcgtgagccactgtgcctggctgcagctgtcttcttgcactgagtcagttcctgactggggccagaagaccagacgagccagtttatctatctgggtggtgccagctgatccatcaactgcagggtctccaaaatatctcaagcgctgatcttaggagcaatttagggagggtcagaatctcgtagtctccagctgcgtgactcttaaactgtaatttctaatcctgtggctgttagtctcgtccccaggcaagaagcaggtctgctttgggaaagggctgttacagtctttgtctaaactataaactacaaatgaagtttctcccaaagttagttcagccaaggaatgaacacagacagcttggaggttcgaagcaagatggagcccgctaagttagatctctttcactgtctcagtcataatttggccaaggcagtttcaactccaggaatgtgatcaagtccaagttctgctgatcctcaactttgcctatttatttctcttctgttttaagtcaacactttctcctggtgaaactgctctggaaggacgttccaatgaaaagcttttcccataatgagatcgtaatccttgctgaaaacgctttgccgttcactgcattttaatgctctggcaccacatgtgcccccttttctttttgggataaaagacgcctttgtcccatgtcctcagctggtgcttaggggtatggagcaaaaagtgggtgccagagttgagattcagggagtggagagtggggaggagcttctgccttctgaaaactgcccggatggatgcggtagtgcagcggtggccacggcacatgcctgcgaggatagagtcagttgtggctgagctaagcgcggaagtgcaggcaaaacctgagtatcggcagccagggcaggtgtggggacctctgcactgaggtatattcctccctgggagccacagggagcccttagttaccagccttgagagatcctccacattcgtccgtggtaacccccttgctgtctctctctctgtcaccagtggaaggactaaaagtggtggagattgagaaatgcaagagtgacattaagaagatgagggaggagctggcggccagaagcagcaggtagggtctgcgctggggccacgggcggccgggcctggggagggctccccgtaccagttgggctggggctgtgggctttgtttgcctaaaagaaaggctggtgcagttcggtacagttcaggcttgggagagtgcagtctggaggcagccaccctgcttgcgacctgcttgtcagtggtgtgactttcttctaacaaaagagcacgcatgggccgggtgtggtggctcacgcctgtaatcccagcactttgggaggccgaggtgggaggatcacctgaggacaggagttcaataccggcttggccaacatggtgaaaccccgtctctactaaaaatacaaacggtagccaggcatggtggcacatgcctgtaaccccagctacttgggaagctgaggcgggagaatcgcttgaacccaggaggtggaggttgcagtgagccgagatcgcgccactgcactccagcctgggctcgacagagcaagactctgtctcaagaaaaaaagagcacatattggagataggggctgggaagacgatttcacagaagaagagtcctcctcctgcagatccaagccttaggagcaatgtgtccagcttggaataagttgatatccacttttaaagacagaacaagaagaggaaaagcattaggggaggagcctcctgttgcccccagggacccggttccttgtgtgatgttcccactgggttgcattccagcgagggcttcagcactggggacacagaagtcattctcctgggaacaggcatccttcacaggcgcttcggggggcccagtgagctgtgactcgtggggaaaatgccccagtctccacgatgccacctccaaagtcagttttgtgtacagcaggactctttactggagccagggtcaggacacgtgtggatgaaccacgaccaaactggggatggaaatgccggtagtagcaaagagacggcggtgatgatgagcagagcgcatgcattgaggcacttactgtgtgcgggcgctgtgcttagtgaggggcacacaggacctgctcacacctccgggctttgcctccatgcccgctggtgccagcccagacaccacaggcatatgatgtggctcatggttccccagagtgccactgcccggcctcagtgggatttaatggggactaatggactgagaaacagccctgtgcaattgcactgagttgtctcagagccacctggcatgctgacgatcattccctgattttgaaattgagggcaatctgcttattgaggaagcgtggcaagtgaaagggtctcagaggcagaaggtgaagggaaagccgacgggcctcatctggtcccctcaaagccccgggggcctggcctcggggtgggcgcagggaggaaggccgagcggaaggaagcaggccttgtctgagccacgtgagagcctgtcctacagggaccgtgccacgtgtctgtcccatgcactcatgggctcatttggagttagggatgtctcagcccaattgacttaggggaagtcaggccatagtttgtggccatggaaagttgtgagtgaacaatccatcttcgtcatccctgtgctggaggctctttaaaggacgggagacagagtctctcatttgtgagccaaggaagagctcccaagttgcacagggacggccacacagctggggtcccaaggctgggacctggcaaggctgggacccggcttggcagcctcagacacacagcaccttcacctgtggcaccgcccttggccgtgggctctacgtggcttggttcagccctctggctgtcccttgcgccccaggtgccatggctgctttggcaggagggtggtgttccagggtggtgctgcctggcagggttcccctctgcccagagccaggcggagatgggtggcctcaagctggggctgcgggtgtagcagggccagcctttccagccccaccagcagcacgaggggaagaggacaaaaactgagttctagtcttcagcctgaaaccagactccctgaacagcggcctctgggccccatatgggttggggaactccaccgccccaaggggtgtgtctggagccaggccatgcctcccgaagctgcccccagctcctcacccacaactgtgtgtccctgagcactttctggaggtgtttgtaggatgcagcctcttatcccttaaacgactgcatttaccgcccacctacagcagcaggagtgagtggtgagacagcctccggcctcacaggtcttgcctctgccgtgcctgatgggcacccgctctgtagaaagcaaggcgagtgctcggatcacacgccgctcctggcgtggtttctggtgtgcactagtcctgcaggtcaggttgaggttgcaggggggaagattatttttatcgaagttgtagtcatttcctggggctgcgtaacgaattctcataaactgggcagcttaaaacaatagaaatgtattcccacatagttctggaggccacaagtccaaaatcaaggtgccagcaggccctgccacctctgaaggccccaggggagggaccttcccggtctctcttggcctctggtggctgccggcggcattctctgcctgcttcttcacctggtgctcccatccgttctgtccaaattccccctttttgtaaggacacccatcctattggagtaggggtcaccctcctccaggatgacatccccttaactacatctgcaacagtcatgtccccaaatgaggtcaccctcagaggcagcagggttaggacttcaacatacaacttttggggggagatgtacttcagcccataacacaccacgtgggaggataacaccgatttcagagcttgcagaggaagccgccaggaactccagtgagacatcagcccccaggtgcctgtcaggcacgccgggctgtggggggcacctgggcccatctgagtaacggaggcgcatccgcacttcccccaggagtacatttttagaacccacagcgccataaaccaaagacaaggagacttcctggtgccccgtcagcttctggaggcgacgttctcggctgacagctctggcagcctcccctgtaggtgagagacaggtaaatgggactcttgcttccaaaacggaacagggtaaaaattctcaagcgttgtcgacacattgagaaaaaacaaatccagcctcctgggctctggtctcatccccagccgcgtcatgtgccccaggccggcgttgccacacatgaaaccccttcctgtttttctatgtagaaaggaactcagaatagagacactgagatattcgtgttgtcccttttgtctttgtcaacagcagagttacatcttactcatgagagccctgtagcaatgtggggaccctgggaccagtctcagttaagctggaacttccccggatgactggggagaggagctgcaaaaggcagggtgggggtggggggccttcccgagatggcagcccagccagaggccagcgttcttgcctctgggaagagaataaaggccccagacagggtggagctagctcagccccgtgccacacaaatggccagtgtgagcctgaaatgtggagctacattcagcccacatagcacaccctggtggggcctcggagccaggggtatggatccaccagaagctgccccttgggaacagcagtggcatcggggtccggcacacagcacccgggagcaggtggccgtcccctgacactcacgggctaggtttctcctgcttttccctcaaagaggacagaggtccaactgccagcttacatttagggcaggggcaggggcaggtctaccccaggggccacggccactctggcccccagcactgtgccaggcagagagcagagcatggaatatggggttcacccagagctggggagtctgcaggagcctggggtggcaactgagggctcagcgttcatcccaaacaaatggccttgcccactggcctaagccccagagaagggggatggggaccccaggaaatgaaagcaaagataagctccaaataggatgaaaagaaagagctccatgccagctgctctgtttgctgaagacgctggttcccgtggcagcggagcgcagagagaggggctgcctggccaggcagggtcagcgggccccagcagaccctcctctgctcccagctctggtatctgcaaggaaacagcgggattcgaacagtcaaactgtcttgctcggtgaagatttccataaccctcctggggaatgcaggagacttacagagacagcacatgtgcgaatgtttacacaaaacaggttaaaagcagcgaagaaatcatcatcatgccatctattttttttaactacgcagaaaacgttcgttacttctcagaaatgtgtaaatggaatttctcgtttaatggatgacaatggaaatcatttgattggtgcattttgttggttggttttgttaatactttgctgaatctgttagcgttcccccttacacatcaaactgtggtagcaactctgatgggttttgcaagcatgaaacagagggaagggctaccaaatggatctccgtggagcggtggttatcacggggaagagacggcagcatgccgagaaaataacaccgaagcctctttttccagaaaggaaatagattgattattctagttttgaaaatagcacaggctcattggaaaacctccaaactacactgatgggagctgaagggtgcacaccgatcatgacaacagccggcaatgtccccccagtttaaacctggacacgaggccttctagatgtttttctgtgcatagataccttgttttgaaaaacaactaaaacatgcgttgtgtagtctttttttttactagtggcattgtgagcaataaatagattaaattttaaccagcgtacagctcatagattttcccagaaggccacaatcaagcactctttttaaacctaccgaatgtgctctttcttcctcgtagcgtggcattttttggcacttgctttcagtacatactgtgcatagcattcttattttcccttttcatgtcaagtttcctcacttggcataatatccgtgatgatcctcctaatggcataatagtccatcatgcggaggcactgtgctggtttaaaccgcttcccgtcttgggacattcaggtggcttctagtcggttttgtgtttttgttacagcagatcacaccacggtgaatatctgtgtgcatagagctgtttgttcctgtttaattcttggcttaagataaattccccaggatagatatgtgggcttaaaggatacgaatttctatatggctcttactgggcagtattaacttgctctcccagaagaaggggctttatttacaaatcgcaggagcttctgctgcatttagctccctgagtgcccccatagcctggtgaatgtcacacaagccaggcgtgacccccacccaccatcgtccaagtacacagggagcctgttcacttccaagcaagttcacacccatagggtgtgaacccagatcggcccagccccctggtgcactctgctgcaggggcccaagagcagccagacctcctggggcagctgctcctcattcagcctctggggaccaccctgaagccagcacactgcccaaccggaaggtggctttcctctgaaacatgcctggctcactttgccctgctcctatgtgggatacctcgataccaagtgctaaacaaaaacagagtcagacagaaaactcatctgctaacattacatgtaacagggaaagttggaaacattctaaaagtccatcactggggactggattgctaacgtgtgctatggccacaccctggagaaacttggaaaatgaagctaagctctgtggagcaacttgggatgagttcatgatatgttagatgacaaagcaggttgcagcagactgactttggtgcaattccatctttgtttaaaagtacaaaggggctgggcgcagtggctcacgcctgtaatcccaacactttgggaggccaaggcaggtggatcgcttgaagtcaggagttcacgaccagcctggccaacatggtgaaaccccgtctctactaaaagtacaaaaattagtcaggtgtggcagcatgcacctgtaatcccagctactcaggaggctgaagcacgagaattgcttaaacccaggaggcagaggttgcggtgagcaaagattgcgccactgcactccagcctgggcaacagagtgagactctgtctcaaaaataaataaataaataaaaattttaaaaagtacaaaggggcggggtgcagtgactcacacctgtcatcccaatactttgggaggctgaggcagaaggatcgtttgaacctaggagttcaagaccagcctgggtaacatagcaagaccctatctctacaaaaaataaaaattaaaatattgttaaaaggtaaaagcggccacccatgtgtgtccacacttcaaaacattctggaaagatacaccaaactattagaagtgatttccagagtatgggatttagggaaataaatgggtaaagtgaggacttcggttttcatattttggtgtttttttttttactttactcttgtgttgtttagattttttagaatgtttttcttttgaaaacagcttctaaaagagaagatagccctcaacatctgacttttttttcttttttttttgagatggagtttcgctcttgttgcccagactggccaggctggcgtgcagtggcacaatctctgctcactgcaacctccgcctcctgggttcaagcgattctcctgccttagcctcccgagtagctgggactacaggcacacgccaccacgcccagctaatttttgtattattattatttttttaatagagatgaggtttcaccatgttggccaggatggtctcgatctcctgacctcatgatcatcccgcctcgacttcccaaagtgctgggattgcaggcatgagccaccacgcccagccccaacatctgactttctgtgtgttttccaagagtctagtgtgaggtcagaggtcagacaggtcatcagggattttgcttcgagtgagttgctgctgccctgactcctctcccacagcaaataagaccacacggggcttgggggttgggtttgtcgcttgcttttgctgtgctgagggcttcaccagactgaaacagcaggaccacagctcatctctgctccttctctctaggaccaactgcccctgtaagtacagttttttggataaccacaagaagttgactcctcgacgcgatgttcccacttaccccaaggtaagatgagattccggcccagaagaagctgcagctgtgtccccagccccacgcccagccctgtggccctgcggccagaccctgctgtgtgtacgttcacatcaaccgcccctcccagccctgggccgctgacggtgcgggttactttaaggcaaagtattttttctctttgacatttgtttagcaaaagtgatcccagaccataccttcccctgcaaggacataacagctccgtgctgctgtctgcccggccccgggagctgacctgggtagacagtttttacactcaaacgttactggaaagaactttaacgtttaactgaatttttaaaaatccattccattggcccttgtctctgagcaattcttagttgtcctggcaagttttgctcttttgcacaaaagtgttcttagttctaagagaagctgtgacgttggtgaagtagcaatggcatttttgaaataacgacaaaaggagggtctcgagttgccggtcacccgctcaacgccttcagctgggaagcaggcaaaatcccggcccacctgctttttttttttttttttttgagacagtgtttcactcttgttgcccaggctggagtgcaatggcacaatcttggctcactgcaacctctgcctcctgggttcaagcaattctcctacctcagcctcccaagtagggggcattacaggtgcccgtcaccatgcccagttaatttttttgtatttttttagtagagacagggtttcaccatgttggccaggctggtcttgaacttgtgacctcaggtgatccgcctgcctcggcctcccaaagtgctgagccaccgcacccggcccggcccacctgatttgtaatgtgctctcatgctaagattcagggggcacagcttccagagacagcagaggcctgggctaaacacaggtgggctctgccactgcctgcggttcaagtgatggcagagccttccacagcctccatgtaggccactggtgtccattagtccgtgattctatccacgcagttccaaacaatgtcctggatattgtcaggttctgggtggatttggggggtttttgtttttttcttttgatactgagtctcactctgtcacccaggctggagtgcaatggcatgatctcagctcactgcaacctctgcctcttgggttcaagtgattctcctgcctcagcctgagtaggtgggattacaggcacccaccgccatgcccggctaattactgtatttttagtagagacggtgtttcaccgtgttggccaggttggtcttgaactcctgacctcaggtgatccacccacctcagcatcccaaagtgctgggattacaggcgtaagccagcccagcctcatctgagatttttgaatggagactagtgcctttttccattggaaaatatgccccgcgcttctcaggatcctgtcccagggagccgtgaagcacagcctagatccaaaataaaaggtgtcagccctccagatctgtccccttacaaaaaacagaaaaacaaatatccagtaagacctaggagaagacagtgtgcaataccaaagcagtgttcttgtcttctgtatagaaccacagccttctgtccttgtgacagcttaacctaaagcctgatgtcctcagaagcaacccaggggcaccggccccatcagcaggcctgctcttctagctctcggcagaaaccaggaatgggttccagacaggagcatctcagaataacttcttaggtggtatctgaatttatgccaagtgaattttacccccacacttcactttattgccctttttttattattatttttgagatggagtctcactctgtcgcccaggctggtgtgcagtggcacgatcttggctcactgcaacctccccctcctgggttcaagcaattctcccacctcaggctcccaagtagctgggattacaggcacctgccatcatgcctggctaatttttgtatttttgtagagtcgggattccaccatgtttgccaggttggtcttgaactcctgacctcaggtgatccgctcgcctcggcttcccaaagcactgggattacaagcatgagccaccatgcccagctattgtccattttatcatcgggcttgttgaggtctaatttacatgcagtaaagttatttaggcttggagtacagtgaattttgacaaacttgtttagtcctgtgacctccaccacaagcgagatatggaacatttctgtcaccccaaaccctcccctctgctccctcaccctgcctctggcatccaccgatgggatctccacccgtagcattggccctttccagaagtatgtggcctgtgagtctgacgcaggtgccttagaaagagaacgggagaagctgggtgcggtggctcacacctgtaatcccaacacttggggaggccaaggcgggtggatcacctgaggtcaggagttcgagaccagcctggccaacatcgtgaactccccatctctactaaaattacaaaaattagccaggcatggtggcgggcgcctgcagtcccagctactcaggaggctgaggcacgagaatcacttgaacccaggaggcagaggttgccgtgagccaagatcgcaccactgcactccagcgtgggcaagagtgagactctatctcaaaaaaaaaaaaaaaaagaaagaaagaaaaagaaagagaacgggagaaagaggagaaatatctcagcatgcacatcactgtcacaggcccacggcgcctggttaacacggaactcctgtcctttctagtacctgctctctccagagaccatcgaggccctgcggaagccgacctttgacgtctggctttgggagcccaatgaggtaagtgcggggcttgcaggcaccacgtcccagggggaggcagctcaggatcttggacgccagtgggaccacccccatcgctcttcctccttcttgctttttcctcttctttttaaagactgaaaaaaaaaaacaaaacttgttttgccaggttttagttgaaactaactaacactttatagcagggcccaggagacttcacagcaaggggattctgtgagtgggggagacggctgtcaggggcagggaggctccacccagggctcctgatggcgctgggccccccgagccatctgctcatcctgcagaccctcatgcacgccggtggcagccccgtgctgcagaacacccctgccaggagcaaatctctcctcaaggaaggggctgcggtcagagtgctctgctctgagagcagtgtctgcaaaggcaaggcacaggcaaccggctgccccagataagtggacatgtgggattccgggaactgtgtcaccttctgcagcaaggcttgaggccaggaattccacactagcctgagtgatatgatttggctgtgtccccacccaaatctcaccctgaattgtcataatccccacgtgtcaagggcagggccaggtggagatcttgaatcatgggggcagttttccccatactgttctcgtgatagtgagtaagtctcacgagatctgatggttttataaatgggggattgtcttttgcctgccgccatttaagtgactttctccttctctgccattctccatgattgtgaggcctccgcagccatgtggaactgtgagtcccttaagactctttttctttataagttacccagtctcaggtatgtctttattaacagtgtgagaacagactaataagctgggcaacatagcaagacctcgtcgctacaaaaaaaaggtgttaaaattcctatttgctgaaaaatacaagaatggggaattttttgtttcatctcattggctaatagaccccctcttttcacaccccaaaaaatgaaaaagttccctcattgcagacctcggcctcagctgttttcaacgcaccaaaatctaaggacgttttcctgcttgtcagcaacacagaaaatgcacaaggctcctcagcaagctcacctgtgctctttgacaagctcggccgcagcgatgtctctgcaaagggcagaaagtgggctcttgcctcttggcacccctgaggccaggctgctgacacctggggcactgccctctcctaagtgaacctcttttcatgtgcatggtctcccagcaggagaaaaactgcagcaccagccagaaaagcaaagctccagcctccactccccagctcagttcacccaagagcagcaggcggccagtcccaggggctgcactgctgcaaacctgctcaaaacctccagccgccacgtggcaacttgctccccagctctgagagtgcaggaccggggcgcagagacgacagaagaggctttaaatatgcagaatgactgtctaggtcaacgcacaaaaggaaagggccccaggtgtgggagatgcaaggggtgagagggaaagctcagaagagacgtgttggagctgctggcctgcagcagctcccagggtccctgcacagctgctgagattgggcagagcaagtacacagcaagtagacaccgcagacagttagagcacactgactcctgctcccagcctgtgggcaaccgccgcacctcagcatcatgtagaaaaatcaccatccccaaagtcattttgacctcagcctgctgggaggaagagccaagccaggggccactgatggcaaagcacctgcgtggaaactggcactcgctgtcttttctgccaccttctaccagggaaccctttgagcacgggccactgtgactggggaggtggggcttgccccacgaagctgggggatctgtgtctccataatagaaaggccacctctctgtcctctgatcacagagtggattcacagctgctctcggggctggcaggtgggcaaggcagacagctcccggcagctggactcagcctctgggtggcatctcccacggcccgtggctcctgcccagcagatctcaagggcactccaggagaccgatgagggttccagtgcttccaagaagtatctagctgcctgtgtgtgagaatgcagagatgcccaagacaggagccttggcctctggcagatctagggatgccaggaattttggagtgtgagtggcaaagagggacaactaaagggacacacatgaaaacagcccactcggccccacaaaactgcatctggccacgcatgaggcacctggcactcagagaacgtcagggcgcctaaaagtgatcacctccctcccttccagcaggggcgcccccacttttctccgagtggtttggcccagtgtcctgcccatcacaaaccagacagaggacatgacttcaggctgctgtgtcctcccatgtgttagggcctccgagggcccagggctgtggcccgtgagcgtggcctgcctctatcctccgagggcccagggctgtggcccgtgagcgtggcctgcctctatcctccgagggcccagggctgtggcccgtgagcatggcccgcctctatcaagtgcagagctggaaggctgcaggagcctcccccgtcatctcatgagtcccccactcacgaccatgcagcccactcagaccacgacctgccgccacatgcgggaactgctggctccctcgtgcccgcccggggctgaggactgcacgtgcagccacagatgcatccggccctcctgccccacagcctctatgaaggccacataaatggcaccaagtgtctctgtctgccgatcagcatcccctcttggcttcacagcagacgcatctgcctttcaggactgccttgaacaacatctgggctggtcaggtggagagcgaggagtttccaggttgcagcccctatggtcctgagggctggcgtccaggatggtgggggtccagcagctctgggcagcgaggcccctggctgggtgatccaggtggcagctgaccagtggcctgggagccagccctcctgtcctcacgtggggccccatctccaaaagccagtgcagtgccctgcacattatccaacctacatctgtactgtctccccaaggaaaacgagtgtgtggttcacgtgctttaaggacgtttcccaggtgacattccaagctcccatctgtggccgcaagtgggggagtttccagttttccagatagattttctgccatgccagagaaccctccgcctccttcagagccatctcatcaatgcagtgatcgcaagcttcgatttacaaaaactcgcctcccttgcagcatttccaggtttcacacacagcgtaacaagtaaaaatggatttttgggcagcacgcctgtcctagtttgctgaggctgccataacaaagtaccagagactggggtggcgtcagcagcaaaagttgattcctcagttctggagctggaagtccaggatcaaggtgctgccaggttcggcttctccggaggcctcggtccctggtctgggaccttcttgctggggcctcggtccctggtgtgggaccttcttgctgggacctcggtccctggtgtgggaccttcttcctggccagcaagatggccgccttcttgctgggtcctcatgtggcctgttctctcggcacatgcatcccaggtgctcttcctcctctaatgaagacactagtcccatgggaccaaggcctcaccctgactagatggaaacttcattacctccgtaaaggccccgtctccaaatagccccactggggtcggggctttaccatgttgacctggggaagggggcagttcagttcgtaacatgcccttttgggaggagaaagtcaggcaatgagcagacacaggcaggaagccacgccgggctccagcagggatggcccagtgccctgtacaggcagcaggcagctgggctggaggtgggccctgggtggaggacacctaccaggtgtgtctaaactgcccctttcctacacatcttccttcgcactgggctcgccacccaagacctgctttttccagaaagcaaagcctactttggtcaaactctcatttttaaaaatcacttcatcttttcctccctaacttaattagctccaaagcactgagctgtattgaaatagatcaccacaatgacaatcctctttgggactgaaaacaaaatctatttcaacttgaacagggatattgatagaagacagggctccatgaaaaagggttaggaggagccgcttgctggggcaggggccgcatctgggcactgcagttaagatgttaaagtgtcttcggtcccagggggccgcagatgaacacagttcagcgtttctggatgtaaatcgtcaaagctccttcgatccccagcctcgggcaaggaaagggcctttctctctgtgatgccacctgtgctcaggtgtgcactggatggaactgtgtcctagacccctcagctgtgatattgatccgctgagattgtttttcatctgtagaaatcaataaattcctttttggtgcagtgttttgtgaacgggtgcactctctcacccggtcgctgtcctaagaattctccttgacttcggaactggccctccacgccccaggatccacctgccaggagacccccagtgtgctctcaaacccccacccatctgagtggcctggaaaggctggtctgaagacctctcttcccatgtctgccgaccaggctttgctctccagggactttctgggagggggagaacccacctcctgccaacggccctgctggcactccgaggacagcagagggaaggaagccaggggctggggagccggccacacaactgcccagtgcctatccttctcctgtgcccacagatgctgagctgcctggagcacatgtaccacgacctcgggctggtcagggacttcagcatcaaccctgtcaccctcaggaggtggctggtgagtgccaaacccgccttcggttcttcctgggcacgtggtttcatccagttccacaggaatggagggaatggatcaccagggcaccttccggatggcactgcgctccctgtgagcagaggtgacatttccccgggagttctgtgaggacactcagcctgtctctgttcctccttccaccaaaaccttctttacgcccgagctactcctgctctgataagcaaggagtagcttatcagtgagactctgccatcatcaagcaaagcagcatgtcctaaagcagcggtgtgtgggagcgtgtgtgtgtgtgtgggagcgtgtgtgtgtgtgagagtgagtatgggggtgtggatgtgagtgtgtgtgagtgtggggtgtggatgtgagcatgggggtgtctgcatgtgtttgtgagtgggtgtgtggatgtaaatgtgtgggagcgtgtgtgtgtgtgagtgtggggtgtgggtgtgagcatgggggtatctgagtttacgggtgggtgtgtgtgaatgtgtggtgggagtgtgtggggtgggagtaggagtgtggaggtgtgtctgtgtgtgtcagtgtggatgtgtgcatgtgtatatctggatgtggggtgtgtctgtgtgtgggtgtgtgtgagggtgtgtgtgcatgtgtgtatctgtggatgtgaggtgtgtgtgcatgtgtgtatctggatgtgggggtgtgtgagggtggatgtgtgcatgtgtgtgtgtggatgtggggtgtgtgagtgtgtggtgtgtgagtgggtgtgtgcatgtgggtgtctgcctgtgtgaatatgtttggcagcaggtttttttaatgaaatattgctcagaaccaaatattaaaagcctattaaaggtttcatggtgactggggacccagagctccctcttggagtctcccctccccccatcccctaactttatgccccactgtggctcctcagacacctccggggagaccccagtccttgactgcagggtgaaacccctggtgggagctctgtccccacacctgccccgggtgccgtggtgtggcccgctggacgttctcagggtccctgtgtcacctcattggtacctgtggtaaacctggaacactgttgacctctggttgggatgagggtttggcagagaatgttcaaaccagcgcacagccttctgggtggctttgggaggagaggtgggcgggcccaggcacagggtgactcggaccccctgcctcccgcagttctgcgtccacgacaactacagaaacaaccccttccacaacttccggcactgcttctgcgtggcccagatgatgtacagcatggtctggctctgcagtctccaggtgggtcctgcccgctgcacacccagacctctactctcgggggtcagacggaggcccccttccagggagcggcagccccatcccaccaagagagccacaggcgtggggtccccagccgctccgcccctcctagggacgcacccctgcccaccgttgtcagtcaccccatgggcgaggctgctcctaggattacgagagcaggtgagtccccgacctggtcacccccccaacccccacaggcaggccgatcctctcccaccatgccaggagatgccagatggctgcaggggcctttgtcccccgcttaccactcacccaattccaccccccctcaccccatcccaccctccgagtgaagagagcaaacacctacgccctgttttccaatccaggagaagttctcacaaacggatatcctgatcctaatgacagcggccatctgccacgatctggaccatcccggctacaacaacacgtatgtacaggattttctctttttttccttttaaaaggcaccctggctactggagggaacctgtcagcccaaccctcagagcagttcccagatggagctgtcaacgacggcctcccagcccccaactctgcctccactgacacagctcctggcttctggactttgcccagggccttgggtctccccggagtaggaactttcaggattatcaaaccccaggggctctttcccactcctgtgcgggcctggcttcaggctcaggtgcacggcagatccctggccccgccggcgccttctccaccccaggcagggagcaacacctgtccgcatgcagggatgggggctccacacccccctctcaggagctcgcctctccctgggcaggctcccagctggcttccgcagggaaagcacaggcaggagccagaagagagcagaagagggggagaagagggactgcagagggacaggaggtgggagtgaggtgtccctcgtggggccagggatcagaaggacagaccgttgctccactcctgcctccacaggcacagagttccgccccatgtggcggacaaggtccaggccatgggcttgggtctgtgtcctcagtggcgcagcagctctctctgttgaactgtgtgtttgtgtgatgtcatcacatgcctgagagctctgctgccatgtgtcagcgcctagtgggttccgaggtgtggctgtcagcgctcctcccggggccatcaccatgcacacccatctgttccccttttgctcatttcacactcacagtggccggcacagcacaggtcagcagaggccttgaccacagcatcccagtgaacctcagcctcgttctgcccacctgcctctggcacctggtgacgtttgataatttcacaagaggccgtgatgcctcagggcctgtcccagggagcatgccgcttcctcagaggtgtctgtctggtgggactgcaggagcatggggacgtgcagttgcaggggcagctgagcggcaggagggacctcctggccaggccagggcacaggcagctcccccagcccccacggcaccttctcctgactctacttgctccacttacatggctgggtgttgctcccccgtgcaggtacctggtgagggcgcctgagtctcccctcactctctccttgcctcccaggtaccagatcaatgcccgcacagagctggcggtccgctacaatgacatctcaccgctggagaaccaccactgcgccgtggccttccagatcctcgccgagcctgagtgcaacatcttctccaacatcccacctgatgggttcaagcagatccgacaggtgtgtggggtgagggccctcccaccggagtgggggcacattcagggacagagcagcccccactctccattggctggaagctcccagaagctcctggccacagcagtgccctggggacccaagggaacccctccctccttcctcacctcctccagggcccagagtggagccccaaaaagagggtaccctcgccatgcgcacgtgcatcccactgacctgcacttcccagcctgtatttaattcagccttcactggctccctttgagataaatcctttgtccctcttccagcccaagaaactgaggcttagcaaaggtagggagcctgcccaaggaggggacaggccctggacagacacatctgctgcatccaacataggagagctgccccctgccccataaccccagctgctgtcacctgccacccacagcccagtcagcccccttccttttatttatttttttttcttttgagacagagtctcgctctgttgcccaggctggagtgtaatggcaggatctcggctcactgcaacctccacctcctgggttcaagcaattctcctgcctcagcctcccaaatagctgggattacaggcatgcgccaccaagccggctaattttcggtatttttaatagagacggggtttcatcatgttggccaggctggtcttgaactccagacctcaggtgatccacctgcctcgacctcccaaagtgctgggattacaggtgtgagccaccacgcccggccaccccttccattttagataagggggctttatgcctctcagggcgtgatgggaggagagtgagaggatatctgcgtgagaggaagatgacctggtccacctgccccagacaaacacctccagctcaccgaaataacgccccattccacacgggaattcctcatcaaaccctcactctctgacatttgcaggggagggaagctctcggagtaaaccctgggagaaatgtgttgggttgaatagcagcgtccttcaaacaaggtccacctcccgtgaatgtgatcttatttggaaaagggtctttgcatttgtacttgttaagatttccagataagatcagtgtggattgtctaagggggccgtaaatccaaagactagtgtccttggacgaggagacagagtagaaaacagcccagacacagaggagaaggccgcatgaagacgcagtgattggagatttgagtgatgcagccccaaactaagggacttcggggcccccaggagcaggaggagacaaggaaggaccctcccctggagtcttctttgagagcagggccctgcccacactttgatcttggttctggcttccagaactgtgagagaatgagtttgttgttttaagccgcctagtttgtggtactttgtgtggcggccccaggacactcacccagggcaccgtcttctgcggttccacaaggcagacctcagccattcgaagtctaagtggcttccttccagaggcagcaagaaagactgcctggacttcagcactgggaagatactcaccaccctccaggcgtgctgctgagcctccctttatcagagagcagcagcctcttctaccatggctttccaatttgtctacgcttccaggaagttcaaagcccagtgtaaaaaactgaagtcagtgaagcatttggggaagctccgaggaagcagcatgctccctgggacggggccctgaggcatcacggcctcttgcgaaattgtcaaatgccaccatgtgccagaggcagaggtgggcagaaccaggctgtggttcattgggatgctgtggtcaaggcctctgctggcctgtgctgtgccagccactgtgagtgtgaaatgagcaggagaacagatgggtgtgcatggtgatggccccgggaggagcgccgacagccgcacctcagaacccactcggcgctgacatacggcggcagcgctctcgggcctgtgatgacatcattgcacaaacatacacaattcaatagacaatttacagtcattattgaatcactggttcccagtacagttatctcccctttatctataggctctctggcctctcctccatgtttgtgcccctccccaccctgcaagcaggtgccctgtgtggctacgataagctgtggcaaatcttcgtctgcagtaggtcaaggagcaaccgtgaagagagaacgctgcatctgccactgctaccccagtggggagctcctccagggacaggacctggggaatcaaagcaagtgaacgccccttagtgtaggcctcgtcccactgagccatgtcggagagcatcccgcaagagaaggaggcggcacctgattggaggagcagccgctctgcacaggggatcgttctcgtgcccatccaccgtggggacacaccagcattggcctgcttcaaatgcttcactgactgcaaaatatgactctcctctgggggtaaaattagttgtcccacttttttaaaaatatattttgtcatggaagatttcaggaataactgaataaatgcttcactaataacacaattaaatgtttacaggaaaattgaataattcaagatacaagtgatccccccaaaaaaatatatatatatacagttgaaatgacctagattgatgggtttgggttttgtatctgatgcttgttgttttattttcttggaagaggaaaacatcatacctggcacagagatgtgttctgtaaatgcttgtggggtgggtgggtggatggatggatggatggatggatggatggatggatgggtggatgggtggatggacaaatggatggaagggtggatggatggatgggtggatgggtggatgaatggacagatggataaatgggtggaaggatggatggataaatggatggaagggcagatggatgggtggatgggtagatggatggaggatgaatgggtggatggatggatgaatggatgggtttttgggtgggcagatggatgtgtggacaaatggatgggtgatggatgcacatatgaatcggaataagagatacatgaaataatgtgtgcagggggctcagtacacagtaggcctccgctgaataattgttcagactatacccgtgttaacacgttgttctctcgctatttagggaatgatcacattaatcttggccactgacatggcaagacatgcagaaattatggattctttcaaagagaaaatggagaattttgactacagcaacgaggagcacatgaccctggtgagtggcttattctgcctgggtgggcagccaggcggtgggctggcgaagcaggtcatccatccagctcacactggaagccaagaagctgaaattattagtcttcttggaacaaggtgtctataaatctggttttcaaggtcatgactcttactaggaaagtccgggcagggcctccctcctgatgggtcctccttcatggtcagaggcagcattctcccattcctccatctcttttggatttgaaggagataagtgggtgaaggccgtgcatctcgctctgctttccagagaataaaaccagctctcccatgaaggcacagccccagcatggcactctgaaagcccacctatgtgggggcaactccaacacagctcccgctccccaagccagcatcccccaccaggcccacaccatagcccagcacccctccataaccaggacaaggtggccagagaaggggtagggggcctcccccatgagaaggtgcacttaggttgcccagcatctgccttttggaaaggacaggcactgggcacaccaaggcacacaaggaccagagcacgactcatgcctggaatccagcactttgggaggccacggcaggaggattgcttgagtccaaaagtttgagaccagtctgagcaatattagcaagactccatctccacaaaaaaagaaagaaaaataaaaaaatcagtgcatatctgtggtcccaactgcttgggaggcagaggtgggaggatcgctggagcccaggtccaggctgcagtgagccatggtcgttccactgcactccagcctgggcaacagagcaagggtctgtctcagataacagagagagagagaggtgcatgagaactgccctcccggccttcagagagaaagctggttttgtggagccttgtctaagcatcaggtgcacccctggcattcttactctgaaatttgattatctgtttaaaatcaatagcatcactttccacctccagagaggttgaaagatagggaactctcggctcaggctgaccttctaaccatccagtcccagtaggtagagtcattaggactcatcgctctctggagctgaggtgcagttaattcccaaagactgtgcgagaggatgggagctcccgcaggcaagggctggacagcaggcaaacctccccaggccagggccaccagaagccccttccctaagagggaaacagtcacatagagcggcttcctggcaagcaagtttcttgctcctgaaaaaccaagggaaggagggaggcgccgccttgtcctctaagatatgaggaaggcagagatggacctgcagtcaggggtgacccaggccccgccgatgccttcctcctctgaggtgggaggagaggtcagggaagagacggggaggggcaggatgccagaggatcgggtgccaggtggtcaggacaagtgaacccagctgaaggtccccactcccaccccacccccagccttacacactgcagctgtgcagaccagaggcaaagcgaggctcagagcccagggttccgtttatcccaacgacctgcaccgcggggtcagatgacaagcagcacggccaggcatcgtctcactgctacggagccccagacggggctttatgaacacgggtggaggacagaggttggggtaaggtctcgggggaaaggttctgattcaaaatgggccccaatagggaggcctctgaggatagtgcgggccagcgtgggaggtgtgaggtgcagggagtgtggccggcagggcctgggaccttgaccttccccagagacactgctgccctggccctgccctaggtctggtgtcgggacagctccactgaggccggccaggcacaggctagtcattgcctctgatctggagccggactccacagaggagtcaaagaaaggcctgaatggcttcctgggaactgatagggcagggaaaggaagggcgaccacagcaggatcccttcgaggtcctgccgaggttggaaggcaggatccaccaagcatcatgcagactccgagctgaactgagctgctcctcacctagtcacgttccccaaaccagcaggtgcagcccgcagcccgggggcatgtgcctcagctgggctttcctgtctaatcagcttcagagcctggatggcaaccaacactttggtctggaaacctggtgattccagacactcatttgtgcccggtgcaggcagggccacgggacgccagccctccacctcttgtcctatggcgacatccgggctagtttgggtggaagctgctgcattcctgggcctgccctatctcctcctgaagctcctatggcatgcccaaccctggccaagctgagacagagctacctgtcccctgggaagatgagcaatgcacccacctagggaacagcagaaaatagggggtgaccaggcacagggcagtgcttcaggggatatcacctgggctggggtggccagaaaggctggaaggaggggacccaaacaggaccttgaaggttcattctccattgagaagggagcctgtcctccctgaaggcagccaagctcagttgcatggtccagcaggtcctccgtctcttcctgcctgtaatggcaagtccagacccgagcagcagcagcaggcccgtgttctacctcctgttacctcaattccaaaatctcttctttcagctgaagatgattttgataaaatgctgtgatatctctaacgaggtccgtccaatggaagtcgcagagccttgggtggactgtttattagaggaatattttatgcaggtaagagtcttgcagagcaatcaagcctccagccactcttattagccccacttagtaagggtttgcgttaaacgagcacgcctgggtggtcccgcatattccccgggctgccgacagttcagcctccagaaagccttcagggtaagcgtacatcagaaacaaaataggttataatttgagacctgaaagacagtaacaatccagaaaagctaatactctaaaactgtcacctgtcactgctaattgagccattattacaagcagccttgtcaaacaaattgcctgaaagtcaagaagcaaggactgcagaagcaggagggggcccaggagggccgagacccagcaggtcagctcacacagatggccacggggaaggtcggggacatagaaaaccaagccagctgaaaacaaccaccaaatattaatacaacagcttgatgaaccctaggagaagtcgggaggctttctgcaggacgctgctgccgtcctgggatacatccatccaactcacctctgcctatctctcaggtcggtcttcccagctagacctgcacgcccagctctgtttagcactgaagatagggtcaccttctccttgttcttactgagacacatttgtggtgtggtttggttggttggtggttaactggcgcatcttgtctttctctgagaacagcgatctggttatggggcatttctgtctctaatgtcactgtctgctgcattccctgcagagcgaccgtgagaagtcagaaggccttcctgtggcaccgttcatggaccgagacaaagtgaccaaggccacagcccagattgggttcatcaagtttgtcctgatcccaatgtttgaaacagtgaccaaggtgagtaactgtcaccacatgtcacacttgcttacactcagatacatgcatgcacacacaggcacacacacatatacacatatgcacacaggtacacacagacacacactcatgcacacacgtacacagatacacacagacgcacatacaggcacatacacatatacacacacgcacacagctacacacaggcacacacacaggcacacacttgtgcacacaggtacacaggcacacaaatgcacacacacggcacacacaggcacacactcgtgcacacacatgtacacaggcacacacaggcacacaaatgtgcatgcaggtacacatgcacacaaggcacgcaggtacacatgcacacaaggcacacaggcacacacaggcacacaaatgcacacacaggcacacacacacacacacatgcacacaggtacacacaggcacacaaatgcacatgcaggtacacatgcacacacaggcacacacagggacacacaggcacacataggcacacaaatgcacacacaggcacacacatacacacatgcacacaggtacacgcaggcacacacgtacagaggcacacacatgcacacacaggtatgcacatgcacgcacacaggtacacacaggcacacctgcacacctgcacatcctgagcagcctcttccccggctgtcgtggtgaccgctgtccctgttccatccagagcctgctccccacagcctggcccgtgaccccagcatctcccactctgtgctgcactccctgccttgccttgctgggccctggggggcccctcactgccctcacccatcgctgccggccttcaggaccctggaggcagcactggctgtggactctcctgtccccactctgcgtcccagttcctcacctgtggaggaacccctgagctctgtgccctcgagctgtgaagcccctgtccagctcccagtctcaccgcacccagccaccgagaccttgctccttgcacacagctcgttcctgcccagctccccccagggcctctgagctgcctgtggccccctgccaaggcccccacctcaaggcacccccagcatgtccaaaacaggcccatctcttgttccccccggggatctgggctcacagcctcacaccctccgaccttcctgggctcctacgctgcgcatccttctgctctagggcatctcttggagccaacccacccacttcccactcccaggaccctcagccgggaggctgtcagctcctttcccctgccccgtgtctttgtaagaacctcccaacctgtcccccaccctcatctcacgggcacgggggacacaggaggcaggaaggggactttctgtaggacctcatggagggtgatgagggccagagacagagccgcagtgggtggaggcagcagagccggcacgagggtgtccaggagctgggactggcccagaggtttccgcacggagcacctgacacctgtttttctccgacgtttcccattgccttaagaacgagggactctgaataaatccgtgtgtctctcccagctcttccccatggttgaggagatcatgctgcagccactttgggaatcccgagatcgctacgaggagctgaagcggatagatgacgccatgaaagaggtaaaacacactgagaagagcctgccttccttgcggcaagcaggcacgctgccctccgcactcccgactccagaagcttggacgtgccaagcagggcaccactgaaggccccgtggacaggcacacgtgtaccttccatcagaaagcctggctcagtaaaattagggaatgcgatgagggaaaccaaaactgcattcgccaagaacacgtcaggtctcagtaccttcgagggagtttactggccgtgcccttcacaagaatcacaactgtcacccacacctgtggacacccaggtgtctttgggtgtatcagccgccgttagagcatctgggacccctcagagtacagtgcctggcctggccccagggctgacttgttcagaggaggccatggggtagaaaggggccctcccctggcacggggacaaagcgaccacccacctgccagctcccgggcccagaacacacaccggcacctctcaggggccagggagcctggggctggctttaggttgctgctggatagatatcattttggaggaaggggtccaggtcacagcctcagggcccacgcagtctttctacggattccccacggctgtctgctgtcctgctgcccatggtgtggcctctgcccctcccagcctcctgcctcctccctccagcgcccccaggcagctagaacagtcttactactcctgcagggtttgacccctcctggccttggccggtgttgcctctgccacccccgctccccacagtgccactgaagcaccctccaaggcccgtcagtcagggctcccctagttactgtgcccaccaccccgtcttttctgcctgggcgctcctgaagcccatgtggcccacaatgcccttttgagcactgagccattttccaggcgtagccttgggttggtctcatctccctcgactgacggccccgtgctccccatgcccacacccgcctggagcgccatgccaggcacatggtaggcgctcagcaattgcttaggagtccactgaaaatccagaccagctgccctgacttctccagttgatgtctcctactggaaagtcacagaaaggtctctaaacctctggaaggctgagagcacttatgcagagggacagatgtagcaagaaggcttcccccactccacaaccccgcaagagagctgaaggggcttctgcctctctcgtgggccctccgagagccatagccctgatggccttgagtctctagtcctgagccctgctgcccagtaggggatagtagggttccttaaggcctctgccttcccccctgtcagcccccacaaaaaggagagacacgccaaagaggtgaaaaggccaagcccaagccgcaggctctgcacacaccaccagtccccgcggctgtggtggctgcagctgggtgagctcactgtccaggccccagatgaggcaccaagggtagcgggacagggtatgcagagctgcctctgaaaagcccatgtcaggagtgcttgggctcagaggggctggggaccacaggctttcacgttgcagcacctccaggcaacagaagctgctgggagagaggcagacactcccctgctgtctcctgctccctgacttggccttctctgtactctgttccagttacagaagaagactgacagcttgacgtctggggccaccgagaagtccagagagagaagcagagatgtgaaaaacagtgaaggtaatgcttgctctgctgaagtggcatctcagcgcatacaatgattctgacaaaggacagaaggaaagaggaaggggagaaaatctgaattttggaatacctttaaatgaatggaactttttttttttttgaaactaagtctcgctcttgttgcccaggttggagtgcgatggcacgatctcagctcactacaacctctgtctcctgagttcaagtgattctcctgcctcagccccctaagtagctgggattacaggcatgagccaccatgcctggctagtttttctatttttagtagagatggggtttcaccatgttggccaggctggtcttgaactcctgacctcaggtgatccacccacctcggcctcccaaagtgctgggattacaggtgtgagattgcgcctgaccaaatgaatggaaattttatttcttgcaactaatcattagaattaggctcttaaggctggtggctcatgcctgcaatcccagcactttgggaggccaaggtgggcggatcacttgaggtcaggagttcaagacccagcttggccaacatggtgaaaccctgtctctactaaaaatacaaaaattagccaggtgttgtggcgtgcacctgtagtcccagctacttgggaggctgaggcaggagagtcacttgaacctgggaggtggaggttgcagtgagcccacattgcgccactgccctccagcctggagaacagtgagactccatctcaaaaaaaaaaaaaaaaaaaagtgaggctcttaaagaaggggaacatgctttagttaatagaaaaacatcaataattagcatatgtatcacttataagagtaagtactttttaaaagtgcaattgaagtactgaaaacttttcacaaatcacgtgtttgctttatatggctttgagcattttcctctgtacttgttgatactagtcattcagctcacggggaatgcagagcagccgtttgttcacctcataataaggtcacactaatggccaggcacggtggctcacgcctgtaatccaagcactttgggaggccaaggcggcggatcacgaggagatcgagaccatcctggctaacacggtgaaaccccgtctctactttaaacacaaaaaattagccgggcgtggtggcgggtgcctgtagtcccagctacttgagaggctgaggcaggagaatggagtgaacccaggaggcggagattgccgtgagccaagatcgcgccactgcactccagcctgggcaacagagcgagacttcgtctcaaaaaataaaaataaataaataagccgggcgcagtggctcatgcctgtagtcccagcactttgggaggccaaggtggacggatcacaaggtcaggagatcgagaccatcctggctaacacggtgaaacccttctctactaaaaatacaaaaaaaattagccgggcgtggtggtgggtgcctgtattcccagctactcgggaggctgaggcggagcttgcagtgagccaagatcgtgccactgcactccagcctgggtgacagagcgagactctgtctcaaaaaaaatataaataaataagtaaataataaataaggtcagactccatctcaaaaaaatataaataaataaataaacaataaataaggtcacactctccatgtctaacagataattcaagagatagtgcatcaagcatgcaaggctcagggcaggacaaacgggacatggctcataagaggagctgcaacaggctttggcatccaacacacctggttttgagtccaggcttgccaattacaagccgagagatgtgcacaagtgtcccagcctctctgaacctcagagccccagtctctaagccagaggcaataataccattgttactgctgttttagtgattaaacagtcaaagtgcttgtctggtcccgatgaagtgctcagtcaatgttgccatttaatttttaagtcagttcatatttttcagtgggtcagaaaagagatcaatattgttttactttgtctaaatgtgttcagcaatatatctgatggcctctttcttttaaaatggtctgtgtgtcggccgggcacggtggttcacacctgtaatcccagaactttgggaggctgaggtgggcagatcacttgaggtcaggagttctaaaccagcctggccaacatggtgaaaccccatctctactaaaaacacaaaaattagccagctgtagtggcgtgcacctgtaatcccagctacttgggagccagaggcaggagaattgcttgaacccaggaggcggaggttgcagtgagccgagatcacgccactgcaccccaacctgggcaacagagcaagactccatctcaaaaaaaaaaaaaaaagtctgtgtataatcctgtaacgtttctgcgactgctggcacttttttttttccttcttttgtgagacggagtctcgctctgttgcccaggctggagtgcagtggtgcaatctcggctcactgcaatctccacctcccgggttcaagcaattctcctgtctcagcctcccgagtagctgggattacaggtgtgtgccaccacgcctggctaatttttctatttttagtagagacagggtttcaccatgttggtcagcctggtctcgaactcctgacctcgtgatccacccaccttggtctctcaaagtgctgggattaaaggtgtgagccaccgcgccctaattctaacaaaaacaaatcagtcatcgtttcccttcttccaggagactgtgcctgaggaaagcggggggcgtggctgcagttctggacgggctggccgagctgcgcgggatccttgtgcagggaagagctgccctgggcacctggcaccacaagaccatgttttctaagaaccattttgttcactgatacaaaaaaaaaaaaaggaattcatgatgctgtacagaattttatttttaaactgtcttttaaataatatattcttatacggaaa

SEQ ID NO: 639 - DNA, 4767 bp, Homo sapiens
gcccgggcggctgcccttgggtgctcccttccctgcccgacacccagaccgaccttgaccgcccacctggcaggagcaggacaggacggccggacgcggccatggccgagctcccggggccctttctctgcggggccctgctaggcttcctgtgcctgagtggtgaggaggggccgggcgggaccacggcgagggctggggggcataggcctggcttccccggctcctcggacccactctgtccccgccaggccagatgaggctgccgtgggcgccaggggccctaaggcgcctgaggtgaggccggagagggggtgtccaaggcccggagggcgtaggagagagacccccaagccggcgagcgagttgggcctctccgcggcacaggcctgaaccaccccaccgcagggctagtgttttcctttctctgctaaacacacacaccctcttacctggcccggttccggctcttttacccacaaagacccggcccctcccggaaacctcaggttttgggaagggaggggttggattgaggggagagggttgtgctctggggagggagcccccagcttccaatatagatgcccgggggtgggcccgaccctccagatcactggaatttgggttcccacctccctctggtccccggccccagggctggccgtggaggtgaaggtacccacagagccgctgagcacgcccctggggaagacagccgagctgacctgcacctacagcacgtcggtgggagacagcttcgccctggagtggagctttgtgcagcctgggaaacccatctctgagtcccatccagtgagctgagagcgactgcatgaagctgggttggcctggagggacaggagcccaggatgagggcatggggtcgggagggggagtttggggatcagtatgcttggatgaaaaggtaagtgggctctccctagatcttttcagagctgcagtctgcctgaccgtgtatcttcctttcctcttccatagctcctatttccaactcccctgccttagtgtatccattgacactaaggtgttgtgactgataccaagataatatgctgcctcttctgcctctctctttgagagagagagagagagaccaatggatcaggttcatttagcacctgaaagggggtggtgtttggggacagagagacctttggagttccagcttaagggtatcagcctccctggctgatgtaagtcagaggcctcttatacccactttgatgaggaaggactgtagagttgatgccaggcagaaacaggcacatatgtgtgtcttctgcctctccccagatcctgtacttcaccaatggccatctgtatccaactggttctaagtcaaagcgggtcagcctgcttcagaacccccccacagtgggggtggccacactgaaactgactgacgtccacccctcagatactggaacctacctctgccaagtcaacaacccaccagatttctacaccaatgggttggggctaatcaaccttactgtgctgggtaaggcagactggggatccacgagccacatactctttcacatacttggggcgtttgcactggtcttgctaaatctctggtttctgacttttagcccaagcacacaactgcactgggggccccaagtgaaaatactccctttccaagtcttctaattcagatggtcatactccaactccaccctccaccgagagcatctcctccatcagagcctaataacagagtgtgtgagagaaagtccttcccatacatggggatctgagcctgctcccagcagctccatcatgggggaggctctcatcggtagttggattctgtccctcccaaggtcaatggcagagaaggggagtggccaccaaaggaacaagggcccctattactgagcaccaacttcgtgctcagagcttctgtctcaccccaaactagagccttttcagagatgagcaaccagaaaaactatcacagagactggcagtgtttagatggaaaagagaaggcctcggatgggtgtattactgctggattcaactatccaaagggctgtcatgtggaggagagattttaatttctctttgtgggcccaaagggcaggaactgaaaccaatgggtggaggttatgttaacacacattttggctcaacatgaagaagaattttctctaacaatcagaatttccaatagtggaaatccctcagttcctggggatgcagtggtgtgtggacccaagaggaccactgtttgataggggtattgaagtagagaatgtagcacctaatggagttgggagtggggctggaagattgctgaggaactttctgtttttttttttttttttttttttttgcagttccccccagtaatcccttatgcagtcagagtggacaaacctctgtgggaggctctactgcactgagatgcagctcttccgagggggctcctaagccagtgtacaactgggtgcgtcttggaacttttcctacaccttctcctggcagcatggttcaaggtaagggcccagggcatcaggaagagggtactggagacctgggcaaatctggtctctaaatcccacacacccgtattatccgttccatgactaggggtatgacacaaaccactatacctttccctgtctcttccttggcttcctgtattgttccctcctgcctgtctttctgcagtctgtggctgcatgatcctgggggtatttctcaagctgaatatactgctgatatcctggaagagagtagagggcagggagcaatctgatgatgaccacccatctgccttggggagatttcttttaggtttcctaagggtcgtggaccacttccaaacttcctagagaggaaactgaggcagagtagcatggactggctggaatcttttaaccagtttctttggaggagccttagtttcttggcttcctcttcctggatccagttctctctccagccccagcaaactcctttatcaatccagaaatgaatgacccacccccagatcaccttcctggtatgtgctctgccttctaaggcaaaggtaaacagtttagaaaagcatttgtgtcagcttagagccaccctacaggatgcagtttctagcaatcaagccttttaccccaaaccaggaacctgacatcagccagtaagcaccccaccccgactccattgccagtttctgaatccttcatgagtgtgcagtcctcctcctcccaaaaaggcagctatgtagggtggaaagaacaggtaagttgtagcagctttggaattcctctctgggtcacctcagacacactacttccttcttctgaaccggtttcctccccagtgaaaaaaaattagttgctccctgacaggattgttataaggatgacatgaaatgtgctgtcctcgtagagctgctcactgagttgaatgagtcgtggaacacttcctcttcatcctctagatgaggtgtctggccagctcattctcaccaacctctccctgacctcctcgggcacctaccgctgtgtggccaccaaccagatgggcagtgcatcctgtgagctgaccctctctgtgaccggtagggatgctgggtggaggccaggccagcagccttgtgttggggaagctgtcggctggtgggccgaggaaagcctgcaattctgagtgagggtcctgtatctccttagaaccctcccaaggccgagtggccggagctctgattggggtgctcctgggcgtgctgttgctgtcagttgctgcgttctgcctggtcaggttccagaaagagagggggaagaagcccaaggagacatatgggggtagtgaccttcggtgagcaggagggctggggggtggcgcaaggagggaggaaagggcttgagttaaaagcgggtgcctgcaaccctcaaactccgacatcattcagtgtgtttaggggcaggaggtgttgttcagccgtggaatttgctggtggcagcagtgtaacctgtgtatttgagggtacaggcaagcggtacagggtggagtggctggtccacaagctgtggcagggaagctgtttgcaggactgccctgcccctcctcatatttaataaagtttacttttctgttccgaaggtattttcatatattttaaccacctgggagtagtagtggcttgtagatgccaggaaatggatttgtcctgagcagtcagctgagttcaattcttctgtggaggaaatcaggaaaggggaggggaaactgcctctgtcatccactttagctgccagtcagggtctaggatagggatcagagcaacatttctccaggtggagtcctcagattacctggacagaaatcaccgggaactagttatacattcagattcaggccacttctagccttcctgtagttgtgcgttggggagtgatgaggcccagaaatttcattttaaccaaagttccgcagattattctcaagcacagtgaaatttaagagtccccaggttagaggacggccctcctccgcaggaggcttctactgttcactcagaacttgcctatacccatcagggaggatgccatcgctcctgggatctctgagcacacttgtatgagggctgattctagcaaggggttcctggaaagaccctcgtctgccagcaccgtgacgaccaccaagtccaagctccctatggtcgtgtgacttctcccgatccctgagggcggtgagggggaatatcaataattaaagtctgtgggtaccata

SEQ ID NO: 640 - DNA, 20626 bp, Homo sapiens
cagcagaagtgagtacgtgagcggcgcagcaagatcccagctcggaccccggacggcgcgcgcccccgaagccccggatcccagtcgggcccgcagctgaccgccagattactgtgcatcccgaatcacgaccacctgcaccctcctgccccggcccgccccccaagtcctcaggcacccagctccccggcgccccggatcctcctggaccggtccgtccagattcccgcgggaccgacctgtccgcatccccaggaccgccgggctcggtgcaccgcctcggtcccggagccgcccgcctggattgcattccctcctctcctggatctcctgggacccgacgcgagcctgccccggagcccgccgagcgcaccctctctcgggtgcctgcagccccgccggcgcggcccggcccggcgcggcccggctcggctcctagagctgccacggccatggccagagcccgcccgccgccgccgccgtcgccgccgccggggcttctgccgctgctccctccgctgctgctgctgccgctgctgctgctgcccgccggctgccgggcgctggaaggtgagcggcgtcggggggcgcgcccgggaacaaggtgcctggggtcgcggggctgcgggctagcagcgtgggtccgacccggattgagcgcacgtcggaggaggccccgccaccggcgcccgctccggggcccagggatggggtggggaggccgcccctggagccgcctcggaggctggagctggctcggaggcaggcagcccgcgggttggggggtcgcggggagctagactcgggacgaacgtcccccagagtcctggccctgctgtgagctttcgcgggagtcccccacactcacggcagagaagtggggctcccggcaccccccgaagtcgaggacgtgtgggcgaccccccaggcaaggcgagggccgcggggctgtggcgggtgggggcgaagcgggactccccgggttggggggcgctaatgaggagcccgttggagttaactgtgagagtgtgagtgcgagcaccccgatttgtcaggggaccgctgcgggggcggacaggcgggggcctgttattgtttatggtttaccgggcgccaattacacccgaggtgctgtatgggcgggcccccgcaccctttgtggaggctccctctccgcctgctagagcagggcttgggtctccatttgaacccctgaagttgcgggatttgccccaggtagcagcagagcccggcgccttcctcagtagctggtgggaaaaggccaggcttctcaataggttctgtgaaacctgccaagactgctgtggggggcagctccaacttccaaatgattgtacttggatgaacagcccggcgttgttggcgctggcaggagagctcacacgcatgccacttgacacaagcttgccgcggacagaggccccaacaccagccacaaacaatagggaggcccacacacactcacgccccgtttccaagaatttcggagccattaaatgagagagggtcagaaccttccctaaagtggagggagggacgccacagaaattcgagggcaattggaataaaggcagtacttatttggggtatctttaacagatctagttactttcttagtttaggaacgaaaacacgaactctgtggaacttggcttgttcttatgttcacagtcggtaaacttaaaggttggaaggaaaaaagaacacagttcagagagaaaggcatcctctggtgcgttctaatgttctccagaggaaagacctcctatgatcccccaccctcctcatctctgagcctgctgtgctgacagatcgagtcccacgggtggacacatgcaaattcagactgacacaccgaggtctcgcccacactcgcacacactcacccacatgtgtgtgataggatcgcaggcgtgagaacccagtgtggggctttgttgttgattgccttgagggtgtgagccagggagcctgttctagttgccagatctgtgtctgggtctctgtgtcgtagtccaggagaggcgacactggtacacacacactcatacacttacggggctatgtgtcacctgtgtgtgtcgggccacaaggcccttgttgtgggtgtggtgggtgctggtgctgagtgtggagtgggagtgtggtttgggtcaggtgcacaggggctacctgaggaggctcacttctccctccccccttcccttcctttctgtctttcaaccctcatcacctactggaccctcaggagtccaggccctagcaggagcccaagcttccaagcctccaggccaagcagctggggggctgtccagaaggccgagtcctgatgtgctggggcggcccgggaagagggggcagcaggacctttcgttccccattcccggcctgcccacctcccctccactgtgaagtgggagctagggctactccctggctgtgaggccaggccagcatgggatgcctctgggaagcagcggtgcctacaagggtggtttcaccaattccttcacttttgcaatacctcagactctctggtctccagttcgtgcgtgggagaatgtgagggaacaaatgcaaggtgctgaccccagcgcagacattgcacctacccaccctctggctctccctcactgggagacaggataggaaccgcaccgacctcgcagagttcttctgagtactgaattcttaatgtgtgcaaagtgcttagcataggcattgttattcaaggattagctgttattattattgttaccctagggtctgctccttggggagcttcaggagtgaaacgagtgtgtgcccttatcctgctggagggaggttagagggaggaaagatgaaagggaaggttggtgcagggggctgggggtggggctgtctgccccacatctccctgcagctccagagagggaaggaatggggagagagctggcccagtgggcagctgttttctgcctgtcctccctcctgtattctggggcttggcatgtggatgggtggacttcgaggtcctgggctgtgaccaggatatgtgggttccatagcactgaagatctcttcagcccctccagcttgacaggtggggggtctagctttctccatccaacctaccatttggtttcgtcaggatttggtctgcccttggccttgtggctctttgtgtctggggcatgacatttattttggcccagggtccctgagccctggctgctacctctcatgtaccccctagttagatgctgtctagcacctggttcctcttcccttcctgcacacttgggggtcaccaagactctgcatccaaggctgtcatcagttttccatgtggatggagcctgggtccttgcttgtcctcgtggttgaaaacatgccctccccttgccctctgattgattgtccccttcccccatgcaaattgccctgggctttacgcacagccacagggaaacagggccaccttgtcacccactggtcttttgagtaatgttccccagttccccaaagccaagattattctcccctcaggaccatcaacgggtcagggggtggggtccaatggggaacagactaggaatggggcctgagatgaggaatggtgtctgaaccccagcacccctatacttgggataggatggagagatccccgctgggaagatatccttttgagaaaagagaaacagttaccagatcgcaggaggtggggccagcacgtccccctccagccaagccttggtagctgagttgtcactgcagtggaacctgtctctgaaggaacaagacagcatagagcccacctccttcacaggggcagcaggagtgacccctgagaacacgggaactgagaggggacagcgggccaggatttggagggcttgctcacttgtttgagttgcctctggcacccccaaaccccatccctgtctgtcaggagctggccttctgagcagctgctgggggccggcaggtatttggaagaaccagtttgctcagcactgccctgtctttagccacagctgctgctgctgccactgcagcttcagcggctgctgcgagctgaagccgaagctgccgaagctgccgtgggcaaggcctctgccgcacggccttccactaattaaacagcatgaagaggctgaatcaccaggcctgcatagtttgaaaattgtagccctgcctgttgtgctgagtcaaactggtttgtcgggattgggcagctggggggggtgaagggtggagggagactggatacagctgggcacctgatggggtgggagaggccccctgcccaagggctagccctggtgccaggtctcctattcccttctgcccccagcctcctggccagacccagtgtggccagcatcacaaggaagggctgaagggctcaggttaagggctagctgtccacccgtccttctggctgctggcagggccacagtggggtgggggcatggatgagcaccgaggcgtttgggctccccgccctgggcttctttccccttcttctccctctcaggtttatttaattagaaacccccatgatctgaggggaagaatgaaaaacaaaatgtgttctctgttctgagatgttccccccaccccatcccagacatgggggccaaggggctgtggcaggaaaggaggaggtggccctgggtgagttaggctccccacaacatgcatcttctccagtcccatggcaggctccccccaagacgccttgatcctcacgctgacctccctgtgtgtacaggctggcacacgtgtgtacacatcctgacccatgggaggggagccagcttggtggctgaggaagggactccgtgaagaggaggagggtgtccaactcgggtggcatagcactgctccaggctgctcctccttgcgcagaccctggccccctgccctcctgccccgctgcacactctgcgggcccagccctggtgctgacctttccttccacctctaagtccctagtctggaatttgggctgaagccttgctgcttctgtctttagttgttttgtgtttctgttttttgttttggcttgtttttttctgttgtttgtttgttttctgggtctcaatgacacttttgctcccagggtgctatggggcctggccctccaccagggcaggtggtaggccctcagctggtgcccctcccacaggccagggtgcccatgatgtcctcctcatgccctgctcaaggtcctcgacctgcaagcggaagagccttgcccagagcttctgaagccaaatctcttcagggagctaccctctaccaagggctcaggggccctggagacagtgccattgtgctggcagggaagtggcttgttacttgggcagcggctatacctggggaggccgcacccagccacacccagaatcatcttcatgcccctgctccaccccagcctcgtgacctgactgacagctcctgcccaagccaggacaacaggaagcagggctggggctgtttccctacacctctggctaaggctgccccagcacctctgcttcccttgcaagagtggcccatgtggctgccctgcctgagcgagaggcaccagagtgttgggggcaggatgaggggtaccaccctctcccagtaactcttcctctaccccactggaagacatcccataaacagaaccatgcttgcagggtgtgtgtgtgtgtgtgtgtgtgtgtgtgtgtgttgcgggtgcatggaggatgcacctctgaggctttacacaaatctaggtattgatacttacaccatgtcagggtgctcctttgcaggggctgtggcatatttcagtgtcattggacatctgtgactttgcagctgattgtagtttgtgtgactaaaagcatgtcgccaagtctatacagggaaactggtgtttgtgtttgcactttacaccgaagactgtgtgacttgcagctggtgatagcatgtgcaattgggtgtgtaaggagaacatactgcagggttgggggtgagtgccctctgtgtgcgcatatgtttcaggaaatctgcacataggtaggctggaagcgtgggtccgcctaaggcaagccagatctctgtgtaggaaagattcactgtatatgaatgtctaaggaagactaatctgtttgtaccatatgcatccgtgtgtctgagaaagacagaccatggctctgtgtgaagctgggtgtgtgtttgtgggcggctgtggctttgtgtgtttttgtccaccatatgtgttgacttgtcactctttagccccagtggcggggagtgagcccagcccccaggactggatgctgcgcgtgcatctgtgtgtttgtgcatgggtgagggccacacagctgctgccacgtggctgctctccatggccctgtggaaacctgaaagaggtattgcttagctcctgagcatcaaagctccagtccccgaaagaccccaggcctggtgactacctccctggtgactttgctgggcagttgtggtttcctgcctgacacagcccagtgtctagggtggccagcctcttctcccctctgcctcctgcagatacatggcaggacggcgagggatggggtgcagcaggcagctgggggagttgagaacttgctcactcactcctcttttgtctttacccgctgcccctcatacccccgtcccaacgtgtgtatgtacaacacacgtacacacacgtgcacacacatgcacacgccgcacacacagcacagaaaaggtgggctgggtctctttctcccaataccacggacagatgggttctatgaccccccccccacatccccctcacctcctgccgaaggcagggaccaggcaccccagggctgaggagggccttgccccgtcctctgtgcctgggcaggctgaagggagcaggctcctcctctccccctgagaaacggggaaaccgagagcacgcggccccctccccaccggagtgaccgagcccttcctcgggcacacatgactcgaaacccaagtcctctcttcattaatgggaaaaatgtggcgagattgagcgatggccaaggctgagcgatggccaagggccgatcccctccctccctccctctctcgctccccagaaattaaacagaaatgaagagcctccctgcctccctcgctccctccctccttcccgccgccgcctctccgccgtcccctccctccgctccctcctcccggagccagcgcagggcttgttttaaactgtggaggaatctggctggagggggagggggctgaatatttgggtttaaacagttccagatgggtttggcacaggctgagcagaaggaagtgagggagagggaggagggaggcggcgcgagggagcggctggagccccggcctgctccggcgggcggaccggcgggcggaccggcgggaggactggctgcgggggcagggcgcgcttgctctgccggctcccgggactgacactcgcgctgccggctggggacgaggccgcctggcaacctccctctgtccctgtctcctcgggcctccgcgtctctcggtctccctgtctttgtagtcagccgccggccatcccggctgtcggatccccgccagccggctccgcacatccctccggctccgtgccgcccaccgcccgccagctccagtcgctgccccgcccgcctccctccccgcctgtctctgtgggccccggcttctgagcatctcggcttccctcgagtaccccccaggccgaatgtctgtgtctgtctgtctgtctgtctgtctgccagaggccaggatcgctccccttacagccgggccctcaggggaccaggggctgcggcagcgggaggagcctccctccctgcagtgaatggctgctgcctgcagcccctttgcctgacatggcggggggctggggtcacagctgccttgtccacccacggggtcctccgccgtcctcggctcagacccagcctccgggaaaccactgaaggctgcaagcctgtggccgcggggtttgggcttttccccacttgggcacccagaggggatgatgtagaggcctccagaggtcctggggcaaccctgccccattccagcttcagagctggctgcactgtcttccaggccacgggaaaggagttggcacctctttccttcctttcctgacccaggtctaatctgggggtcacactgtctttcagagagtagggacatccagccagagcgcagaaccaggttcctaagggagcaagtgtatgtcagaaacattaacgggcccctcctatgaccaaacaaggtgaaacagacaagaaaccagctcagaacacaggccgggtactgtgacaaagcccctggccctagatgcacaaaggagggcatcttaccctgacttggaggttcacggaaggcttcctggaggaggcaacagctctgttgggacttaaatgataggcagttttctaggctttctttcatccctcctttacagaggggcatattgcagtcagagtgcaagggattaattatagagtcagatacacctgaacctgatccacccttgtcccctcaccccaagtcctagcaacttcaccttaggcagtgtattttctttgtctgggcatcagtgttctcttctgtaaaagggatacaccaacagtaccttcttccaaggattgcaggaagaattgaactaagagctggtttggggctttggtggtcccctctccaccctcaaagcgcatccctgccccatcacctgtaggtgctgcgtgggagctggctctggcctgtcactgccctccccttcccctgggccttgtgtggggctgggcctttgtgctgggaacggagtcaggggaggccagggccagggtctggagcacacagccctttgttccaggataaaggccctgccggcccctttgtgtggagattagcagagcctgtaggtgtgtggaccagcctctgctcctgcctcattaacccaggcctggggtcagggcactcacccctagcctgcccgacctgacatctttggggctgtgacatctctggggatggccgcagggtctcctgtaggctagggaaactgggggctttcaggacttgtggaaagtggagcctggggggaatcctttcctgagccatctcttctttctttcttttttttttttttttagacagagtttctctctctgttgcccagggtggagtgcagtagtgcaatctcggctcactgcaacctccgtctcccaggttcaagcgattctcctgcctcagcctcccgagtagctgggattacaggcgtgcgccaccagcctggctaattttgtatttttagtagagatggggtttcaacatgttggtcagactgatctcaaactcctgacctcaagtgatccacctgcctcagactcccaaagtgctgggattacaggtgtgagccacttcgctcatctgtgatctcttctgtctcctcaacctgagattagtccctgacctttttctccgttgttcctccagagaccctcatggacacaaaatgggtaacatctgagttggcgtggacatctcatccagaaagtggggtgaggctttcccatcattctcctgagtgttgtttgccattaggcctccccccacttccagcctccgtgccccctcatctcaccagggcctggaggagggctgcctctgccctctgcctgtcaccctcacttcctgtgccatccccatcatcctcacttgtgaccctctgaagcacctcatggtccttctctgtgggcatttctatctctcacccctctgcctgcctgtgccccccagctcccgctccctctccctctcttcctaacagccctctgcatgtccatccccaccatctccctcctccctgggtccctggagaaaacactggcttggaaaccttagttccagatctttaacttgctgtgtgaccttgggcaaggccgtttacccctctgggtggccacttcttgactgttaaattcccgcagtccggacctctctcacatattctaattaatctccctagatggccttcatggctgctctaagccctagaaccctggagtacgatggcactacaggccctgcagtcaccaggcctgactgtgtgaccttgggcaaaactcccttctgcgagccttggcttcctcatctctaaacgtcgggacaacagatgcggctcctcatggagctgttgtgaagattgaatgcgatgttgatagtgacagccagtagcccggaagtgcttgcactgctacaagcccattacatttattagcctgatttaattcctcacagcctcgtttagttccaagcagccccattttacagatgacaaaactgaggtataaagataacaaatatagctgatgttcctgcagtacttaccaagttcctagtcctgtcctaaatgctttattcagttaaagtcattattccttacacatctttattatccccatgttacagatggggaaactgaggcacatggcggttaagtgacttacccataatcacacagcaggcagagagctggaatttgagcccatatagcctgtatgctcagccactgcacaccatagaagcatccctgtgaagtaaatagagcagatctgggcacgagggaagcacttggcaaatgcaggcattcactctgtctttttcattggtccatgcacagtgggaagaggtgagtggctacgatgaggccatgaatcccatccgcacataccaggtgtgtaatgtgcgcgagtcaagccagaacaactggcttcgcacggggttcatctggcggcgggatgtgcagcgggtctacgtggagctcaagttcactgtgcgtgactgcaacagcatccccaacatccccggctcctgcaaggagaccttcaacctcttctactacgaggctgacagcgatgtggcctcagcctcctcccccttctggatggagaacccctacgtgaaagtggacaccattgcacccgatgagagcttctcgcggctggatgccggccgtgtcaacaccaaggtgcgcagctttgggccactttccaaggctggcttctacctggccttccaggaccagggcgcctgcatgtcgctcatctccgtgcgcgccttctacaagaagtgtgcatccaccaccgcaggcttcgcactcttccccgagaccctcactggggcggagcccacctcgctggtcattgctcctggcacctgcatccctaacgccgtggaggtgtcggtgccactcaagctctactgcaacggcgatggggagtggatggtgcctgtgggtgcctgcacctgtgccaccggccatgagccagctgccaaggagtcccagtgccgccgtgagtggggactgtcctggggaaagggttgtcgggagggcctgggccacagctacctaccgccccgccccccacccctgcttgctatctgactaggaggtctgggagcaggtccacagtggaggcaggagagggaagagtggggatcagatgcagagaatgttgtgtaaggagggagaagagagagaaaatgaggagagacacaaggatagtaagagaaaaaatgacattaaagagagaggaagagaagcatgcagaatccttggcaagcaggcacctggagaacgcagtcagaagcttaggaggctggcagagatgctcgctttgtcccggcctgagtgtatgcttcaccctgaaagtggtaggttggccccagggccaagggcacgggggctgtgggtaccttgtgcatggctttttaccctgggctctctgccccttgggaggcagtatataaatggcacagtggttaggggcccagtccctgaagttgagtcctgactctgtcacttaccacttacgtgaccttgggcaagttacttttttttttttttttttgagatggagtttcacaattgttgcctaggctggagtgcaatggcgcgatcttggcttgctgcaacctccacctcccaggttcaaacaattctcctgcctcagcctcctgagtagttgggattacaggcatgtgccaccacacccagctaattttgtatttttagtagaccgggtttcaccatgttggtcaggctggtctcgaactcctgacctcaagtgatccacccgcctcggcctcccaaagcgttgggattacaggtgtaagccaccactcctggccctgggcaagttacttaactgtttgaaccttggtttccttatgtgcaagatgaggaaaataatagaggttccttcatagggctgtagcgaggcttcttatgtgagcaatgctttgcccgtagaacagtgtctggcacatgggagcacagccaccagctaagtgttggccatgagtctccagagccctggcatccacgagagctgggctgttctgcccttattgtatacatgaggagttcaggaagcctgcctcggatggcttgccaagacttatgtactaggcttcggagttatcaaaattgtccacctagggggtctctcactgagcctcaccagtccttgtgaggtagattcctgccatctccctatttcgccaataaggaaactgagtcttggagaagctctgtgcacaggccttgtagctagggaatgtggaagctggcacggaagcctcctcctgtgctctgccatgcaggatggcatgctgagggccctgtctttcgctccctctgcccgattctcttccttggggcttgcagcctacagctctgaggggtaggtgatgactcttatggcagccctaggcgtgagaggggcttggcagcatgaagctggctgcgaggccatgttgtcatgagaaggtgaacagtgcctttcccgggccctctccacttctcgatgggaatctgtcctgagatttcctcttcctaagtggagaaagggggtggggtgatgagcctgacagcctgaagaggggctaacactctgcaggtccccggcaggaaatgcatgctggttcccatagcaaccaggctggcctggcctctgccccctcccccactggctcaaaagagctagggtggaatatcaccttcgtgagggcagatgaaaccccagaaaagggcaagccctagcgctgggcgttctcccctatgggtgtccccctccacaggcagtcatatggagaggcagtgacccactttagtgtctaggagggtcttggtttatgcccattatcctaacacagttattactagtgcctcctttgacttgcaaatgttccagtgtgaagaatacacgataaggctaccatcaatccacagagcctgtgtccaggggcccaagggtagatggcaggagggaagactggggagaagggatgctcaggccctgggcttgctctggggtgagtccccttgtggacacttgaggcctctgaactccaggtgaccccagccttcctgcctgctttctttctctcctcctctcacccgtcctcagcccccatccctgcccaagggcagacaggagctgctgcctgcgcctggtgggtggggcgagagcttcactgtgaaggtcccgtctcctggctgttctagggtgtccttcagggtcctcaggaatgatttttctggagcctcggggagaggtggggcatctccacagtgccgggtgctgctagcccaccggtggtctcttcttcaccccacctcttcctctgtctttctctgtcttccctgcctcaacaagcccaggctgtccaggtgatggggctgacgtcttcgtccatgaggccccggggtaggggtgaggggggcaggggcggggaggaatctgctgacgtggggtttccatggggcaatagggccttttgtagctgcagctggagttaggcaatcccagcattgcccccacagtctaggaggtggaggggccagacctaggctggggagaagccaggttctcatggagctgcggaggtctggtgtctgcagggaagggaggtgagccccattcatcctcttctctcccacagcctgtccccctgggagctacaaggcgaagcagggagaggggccctgcctcccatgtccccccaacagccgtaccacctccccagccgccagcatctgcacctgccacaataacttctaccgtgcagactcggactctgcggacagtgcctgtaccagtgagtgaacgcgtgacctctctttccctctgcaggccttccctctggggggccagcctgggaagcctaagcagtcactatgaatagccccattttccagggaaggagctgaggctcagggaagttagatgttgcgctcaacatggcacaactgggaggtgactgcccctgagccagaatccaggtcagccggctcgtcccttccaccaacgcttgctaagcacctacctgttcctagccatgctcaggaacttgctcctagccatgctcaggaactggctcctagccatgctcaggaactggctaggagcttagcagttggccttctagtccgttgcccctccgtctgtatagaagtgcctctctccagccccactctaaccatggagggggcctcacatcctgagggtggcctggtgctccacttcctctctgccctggccttcggtgtgccgggcattgtgctgggtatcgagggtgaggaggtgaataagatacagtcattgtcctaaaggagctcacaacctggtgggagaaataggtgtaaaaacagataatgaccgtaatgtactaagagctgggctagaaggctgtctaggaattgttttatgtacatgtagagtatagggcaaggacgaatcaaggaaggcttccaaaaggaagtgatatcacaagctgggtattgaaggataaataggagtctgcctggtgaagaaatgtaggaacgttattctgcttatcaaagcagaggcaaggcaaggaggtagaaagcagattggagtgtgctggaactccgggcagagggatggtcctagagcccccagctcactaccttctccctccatattcctcacagccgtgccatctccaccccgaggtgtgatctccaatgtgaatgaaacctcactgatcctcgagtggagtgagccccgggacctgggtggccgggatgacctcctgtacaatgtcatctgcaagaagtgccatggggctggaggggcctcagcctgctcacgctgtgatgacaacgtggagtttgtgcctcggcagctgggcctgacggagcgccgggtccacatcagccatctgctggcccacacgcgctacacctttgaggtgcaggcggtcaacggtgtctcgggcaagagccctctgccgcctcgttatgcggccgtgaatatcaccacaaaccaggctggtgaggaggggacactggagggtagggcctgggtcactttctcctggatgaggtgtcccaggacctgctaagggaccactgggggtcccatgggaagtgggtctttgggaaggatgccagggtccagggagcccctggtgagccctctgctcttcccagccccgtctgaagtgcccacactacgcctgcacagcagctcaggcagcagcctcaccctatcctgggcacccccagagcggcccaacggagtcatcctggactacgagatgaagtactttgagaaggtcagaacctcaaggggcaggaggaggccttgggctgagctgggctgagaaaattacccccggatcatgatggggcccttgggagcaaggccttgggtatggagggggcatgtggcaggcctgggtgtgaataggggctggttggcctcaggacccacctgagggtgccccctctctcctggcattgcagagcgagggcatcgcctccacagtgaccagccagatgaactccgtgcagctggacgggcttcggcctgacgcccgctatgtggtccaggtccgtgcccgcacagtagctggctatgggcagtacagccgccctgccgagtttgagaccacaagtgagagaggttagtagccccctgcgcctgtccccatcgcggccctcactctctgtccctccactcagcagccccttctctatctccaggctctggggcccagcagctccaggagcagcttcccctcatcgtgggctccgctacagctgggcttgtcttcgtggtggctgtcgtggtcatcgctatcgtctgcctcaggtactcccaggcccactgttgctccatgggccgcctcgaactgccctttagcatcctagagccctcatgccacagagatgagccgccaccacttccctcagacccagggccttagccctcctggggccagccgttgctggagaagccctctcccatccctgcctgtgtcttcatcccgccctttctccataccccattccctgaatctccgggcaggttccctagggactgagtccactgaaccccttgctcagacacccagagactgctgtgaccaccaattgtgggactaggccccaggccatcccctgtatcctctccgccccttctgtgagcccaagggtgccctgaacaaagggaggcagatgacttgtctcaggcctgccctccaccctgccaccctacaggaagcagcgacacggctctgattcggagtacacggagaagctgcagcagtacagtgagtttgtccccgccgccctccccaagctctcccagccccctgcagggctctcagacacccttctccctgcctgggacttcattccttagagataaaccctgaatgccccctcccacttccagtcaagtggcatttcctgacccctatctcactccgggtaccctgggcccctactcactcctgctagccccagaaatgactgagacgtgacctctccccctaaaggcagttagtcctgtgggaaagacaagatgcaaacacacaggaaacaatttgagaacaattaagggttgagctgggtgctcctgttgtaaagggcactaagagtttagagaagaggaaggcttcctcgaggaggtggacttgagctgagccaggcgggatgagcagggtgttgggaggtgagggagagcattcctggccagaggagcctctggaaggtagtgggcggggtggggaaggagcccaactgtgggggcagcgagaagactggtttgacagctgctgggaagccaggctgggtagctgtggccagccctcggagggtcctgaaaggcaggcagaggagtctggacttgactccaccataggtaattggaaaggctctcaagctggggagtaatacaatgaaaggattgttttaggaagacagcggtatgcaggatagctcggtgggaaaagtccagaggcagagagcccagctgggaggctattggaatagtgtgagtgttgaaggcctggacaaggtcggggcagtgggaaccaggggaggcatgaatctgagagaggtctggatgtgatgagagatgagagagaaaaactaggagtagaatcctaggtgtctagcctttatggtcaccaggagttctcatgggagctggaggattagggcagcaacacagaggaatatggggctgggctcagcagggagcctgctggagctgtgcccatcgcagggagaggctggcttgacgttaccctctcacgcccacctcttctccctccagttgctcctggaatgaaggtttatattgacccttttacctacgaggaccctaatgaggctgttcgggagtttgccaaggagatcgacgtgtcctgcgtcaagatcgaggaggtgatcggagctggtgagtctcccggggcacagtagagatgagaagctgaggcgggctgggtacaggagtgagtcatagcttgtgccctgtgccctgcaggggaatttggggaagtgtgccgtggtcgactgaaacagcctggccgccgagaggtgtttgtggccatcaagacgctgaaggtgggctacaccgagaggcagcggcgggacttcctaagcgaggcctccatcatgggtcagtttgatcaccccaatataatccggctcgagggcgtggtcaccaaaagtcggccagttatgatcctcactgagttcatggaaaactgcgccctggactccttcctccgggtaagagccagcccccaggccctctccctcccccagagagttggattgggctcaccatcccctcccacaagtcagacagcccctattcaagtccataagcatttactgaggtggcttggtgcagggaaatggcagggccttcatagccataagtatgggagttcacatcttgactgttccttactgcctgtgtgacctcaggcaagtgacttaacctctttgagtctcagctgcctggttgtagaatggcagtggtaagagctagtgggtcctcatggggattaactgggatgttgtctataagatacttgacacatagtagggcagctcacttaccctcagggcactctggacatggttgcaggagagacgaggtagagtctgagtactcggagagggaaggcaggtgggcaggccatgggctgatgggagcaatgggctcacctgagcctgcttgttgcctgcagctcaacgatgggcagttcacggtcatccagctggtgggcatgttgcggggcattgctgccggcatgaagtacctgtccgagatgaactatgtgcaccgcgacctggctgctcgcaacatccttgtcaacagcaacctggtctgcaaagtctcagactttggcctctcccgcttcctggaggatgacccctccgatcctacctacaccagttccctggtacaggaagccgctgggagggagactgggggcggggcctatcagccaggggctcgggcctggggggcagcccggagtcacagggtgaagggcctgtgcccccctcaccagggcgggaagatccccatccgctggactgccccagaggccatagcctatcggaagttcacttctgctagtgatgtctggagctacggaattgtcatgtgggaggtcatgagctatggagagcgaccctactgggacatgagcaaccaggatgtgagtgaggctacgccagagtggttgggtaggtgggtgctggctggggatcatggcagtggctcactcagggtttccctgccttcggcccaggtcatcaatgccgtggagcaggattaccggctgccaccacccatggactgtcccacagcactgcaccagctcatgctggactgctgggtgcgggaccggaacctcaggcccaaattctcccagattgtcaataccctggacaagctcatccgcaatgctgccagcctcaaggtcattgccagcgctcagtctgggttagtacctctgcctctgctcccgccaagccagtagccctatctcccaccttcaagactcaccaggtccttctcttcttcccacagcatgtcacagcccctcctggaccgcacggtcccagattacacaaccttcacgacagttggtgattggctggatgccatcaagatggggcggtacaaggagagcttcgtcagtgcggggtttgcatcttttgacctggtggcccagatgacggcagagtaagtgtgcctcagatttggaggagcagggcagggggccctaggctgggcccagagttgagggcacgaggaaagggactgatcctaatttggctccacctgcagagacctgctccgtattggggtcaccctggccggccaccagaagaagatcctgagcagtatccaggacatgcggctgcagatgaaccagacgctgcctgtgcaggtctgacaccggctcccacggggaccctgaggaccgtgcagggatgccaagcagccggctggactttcggactcttggacttttggatgcctggccttaggctgtggcccagaagctggaagtttgggaaaggcccaagctgggacttctccaggcctgtgttccctccccaggaagtgcgccccaaacctcttcatattgaagatggattaggagagggggtgatgacccctccccaagcccctcagggcccagaccttcctgctctccagcaggggatccccacaacctcacacttgtctgttcttcagtgctggaggtcctggcagggtcaggctggggtaagccggggttccacagggcccagccctggcaggggtctggccccccaggtaggcggagagcagtccctccctcaggaactggaggaggggactccaggaatggggaaatgtgacaccaccatcctgaagccagcttgcacctccagtttgcacagggatttgttctgggggctgagggccctgtccccacccccgcccttggtgctgtcataaaagggcaggcaggggcaggctgaggagttgccctttgccccccagagactgactctcagagccagagatgggatgtgtgagtgtgtgtgtgtgtgtgtgtgtgtgcgcgcgcgcgcgcgtgtgtgtgtgcacgcactggcctgcacagagagcatgggtgagcgtgtaaaagcttggccctgtgccctacaatggggccagctgggccgacagcagaataaaggcaataagatgat

SEQ ID NO: 641 - DNA, 23999 bp, Homo sapiens
taagaccaggatgtctctgaaatggacgtcagtctttctgctgatacagctcagttgttactttagctctggaagctgtggaaaggtgctagtgtggcccacagaatacagccattggataaatatgaagacaatcctggaagagcttgttcagaggggtcatgaggtgactgtgttgacatcttcggcttctactcttgtcaatgccagtaaatcatctgctattaaattagaagtttatcctacatctttaactaaaaattatttggaagattctcttctgaaaattctcgatagatggatatatggtgtttcaaaaaatacattttggtcatatttttcacaattacaagaattgtgttgggaatattatgactacagtaacaagctctgtaaagatgcagttttgaataagaaacttatgatgaaactacaagagtcaaagtttgatgtcattctggcagatgcccttaatccctgtggtgagctactggctgaactatttaacataccctttctgtacagtcttcgattctctgttggctacacatttgagaagaatggtggaggatttctgttccctccttcctatgtacctgttgttatgtcagaattaagtgatcaaatgattttcatggagaggataaaaaatatgatacatatgctttattttgacttttggtttcaaatttatgatctgaagaagtgggaccagttttatagtgaagttctaggtaagtcatgtgtctaactggtgcttattaagttctaacttttctgtgcctttgaaggtgagcttatataaatataatgtcagaagatagtgtttttaagggaaattatgaattgcaaatgtaagatgatctatcagtctcaaaaatattatagaatgttgaccttatagaatcagttagaaccctggggccatcactactacaggacacccagagagtcataaaccttcattgtaaagcactaatgatttctttaaactatcacatatcattttgctatacattttttcatctttaaaaaaagtcaatagatacctcaagaaacatcttcatgaaggcagacacataaatttagtatttacacatatttctagaaaaattatcaatgcaggattgaggaatttgtttctctttgagttcctcagtttcctcatttagaaattaaattttgtttttcatgtaagaaggattccttcacagttgagtaatatagtggctctactccagaaacagaagcctaaaacttgagatttctaatgtttatacattccttcaataacaggttgacaattatttctttcaaaaactgaaatcttgttgaaagtgaacatctaagttttaatctatattttattaaactgcatctctccatcaaagaaaataggggccaaattaagggagagcacatatctctatgtcaataaattctgaaaatgttttaattctcatttgtaaatatatttattttaaaaatctaattatattaagatcttaagatgaaccaagacagtagtaggtgtaaagatttcagtgttgagctcaaaaaactcatggtttactttgagaaccaaggatcaagggactagcttaataaactgtagacactagagtacttcctggaaagctgttttcatgggtaaggtaagatgaattaattgtggaactgaaagagttgtttaaaggtatatttgttactattgcagcttcagagggaagacaaatgtgtatttaagttcatagtggctacattagtccattctcacactgctgtaaagaaatacctgagactgggtaatttataaagaaaagaagtttaatagactcagttctacatgactgggatgcctcaagaaacttagaatcatggtgaaaggctaaggggaagcaagcttggatcttctcacttagtggcaggagagagaagtgcaagcaggggaaatactagacacttataaaactatcagatctcatgagagctcactcaatatcatgagaacagcatggaggaatccacaccatgatccaatcacctgccactgggtccctccctggacacatggggattatggggattataattcaagatgagaggagatttgggtggggacagtcaaaccatattagtgacttattttaataattatttatgattgtgaatatactgatgttacattaaagatgtgatttcttcttacagatctctgaatacattgccttccttatatatacatatgagcaacatatgcaataaataaaatctaaattatgactatatataaatgtatttatatatattttatcaatgcacagacattttatatatgtttgggtatgttattccaagtcctttcaggaaaatacctgcatattcaaataacaattctcgtgttagctaccttttgttttgttttgtttttttccatcaggaagacccactacattatttgagacaatggggaaagctgaaatgtggctcattcgaacctattgggattttgaatttcctcgcccattcttaccaaatgttgattttgttggaggacttcactgtaaaccagccaaacccctgcctaaggtaaatgtattcttgtttcatttgtttgcttgacattttcagaaggaatggctggatatgtttctttcagagtgtttaactcagagtgaggggaatatgggaggtcaaaaacaaggacttgccattagaaaatcatatatttctgtagtatcacaagtatgtgaatgttattatcattaaagaccaaagaggtttactagggagattttgaaaacagggttggttaaagtaaggccttcattgtgccacccaaaagatagtatgattcatttcttcaaaaaatatttgtagagtgattaatacaaaccacaggtaagtgctggattttcagagaataaaggtagcacagtttctgctccctcatgccttacattgtactttgaaagatagaataaaaacaagtgaaaaagaaaagtctaaaaagtgttataaggaaagaccacaatgataaagaaatatgcagaagagatcccaaactcattgacaattaaagtgagtactcaataatgtgcagagataggtgaaacgatgaggggttgataaacacccaaaaagaaaaccagaggccaggcaaggtggctcacacctataatccctgcactttgggaggcagagaaggcatgattgcttgggctcaggagtttgagaccagcctgggaaacgtggtaaaacctcatctctaacaaaaataaaaaataaaataatagccaggcatgctggtgtgtgcctgtagtctcatagtcgtagctacttaagaggctgaggcaggaggcttgcttgagtctgggagcagaggctgcagtgagctgagaccacaccactgaactctagcctgtgcgacagagcgagactctgtctcaaaaacaaacaaataaacaaaaaaaaaaaaagtaaaggcttgcattaaggcagaaaagtagaaaagcaataagggcagttcccaggaactccaaatttaatttacaggaaaaggttgagtaaaagtcaatgatgggccgggcgtggtggcttacacctgtaatcccagcactttgggaggccaaggcaggtggatcacctgaggtcaggagttggagaccagagtggccagcatggtgaaaccccgtctctactaaaaatacaaaagttagccaggcatgttggcaggtgactgtaatagcagctacttgggaagctgaggcaggagaatcacttgaaccccggaggcagaggttgcagagagccgagatcacgctattgcactccagcctgggcaacagagtgagaatctgtctcaaaaaaaaaaaatatatatatatatatatatgtaatttgatatacccatagggacaatggagagctactgaaaagagtgaaaagagttaagaaatgaagagatatgatcagatttccttttaaaaaatcccaatattcccaatgtataatattgcaaaaaggcaagtttgtaaaatgtaaagatcatttaggaacttttacatgagtttaagcaatcatgactacttttataataataatcacaacttcatattgtgctgtgtggaaaaaaagtagttaccacagataaaacacttaagttgtctctgacacacagccagtgatccaaaaatattgttgatattatgattatttcagtcattatttttaatactttaaattagctaacatgtgccagccatttaagatatcagtcttcatttaatagtgattgattttccaacacatcaagattatattctctagcaaagtcctagagaacagatactctgtgtacttgtttaaatgtaaatgtttaagtttgggcagtcagttgaacaagctggaaagctaaagttgtattgtaaaggtggaggctcttcattaatattctagcttaaaaggtaattctgtgtactcttatcttattctcaaaaaaaaattcctcactcacattaaaagaaagtgatagtgccagtagcagggggaagagagtagcagaataaggacaagggataaatgactagtagtacaatagtgattattactgatactagcatgatctcggctcactgaaacctccaccccccaggttcaagcgatctgattctcctgcctcagcctcccgagtagctgggattacaggcacctgccaacacatctgactaatctttgtgtttttagtagagacagagtttcaccatgttggccaggctggtcttgaactcctgacctcaggtgatccacatgcctcagcctcccaaagtgctgggattacaagtgtgagcctccgttgttgttaacttgcagaaggtagacttgaatccaagtaaataattgtgaaactgattctctaattcttttgtacacaaaataattgttgcgacaaatttgcttgcttttccattatgtattagattctcagataatgtttgtatatttcaaaagaataagactcttgccaaaaagtatcaagtgtttgaaaaatgcatataggcattgcctttataatatactcacatgaaactgtacagagaataaatcatgatggtaagattcaatatcggtagcaaatactcattaaaaaaactctggaaataattcaaatatcttacattaagaaatggttaaaaacttacataatgtgcataccaagccattacaatccttttttcaaaacaatgtttaattacactgtcagccgtggtacaggtatagttggaaactaaggaacaaaatgatgagtagaacaagatcacagtttttttgtagaataaaaaggcatatacaatgagaataaaattttctaaataaacatcacatatgtacattgagttatataaatagaattaaacccataatgaaatggcacacattttaaattgagatagagatatgggtaaatgattttctttttctaaattttcatacttttataaaactacttacattgatcttctattaccattactttcataaagacatcacagaatgagatcagtgctgatctgtctataaatagatgttttattacttcaatactgggtgggtgaagcagacttttggcagtgaatgagacaaaacattgaactcaagttacattaaatgtggctacaggcaactgcaattacactgagttcctggatgcctcatgaattatctctaatagccatacactgaatctccaattaaaactgatgtcaggccaggcacagtggctcatgcctgtaatcccagcacatcgggaggctgaggcgggtggatcacaaggtcaggaggtcaagaccagtctggccaagatggtgaaacctgtctctactaaaaacagaaaaattagccaggcgtggtggcaggtgcctgtaatcccagctactcaggagactgaggcaggagaattgctttaacctgggaggcagaggttgcaatgagccaagattgcatcattgcactccagcctgggtgacagagaaagactccatctggaaaaaaaaaaaagatgtcataaagttaaattatattttttaaaaatacttaccaatatatggtctgaattgacatattttagaatttctttttttatttgtaaacagttttataaagaaatttcccccaatgattaggaccagaaagtatatttgttatgacagaaggggttggtcattattttactgagaaaaagagaattttgaacaaaagggacaacagcaacaaaaagatgagtatacaattttgatatgatatccaggaaacttatgggtctacatttcttttcctctttctctctctctttttttttttttggtgtgagaatacattgagcgatgtggcattagagaatggatttaagtttaaaaacagggacacatcaggaaacacaagtcagaataattctcattcatttcaaagcaaacacatattcaccaggagcttcatatagtgtgagggagctactctagggggtgagcagatctccactggagaaagtcctggtgacctctcccactgtggttcaagtgccccctgtgagacacagcaaagtgatgatgagggtcccccacattcagttatacatagcacatcaaattcacagtgtgatttcaggacaaaaggtgtcatagtcatacctaagcaatgacctgagaaataagatcacttaattatgtaactatatagtatataatactgtattataaatggaattctcagaactatttcccagaaattccaaaccacaataccagactgctgaatgtcagtgattcttatacttcagcttttaaggtgtttttggggggtgggggtgtcgggggcagtgaggggtagtggggtaagactaggaaaccctaactttaagtgaaatataaagggttagagagctagaagctaaataaatgtagatataatatcattccaattgtaactaacttttcctcaatgctcatagtcatgtaatggctccaatgactcctaactaaaagaactgaacagaaaaaaataaaataaaataaaactaccccaaataaacacaagagatttagtagaaccacaaaaaaaattagaattgaagccaagtaaagctaccttccaataacctatgttagtaattataatattataaataaagtgtctgggtgtaacattttctagcattatctcctcctactgcagtgtcatagctttgtttcatttcctccttacacacacatacatacatgcatatgcacacatatttacacaaatttgcatgaaagatcccacatatattatattacacatctcctttcaaagaaactgaatgattaggtcagtttaaaaaaattactccaatagcttctgactttctcatcttagatgtttgtaacaatcctgtcaatagtgttttctgtgctgttgctcttttctgatagaacaaattctttcttcacaggaaatggaagagtttgtgcagagctctggagaaaatggtattgtggtgttttctctggggtcgatgatcagtaacatgtcagaagaaagtgccaacatgattgcatcagcccttgcccagatcccacaaaaggttagataaagtgccttaactgtggatggctactaaatgaatctgttaaactcttcaagagtccattacagaaatgttctgcctgaaaatttaactgctatgatagttctaattatctcagacatctgttcaaaacaaaaacatatatggaagatcttaaaatcataaagagaggagttttggttgataataacgttggcattaatattgtgatcagaaggaaatatatttaagaggtgctagtgaagtttggtattatcatggtatcgtagcatgtacatagaaatcactaaattctgccctgtcatttgctccttttggtttacaggattttagaaggtactgtatacactgtagatattatcaaaaagcagttaaattttaataagttactgtactatcacaataacaataagcaggtatcgaaaaaactttgaaatgcatcatgcagcttcgtcttaccaagcaatctggctgtttttacttcccatgtattggaataggtctatttagtgttctgttcagggtgccattcagagaaagaatgtcctagtctgactagccactgctctggaggtacccacctagccaagtagatttagagaaaaaaaaaaaaaacttgtctgctctgctgacttgggtgccgctaatgtcttaagcagaaaaatgtaatggaaaggatggagatagaatcctgcttttagggtagactatgtgcattattaaatgtggcccaacaaagactatgctctaagaatcagattagtgccttctccagattgaggaaggagcagaaaatataaataaacatggtaggaacttattttctaatctatacaatctttgtgtattttcaatttacgttttagtttcttatctgacatagccctctctgaatgatctatacaagtttttgctgaaaacacagagttactttaacactcccatatcaaatacaaggtcaacacttgtaaattctactccagtttataaagattgcttgggaattctaaaatcagtaccttagtttggtactagacatggtaatgactggctatagctgaccatatatcaaggctgtcaatgctaggtagtgcatcatctaagtgtgaaagatcagttaagcaaaatgcagcaaaatacaattttctacattttcagcatctgtattgttaatcatgaattgtcaatgggctcctttttcctacattgttagcatttacaaaagtagcaatactgataatagtctgaatttgtgtcaaacactgccacttgaaatttttcctgaaagtagcacttgatagttagcaaatgaaaagaaattacacatactacatatgtagcattatttctcaccatatgtgcagtttaaatatttagtcttttgtaatcaatgatgtcaaattcataaaataacttatgactagtagacaagtggatataagtaaactcttctcatatcactcaaaaattaataaatttatattaaatttggaaggttacagctagtataaagtatataaaataaatatataggttattactaatttgctacttttttattactagaattaagactgcttaacaattcttaaatatttgaatatttcattgataatcttgtgaaccccaaatatctgatacaggtctcagtacatttagaaagtttatttttgccaacttgaagcagggaggaggcattcctttgactttctgattagcctctccaaggaggcaatcagatatgcatttatcccagtgagcagaggggtgactttgaatagaatgggaggcagtgatttgcttagtgactttggggcccccaggcttattttccttttacatttaaaaaaaatcttttggagaaagcattttagaagaaaatgagtctctggtctcaggttttcatctgatctctaatggcaaggaaggtttattcctaagcaggtcctgagttattaggaaagttcatttttagtaggttgtgaagtctcatgtcctatgaagacaaaataaagggagaaagggagaaaaacaaaaccaaacaaaagaaaaatccttgaaaattaatataggcccattactctgaagtccataaatcagtaggcaggtatgaaagtggattatgtatgtaaattggttgctgttattttcttctggagtttaagttgtctagcttaatttgtagggcttcatgaaagcatgacttagtttacagtgactccaaactaggaaaaatggtggaaagggaggaaaaaaaacctgaagacactattttgaagacgtgtcgccatgaaaaattagaattcagtccaaactgtagacagtaataaaagttgaaaaacattaggcaagactagaatctaacaacaggtatactgttatttttgaaacataatttttctgtcttcagtttcccaattttactaaagacaaaccatggtacaactgatttgctttattatacttggcctgattattgtatacagaggaggaagaataattttttatttacataggcttttaaagtggctttgatggaactttgtcttatagaaagaatctcagataggacttttttaaagctgaggaaagccatagatttctaccatcaaatacctacgagttgggtgaattcctctcctcttggggttccaaaataaacttggggctcctgggcctgtcagaaagttacattctttgcttaacacagttcaggaaccctgtacagggaccttatagatgaaggtatgaggccagttttcccaaggggttttattggctccataagttaagtttgattccctaaaggaaagcccaccataccagtggaagccttgataaaataaccagtttctccaattgtgttttgttaaaaatgaaaatagattcttattgcacttatgcaaataactgtattgacaaaagtaaaaaatactcacaaatagtttccaaattctgaaaaatcaggtagagggaaacaaatacgttctaaatttttttcataggagtatactaaattgttaaaagctgttaatagctcaaaaaaaaaaagattccttcactctgaaaaaaaaacaaaacaaaggatcagcaatgttttaagcaaagtctaaaagattactttagttttttattatttcagtccatgtagttaattcctgttctgcttgatactcatgaacattttagttctccatgagtcctgaaagtttttcttccattctaatgtcacaatctccaaaattatcaaaaactttttttcaagagcacctgttagaattttatggctgagtataaaatcgccttctaaagaggaccaaagtaagacaacaattgtctgtggaggacaaaaagttttagggcagactcagtcaaagacacaatggacaaggaaatttgttacctctgtggcacacaataacttaacacatataattgttactgataacgtacacactaagtcatatcagaattataggagtttcccataattttggaacacataacaataacatacttatataaatacagctcaaaaagaccaaacaccatttcatatttgacaatgtttcctgtataatttttatacaaaataaaccaaattatgtcatttttggatgttagggaaactaataaattaaaggattacttaggtcagaaaaaatcataatttataatttgtttggaaaatttctcaaatatcaaaggtttaaaacacttaatatcacaggtaagataaatcattcatttgactaatgtggtaactcaaggatttcaaaaaaaggcaaaaatcttcattctttgagagaggagactcaatttgccaaacaataagccctaataaaatagcatgaagccaaataactttgtttttcaaaattttatgaacaatctataaaattctaatcttgaccataagatataactttcctcagcctttcataacctttataatctttattaagaagtcagtttatgcttccagaaaaccttgttaatctgacacaggggcccatatgttggtcttgcattagtgtgtctttgacattaatgattaatttgtaaataaactaacttatctctcagtatcagttcttaaaatctcacacacccacctcttctgtgatagtccctggaccttgaggagctgaatagcttttagaaagcactgttagcattatgccacaacaaacagaacttgaggaaaaaaacttatatgagttgaaaatgagttgaaggatagtgttgccatttcacaccctttatggtttagctttgaaataaaaatgataacagttttttcccaaaacaaaccttactgcctgtggactagattgcttaaggccacagggttagaagttatgataatcttacttaattcaagatgtggctattttcattaaaccaatatcaatgtcttatttattaaaaaattacacaagcaaagatcattctgttttgggcttggtttacagttttgtaacccttatgtcaaattttgacaccttaaagtatttggcaacaataagtatgaaattgcttgattaataaatgcaaacaaaaatatatgctggaaattcttaagacatttctaatattatcatactttagcaataattgtaaagttatcttatttataaaagattttattgaagttacataaacttgaaaaagcatttgactagtcttttttttctggcaaagtatttaattcaagcacttttattttcttaagccaattaattagagctcttttatatattttcagtaataaaacactgtgtacaaaacacataaatacatacacacattaagcatgccaatagaagtacatcttatagatttatgaaaactacattttgccatattagacttccaaattcttgataacctgtttcaataggtaatctgtatgaatacttgatcaccataggcagttgtaagctaaatagtcttacatttgcatattaaaagaaaccaagtgaaaattaaatagcaaaatttacatcataaggtacagagacaaaaaatttggtgtgctggaaggaaaataaaatggattcaattgcctattaaacataaaattatagaaattataatggccttttaaatatatgcaaacacatgtacacacacacaaaagattctatggcttttacttcagaactttagccatgagataaaaaaaattgaccagcttgcagacaaaaacctgttgaatccatagtgtggtttttatcttaatagaaaaataaaagcaaatttaaagcaagaagaaaagaattttttttaaaaagagagaacttaggaactctatagcttgcaggacaacctagggttcttaatgtatatgtgcacaaagaccgtattaccttcattttacataaactctgccaagtagaggtgtcataaaacctaccaagtgatatcagggggtcattcttcttgttttctcatcattcttagattatttgtttcccactttttttcctaaaaggaggaactgagctgtggcctagggtttatgtgtggtgaatcaatgtgtgctgcttgtgggcagtactccacagtgtgtcaccactgagttgtttccaccctcttacatgtctcagtttctctctccagaggtgtatgacctctgagagggctcaaaatgctgggtgatctgccctcatatgtgtttcctggactagcctttttttaaaagttaatttttattggggatttccctgcagggccactccatgtcacagggggtcaaccccaagacactcccacaaggcccccagttgcttaggggtgccttttgcctgggaggagcagatgccctttcactttggagctgagaaaactcagtctctcattttcctatgtaaaccacagttcagtttctcacacaaatccacacagacaagccaaatgagattaatttggggaataaaaacaatagaggagaccctttacaacacatctccaaactagaattaggattcttaaacaacaacttcctaggaggaaaaaaatagcaacagtcaatactacttccagtaaactgtactcagccaccccctactttgtaactcgtctgccattacacatgccaaggtaaaatcctctcacagtacaaggtaatctgtggtaatctcaaagccaaagagatcaggtcattcaacataggaaaacagagctttggactgagaaaaaaatctgcccacaactcttggaactccacaaagaaaacagacacccctaaaggggtgagtggtgcctttgttctgaattctttaaaagagttcaagtcattagaagccttctctagatttttcatactgcaaatggcaaaaggcaaaaggaggtatagggtggaggaaaagtaaacaaaagaacatttgtttttttaaagacaggaagcaaacacagaaaccaagagcatggtttttaggttttgttttgttttgttttgttttctcttttgcgtctgcaaagaattttagccaaattagacaggctttgttacccacaatttggaattctcactcagatttgatcaagtcaggtaaagttcatcaaatctgatgggagaaatactggaatgtacaaaaaaaaaaaaaaatcccagaaatgtgatcactaagcactgtaatggtaaggagaaattaagtccagctagttgttaaacattaaccaagacaaaaccgcaattcagctgtttacctacggatgggtttcaggccaaaactgccctctgccatcctagaatcaggaaagaaacctcaaattcatcctccctcctgggagcgagctcaaactccatagagttacctgccttccattgtcatggaaacaggaaatcttgcctttcttgtaggaagcaagtaaaactccaaaaaaaacaaaaaggagttgtacagcaaaataaacttcagatcttgtctgaattttggggtatcagagattctctggaggggttgctcccagacctcagccaattgtcttctttgtttgagccataaatttagctcatgctggtaccaagcactgataggacatttatcaaaggtcagggaacctccactcagaatctcttcatggttaccaaaatatgaaccctgaatatatgagacagttctcagataatttagaaagtttattttgccaaggttgaaaatgtgcacccatgacacagcctcaggaggtcctgatgacatgtgtccaaggtggtggggggacagtttggttttatacattttagggatacatgagacatcaatcaacatatataagatgaacatttgttcggtccagaaatgggagacagctagaaacaaaggcagagcaacttgaagcatggaaggggcttccaggtcataggtagatgagagacaaatagctgaattcctttgagtttctgattagcctctcgaaatgaggcaatttgatattcatttatctcagtgagtcaagggctgactttgaatagaatgggaggtaggtttgccctaagcagcttaacttttccctttagcatagagtttgggttgccaagatttattttcctttcacaatctcatgtgtctagctattatgttagaaatgtcattatttctttatatacaaaattgattataaaagtaacgacattaaacgtgggtattcaacttacctcaaacttttagtagttctcattacttgacatcacttcttcttatttcttcatcttttatatggattaactaactgattattaatctcttcagaattctaacatgctatgtttttagagttctattcattgaacaagatattttccttgccctaacaggttctatggagatttgatggcaagaagccaaatactttaggttccaatactcgactgtacaagtggttaccccagaatgaccttcttggtaagattctggagaacaaacagtgaatatattagtaacagcaaattggagtgataatagttcaacataaaacaaacatatttagcatttattattggaaaactaaaaaacaaatcaaatttaactactttatatttattttccagtcttagtataaaaagaatgcactatagtagttggcattttattacatacagtcacattctttatggtcagaataaaaatctctttgttcaggtgtaatttcctctcacaggttttaaataacatcctggattttctgtctgtctcctatttatgcagctttacctctgttctttcccctactgcagggttatttcaacaggcactgaaaaatagcggacacttttctattaccagtgactctactttttatgggaataaataaccaatctttatcatgataaaatgataacacatttcatgatgatgcataaccggtccttcctcagccccacctccaccctactccctgctgccttttaaaaaaaattaaatattttaaatattttaagtatttaaatattttttaaatatgtaaatgtgacctcattatttataatacttaaaagaccacgttcttgtatacccaatcttattcttttttttgcacattttaattttttaattaagaatatgctttttcattttgttcacctggcaattcttctgaaatttgaaaacaatttcaatgcagttttgtgggtataatgttacctagggaacagttttgctttaagttccttatattgtgcatttcttattcaattctcataccttgtaattaataattttgttaaaatgcatccacttttaggtcatcccaaaaccaaagcttttataactcatggtggaaccaatggcatctatgaggcgatctaccatgggatccctatggtgggcattcccttgtttgcggatcaacatgataacattgctcacatgaaagccaagggagcagccctcagtgtggacatcaggaccatgtcaagtagagatttgctcaatgcattgaagtcagtcattaatgaccctgtgtgagtattacagttttgtgaccaggtggtatttataaattattttgtcaacagtgaatatgaattttaacccgtttttaagagactaattttgaagggattgaagtgatttaaccaatgtaaaatctgtccttactttccaccagacagtttatttcaaagttacatttcaaccccacagatttaatgggtcaccaatgactgcaatgaattataaaatcaaaaaaattaaagatatgtagataattattttaaatatttttaatgatagaatgcacaatgaaaagaaagaacataactagagaaatatgatatttcaattcaatacctaaaatttctgaaagtatgaatctattctttctcaaaaatttatttttattatcattattttaagaaatgtgataatgaattataatttgcatagcataacattcactaaaatttaaaatctaaatatatttagtatgtttacatagttacaaagccacagccctaaagaacattttaatgaattcaaattaaactcataatgtatgaagtcactcccaataaacctctagtcctagaaaaataccatcttactttgtttctcaatagattattctcttcacatattttatataaatgaaatcatacaatttatggtgtttcataaatgacttctttcacttagcataattagttttagttttatttatgttgtaggatgtatcagaactcattcatttttatttctatataatattctttgatatgtttataccaaaattacccatttatcaggtcatggacattttaggtctttccaattttggcatttatgaacattgttatacatattttccgtgtaaaaatatgtttttacttcttttgaggagatgctaggagtggacttgctgagacatatgggaaattgttgtttatgaagaactgctaaactgtttttcaaagtatttgcatcatttttcattaccaccagctggataggagggctctaatttcttcacactcttcccaacacttgttatcacctgtctttctattacagccattctagtgtgtgtaaagtggtctctcattatggttttcatttgcatttccttatggctgaagatgttaaccctcttttcatgtgcttactggtcattcacacatcttccttagataaatttctattttaatcttgtgaatattttgtctttttctatttatcttatggattcataagaattatttatatattatagatacaatcccttatcaaatatgtgattttcaaatattttcttccactatggacagatagatttttttttttactttttggaagatgccttttgaaatacaaaggtttcaatgttgataaaataaatatgtaatacttaacttttccataatccaaaggaaatactatgaaaaatgctgtgcctagaccagctaccatcaattcagagtctattactcctaccaatattattatgaggttaggtggtaccagctaagggaatacattaaaaacactttaccaaaaaattagtaagacaagaaatgatttaagatacttcaaaaaaagtaagaaagtaaagaaacataaaacaggttagaaaattaaaatatatatatatatagaataagatgctggatttaaatgtgaactagagaaagaaataaagggtattcaaataggaagggaagaagttaaattgtctctgtttgcagatgacataattctatagttagaaaacccctttgtcgcagctccaaaattccttaagctgataagcaacttcagcaaagcctctggatacaaaaatcaatatgcaaaaatcacaagcattactatacactgacagtacatgatttgacagagagccaaatcatgaataaattcccattcacaattgcaacaaagagaataaaatacctaggcatatgcctaacaagggatgtgaaggacctcttcagggaggactagaaaccactgctgaaggaattaagacaggacacaaacaaatggaaaaacattccatcctcatggataaaaagaatcaatattgtaaaaatggccatgctgcccaaagtattttatatattcaaagctattcccatcaaactaccattgacattcctcacagaattagaaaaaaactactttaaatttcatatggaaacaaaaaagagcccatataaccaaggcaatcctaagcaaaaagaacaaagctggaggcatcatgctacctgacttcaaactgtactacaaggctacataaccaaaacagaatggtactggtaccaaacagatatatagaccaatggaacagaacataggcctcagaaataacactacacatctacaaccctctgattgttaacaaacctgacaaaaacaagcaactggggaaaggattccttatttaagaaatgttttggaaaaactggctagccatatggagaaaactgccactggatcccttccttacaccttacagtaaccaaaccagcatagtactggaacaaagacagacatatagaccagtggaacagaacagaggcctcagaaaaacaccacacatctacaaccatctgatctttgacaaaccatacaaaaacaagcaatggggaaaggattccctattaaataaatggtgctggagaaaccggctagccatacgcagaaaacggaaactagtcccctgccttacaccttatacaaaaattaactcaagatggattaaagacttaaatgtaaaacccaaaaccataaaaactctaggagaaaacctaggcaatatcattcaggacataggcatgggcaaaaatttcatgacacaaacaccaaaagcaattgcaacaaaagccaaaattgacaaatggggtcaaatcaaactaaagagcttctgcacagcaaaataaactatcgtcagagggaacaggcaacctacagaatgagggaagatttttgcaatctatccctctgacaaaggtctaatatccggaatctacaagaaagttaaacaaatttacaaaaaaaaaaaaaaaaacaacaccatcaaaaagtgggcaaaagatataaacagacacttcttaaaaaaagacatttatgcagccaacacacttatgaaaaaagctcaatatcactgatcattagagaaatgcaaatcaaaaccacaatgagatacaatctcatgccagtcagaatggcgatgattaaaaagtcaaaaaacaacagatcctggtgaagctggggagaaataggaaagctttttacatttttgacgggaatgtaagttagttcaaccatcatggaaaacagtgtggtgattcctcaaagacctagaaccagaaacaccatttgacctagcaatctcattacttcgtatatacccaaaggcatataaatcattctactataaagacacatgcacatgtatgtctattgcagcgctatctacaatatcaaagatatggaaccaacccaaatgctcatcagtgatagactggataaagaaaatatgatacatgtacactatggaatactatgcaccataaaaaggaatgagatcatgtctgttgcagggacacggatgaaatgcaaagccattatccgcagcaactaacacaggaacagaaaaccaaacaccacatgttctcacttataagagggagttgaacaatgagaatacatggactcagggaggggaacaacacacaccgggggatggaaggggagtgagagtatcaggacaaatagctaatacatgaggggcttaaaatctagatgacaggttgatcggtgctgcaaaccaccatggcacgtatatacgtatgtaacaaacctgcacattctgcacatgtatactggaacttaaagtaaaaataaaactttttaaaaaaatttgaactgaccaggtgcagtgactcacgcccgtaatcccagcactttgggaggctgaggagggcagatcacgaggtcaagatatcgagaccatactcctggccaacatagtgaaaccctgtctctactaaaaatacaaaaattatctgggcatggtggtgtgcacctatagtcccagctactcaggaggttgaggcaggagaatcacttgaacccgggagacggaggttgcagtgagccgagatagtgccactgaactcctggtgacagagcgagactccatctcaaaaaaaaacaaaaaagcaaaaaaacaaaaaagtgaacctaccagtactcacattaaatttaagcagaccaaaaagaaaagacaaaatagtgatctttgaaatattttatttaaggagataaaacatttgaagtacacaattaaatgtaatctatgtgttatatatgtgtgtgtgtatatatattgcacatttatctgtatatatgtatccatacatatatctctggttgtgtgtgtgtagacagaaaataaacatttttaaaagagtttatggagaccgggtgtggtggctcacacctgtaatcccgacactttgggaagccaaagtgggaggatcacatgaggtcaggagttaagagaccagcctggccaacatggtgaaatcctgtgtccactaataatacaaaacttagccagatgtaggggatgagcacctgtagtcccagatacttgggagattgaggcatgagaatcacttgaacccaggagatgcaaattgcagtcagccaagatcactccattgcactcaagcctgggtgacagagagactctgtctcaaaaaaaaaaaaaaaaaaaaaaaaagattatatgaaatagttacctgaatttaccatatgctgggccataaataaacactaagtaaattgtatcagattcaaattcataaaaattatatgttctagtcatactagaaataaattataaatcatccaaaaacgataactgaaaacaatctgattctttaaaataaaaaatattttttaaaaaattcagtcaacaaaaaattctaattataaatgtgcctttctctcatcaactattcttccaagtatacatccaacaaaaatgaataaatatttaaacctaataaaatatacaaatatcttaataccataattattagtaaggtcaaaaaatgttaacaacacaaatatccattaatcacaaaatgaagagatcatctgtggtctttgtcaatcaactgaatactctctacaccaatgctattaaacaactgctaaccaaaaacagaaatgaatatgtattatttaattcaattatataaacaatactaatctatgatatcagaaatcaggttaatacttactttgaggataaaaatagtgactaaaatggcccaggaggagagagttcttctatgcagtttgtgataaattggtgtcttcactttgggataatgtttaagataatcttaaaattttgaggtagtcacatagtatatatacatttatcctatgtatttcatacttgaagttttactgtagaagatatacaacatattttaaagttccagaaatcaaatagcaaagtaagcatgaagcactagagaaatcctatgggtgcctatagtgtggccaggaaaagactctccaagaggtatcatacaaggggaagcctcaaaaagaaatagaagcaaacctcaagtagttgcaagaaagaatgctcaatgagagagacacggggaacaaaaggtgtaaaggggctaaggtgagaacaccttcaggagtttagagaaaaaccgaaggccattgtctctagaagaaagtgtacagggggaaagggctaggacaagtaggtgcctgtgtagagttctctagaccaaagacagatttggaatttattcttaatgtaacaagaaaccagatggaaatcttaacaggtgagtgtcataatttgatattaatttggaaaatattctggctactagaaggaaaatatggtagaagacaaaagattagagtagaagctgagaaactagttaggaggcatttcaccagttgtgtcacaattcttctttaaatacgtcaaaatgggctgggcacagtggttcatgtctgtagggccaacactttgggaggcagaggcaggagaatgacttgactacaggagttccagaccagtatgggcactacagcaacacctcatatctaaaagtgtaaaaaataaaaaaatatagccaggcatggtggtgtgcagttgtagtcctagcttctcatgagactgagatgtaggattacttgagaccgaaagagaaaggctgaactgagccatgatcatgtgactgcactcagcctgtgtaatggagcaaaagcctgtctcaaaaaataaaaaaaaattaaaaagatcaaaaagatcattctcaaattccatttccactatcttacttatagcacttagaatggctcataatattttctgctccagaaaacattaactttcccaccgaaaattccatttttcatttttaaaggtatttgtcagtgataaaactccaatttaaaaaccaaactttctgtaatgacatgaattaaaacattgaaatttcatgccaattcagtgacacttactttcaatcatttgtgtgacacttttcaaagaccatccatagacttgatatgcttaagcaataaatttacttttaatgttgatatctttatatttatccttcagctataaagagaatgtcatgaaattatcaagaattcatcatgaccaaccaatgaagcccctggatcgagcagtcttctggattgagtttgtcatgcgccacaaaggagccaagcaccttcgagtcgcagctcacaacctcacctggatccagtaccactctttggatgtgatagcattcctgctggcctgcgtggcaactgtgatatttatcatcacaaaattttgcctgttttgtttccgaaagcttgccaaaaaaggaaagaagaagaaaagagattagttatatcaaaagcctgaagtggaatgactgaaagatgggactcctcctttatttcagcatggagggttttaaatggaggatttcctttttcctgtgacaaaacatcttttcacaacttaccttgttaagacaaaatttattttccagggatttaatacgtactttagctgaattattctatgtcaatgatttttaagctatgaaaaatacaatggggggaaggatagcatttggagatatacctaatgttaaatgacgagttactggatgcagcacgccaacatggcacatgtatacatatgtagctaacctgcacgttgtgcacatgtaccctaaaacttaaagtataatttaaaaaaagcaaaaaaaaaaaatacaactcttttttttaaaccaggaaggaaaatgtgaacatggaaacaacttctagtattggatctgaaaataaagtgtcatccaagccataaaaaaaaa

SEQ ID NO: 642 - DNA, 83026 bp, Homo sapiens
gcttggaagccagcgctgcgctccccgtgggaagcgatcgtctcctctgtcaactcgcgcctgggcacttagcccctcccgtttcagggcgccgcctccccggatggcaaacactataaagtggcggcgaataaggttcctcctgctgctctcggtttagtccaagatcagcgatatcacgcgtcccccggagcatcgcgtgcaggagccatggcgcgggagctataccacgaagagttcgcccgggcgggcaagcaggcggggctgcaggtctggaggattgagaagctggagctggtgcccgtgccccagagcgctcacggcgacttctacgtcggggatgcctacctggtgctgcacacggccaagacgagccgaggcttcacctaccacctgcacttctggctcggtaagggacggcgggcggcgggaccccgacgcaccaaggccggcgaggggagggcgtaggggtctgagatttgcaggcgtgggagtaaaggggaccgcaaactgagctagccactcgcgcccccacggggctgcctttggggccggccactttctccctaccgaagtcaactcgccggctgcaaacgcggggctcaggcgttgtccgcaattgacttacctcgcaggctttgacctttgccaggtgtagttcctggactttggagctggtgactggcttcttcccctttcaccgtcaagtatccaaacgccactcttgtccagggccgctgcctcagcgcacaccgtctctggccaagccccgctcaccttccgacaaactcagtcctgctttccctgtcgggatggagaggaagtcataaagtctgggggcatctgccgccgctaggaagaagtccttttctttttcttcacacattatttttatttgttgctttcgggcactggcttattttctctatgattgcgggaattattgttctgggcttctttaaaacaggattctacccgcaccatgctgcttgtgggtctggtagacaaaaactccgcttcattcggaagctggcgtcctcagatagaagtaagaaaaaaatacagatattttatatacaaataaatagctctatatgggtatttcatatatttatgtagactgctttattgttattatttattatttattttagcaaggacacaagatggaacagaaacggctccttcagcagtagtaattattttgagctgcgttcgtgccaggctgtcaggacactgggccttgtgtgttctttttccaccttctacttttactcataaacatcctgaatgtccagcctctccccaggaggtcttgtgccagtgggcacaccctgtctaacaacatgccgattctctgagcctttttgccttcttttaaaactagctagcctgcccagtactcgtgtttgtttagttttatccctgagcttaggaggaaaacacacaaaaccacacacacttacacatttttgagtccctgaaagccaacactgtaatttccaacatttgaagattttaagaaacaaaataatagaaaacattgagtagtgactgtctaaacattggcaaacacctggaacaggcatttgagaaatgagaaatgaaaaatacgtagatgaagataagacttttaattataacatttggagtcaaaaatttgtgttagcttgaggaggcagagaaggctcagcctgagttctgaacacattttggcttcttgatgcattgctgttattcctattataatgttgtaatacacagtcatctatttgtattttctgccagaaaagactgaaacttttataacccatgttcaagaatgaatgatgccagatagaataatgatgtccttacagaggactttccatgcagaacttaaatctagcatgaatgaaagtgtttgaaatgccacatttgccatttgagtaaattaaaatgtgaaataatgccatatcttactgtagacagcagttaagtttgactttgtcagatgaccgcaagggagatttgaacacaattctttaattctatacatttttatccaagttgtcctcttaactactatattttgtagggtttacagattcaccttattcacttaattatctacttaattatccacttgatgcccataaatttcaaaaatataatagaaaatggtttgggcagaaacatttataatcttaaagacatgctaaaactgaagtcaataacatgttaataacaagcaaattcattcagtaattattcaatatggccagtactgtacaaggcacttgtggatatgaataattaatgaaacttctctaaaagttcatcacctcaaaggtgcaaaaagacaaaaagtgatataacacaggtagaatgtgataattactgtgaaagcacaaagtttctgtggttattgggaaacagaagcctttagagaaaaaaaaaatgagagtacttggaagtgttcttgtgtcaagagagaattatggagagaaaaaaagcttcaagtaaaatagtcaacaggactttcagatgggattgcccaacagctcttcctacttcagttccctaagaaaacagaatttcatccaaaatagtgtagtctaagacctaaattaggatgaatccatgaggattcatcagagagacagattgagagaaagtcacaggagagagagctgaacttccaggggaaaagaacatttggttaaaggaaatcagccggaagaaagagaaactaaagttaaactgagatgaaaaaaggtgcatagcatagaaatgaagaaacaggccaaatgggaggcaaaaaggggaaacaggaagaagttggacctagaacaagagagaacagagcaggagagtcgtctttcttggtctctccctcagtgtttccataacacttggcatatctcagattattttattgtattaacattacatgcttgaatgtattaacatcatatgcttaaatgtaatgaaagtaaaaatttattgcaaagaacttaaatgttattgcattagcccttctttaaaaacatttcagctttgcacctagcagtttaaatgcatccattcacctctgtttgtagttccttatagcaccaaatcaatgggtaggtctagatagtaaaactgctccctgtcacatccctaacctaaggtacaaacacttatcctcactctttctctttgccagttttaaacttcacacaaatatattttaaagcagtatacatttatgttataagtgggctataccaggccttgtgcaatgccctgggaatccaaaggattggattacaatatacgatacaaagaacttatacgaaggactggctagaaactggatcatttacattgctggagcatgggggtgggtacatgcaatggtacagcactctggaaaagagtttagtagtttcttacaaaaccaaatatactactaccatatgagtcagcaattgcattcataggtatttattccagaaaaatgaagttttgtattcacatgaaaacctgtacctgaatgtccacagcagttttatttgaataaacaaacactagaatcagcccagatgcttttcaacaggtgactggttaaacaagttgtacatctgtaccaactaatactactcagcaataaaaaggaacaaactattgatacatacaacaacttggatgaagctccagggaatcatgctgagtgaaaaaccctaagaggctttatactgtatgatcccatttatataaaatttttgaaatgacaaaattttagatttggcattgccgttggttacagatagggtgaagaggggatgatgtgggcaggagaagagtgtattataaaagggcaacttgaaggatgtttttggtggaactatacagcatcttgattgtgatagcagatgtatgaatttacacatgtgataaaattttatagaactaaatgcacacacacacgagtacaagtaaaactgagaaaatacgaataaaataggtggattatatcaatgccaatatcctggttgtggtgttcagtgctatactgtactatacattaatatgttaagctatactgtaattttacaaagttgccactactgggggaaattgggtctattgatctgtgtctatccttcaatagtaccaatctgttttaatcacgttagctatgtagtaaaccttagtatcaggtagagtgattccccccactttatgcttgtttgtcaagattattttagctattccagggcctgcgcctcactatataaattttgcaataagcctgtatatgtctataataaaccttactgtgattttggtaagaataacattaggcctatagatcaatttgtgaaggattgacatcattattatgtggagtcttaaaatccatgaacactaagcgtttacatttacttaggtcttccttgatattttgaatgccattttgtaattttcagcatacagatcctgtacatgtttttaaactatatgcctgagtatttcagtttctttggagtgattgtcaatagcattgcgcctttaatttcagtttcagcatgttcattgtttctatatagaaatgtgactgattttttgtattactgatgaatcttgtatcctgctaatttgctcaatgtactttttatttctaggagagttttcttttttttttttggataggtctcttagagttcactatgtaaacaatattgttgtctctaaatagagacctttttatttcttcatattcaatttgtatgccttttttttctttttcttactttattgcagtggttagaacttgctgtactatgttgaataagagtggtgtgagtgcacacccattttctggattttatgggaaaaacatttagtcttttactgttcagcattgctagctctgtgttttttgttgactctaattatcgttggaaggtgttcctctctattcctaatttgacttattttattttatcatgaatggctgttggattaacctagttttaaatctctctttttatctataaaatcattacatccacaaaatacttatagaaattcataggatgtacacaagtctaacataatataaaataacacggcacagcatagtataacagaacataaaagacaccggtaaaatcagtgtagggaaacaacaaatggaaatcataagcagattcgtaggggaaaactaaactgattcttaagcagactttatacacaaagttcataagtttctaaatactttctggaattccatcatgctacaactggatttgattctaattttcgcatccaaaggctgacattggcttcatcaagaccgtcaacctcattcaggcatcctgttttattcatacagatattccctggccaaccacattacataagcatcagcaaatgataggataatttaattaacttactttcagttcattcattaacttcatgcctgtccatttacatctacctaaagagattcaggtttcaacctgtagtcaggtaaggacgtttatgtcaaatacatcatctttaacacctttgatgttaaccttgattccaagttatctcttaaagcatctctcttaaggcatcataaaaatctacatctacatctttatggtattctcagttagggttcggatcccaaatcggcagaagaatgacaccagagtcctttcagattgcaaaattgccggtgtgtcaaatacttaactttgaccacagcgagttcacaaaattgttatcacgtcaagtaatcttctagctactgagttgtttttttttgttgttgttgttgtttcccctcagaagatacttggtatatgagtctcatttgagagtaagagggaaattgtaaggaaatctgattctttctttaatacaactgactgatttgccttcttcaactttggtgaatactgtcagttagggttgttcatgtgaactattaaattattacagcttctaagcttttatgcatcagttatctatggaagaaattaacataccttgtcactataaaattgtaccgctaatgagagcctgagtacaaaaaaatacccacaagtgtactggagtttttaagaacctgtgcttcagagtcacacaaacctacatctggtctttttctcccaaaagttgctttatgacctcagaaaagttacccagcctctctaagcctccattttctctgttccaatctagtagaaaataggttctgctttatgaggttgcttgaagattaaatgagatcatccatgtaaaacattggcatagtgtctggcccataggggtagtataaatgtataatgttggctattattatttctagagtcatttaagatttttattacagcttggatgtagtaaagagtttgaagtgttttccataaaatgtgagtgcccctcctgactgtccgtactgtatcctttatgtacactacagacactggttcttaggaattgttttgaccttagtgaagttacctggatgtgatgtgtattacaattgtgaaaattaaatgtatgttgtatgtaaaatacctggaacaataccaagtacattaacacttaataaatgttagcgtgctgcttcctttgctcttcctttcctccagagatcattatttcattcaaacagaaccagtcagatagtgaagtagggaaaaagaccaaaaaataggggtaaaattaaattatattcattttcccattgtaaaaaccacttatttaattatggctctgatgctcatatttctcacaaacatcagttaacatattgacatatcataaaatcaaagatttatcctaataaaggctaaaccacttgtcaaatgttttcatagtctgatcttattgaccttaccaaattaatgcttacttaaatctcattggaatagattgttttatcttcttgagcaacttcacacaacagtgtttctttttaaaatttttaaaggaattggaaaaagcagaaacaaaaacaggccgggcatggtggctcatacctgtaatccccaacaatttaggaggccaaagccagaggactgcttgaggccaggagtttgagaccagcctgggcaacatatggagaccttttccctacaaaacacttttttgagaattagcaaagcatggtggcacgcacctgtagtccaagctgcttgtgagactgaggtaggaggatcgcttaagccccagagtttggggttacagtgagctatgattatgccattgcattccaggcttagcaacagagcaacaccctctctcaaaaaaaaaaaaaatagactaaaaaaattgttaattattagcaaaataatgtattacatacagtattttagctaaaagatctttgtgtagaagactgttggattgatacataattgaaatgaaaatttctgacttctttcatatcagaaattctgccttaatcctttctcttgcttgataattgaggtgctgttgttcactgttttaggaaaggagtgttcccaggatgaaagcacagctgctgccatcttcactgttcagatggatgactatttgggtggcaagccagtgcagaatagagaacttcaaggatatgagtctaatgactttgttagctatttcaaaggcggtctgaaatacaaggtaagcagctccctcagtttccattatgaatccctttctcctcttgtccatccatacctcctgtcttcatagaatgacagttcgttgagggcaggggtttttgttttatttgcttttgttttaatctgttttgttcatggatatatccccagtacctgctggatacaaagtaggtgttcaataaatgtttgtgaaatgtgtggtacaatatgtgaaatattgtgaaaatttaatttgataggttaattttttaaaagagctttcagttgtgtcttcacaagatacctttgtaatattttgtagctatttcaacatttaaattttggtaatttgggtcttaaaagttttcatttttgctattctagaaaatctctgaagtttctgcaagtaacctaagccttcaaaatctcagttgttctggaatatattaatacagtatttataataattataattttagtaactgtaaagaactatacatgtatttccaaaatagtgtggtttgatcttagaagggatgcagatgaaaattttgagcttaaaattctgcaggtaaactacacacacgcacatacacaatttatgcacactggtctgaaacactgatcaattggctttacttctgaaaataaacaagaacaaatagttaaatggttctatccctttaaggcagccttcagtataggacaggtttttttttttttttggcatcctcctagttagctttccagactggccctcccttcaccattcctgccactcacccctccacacgtgttcagttaaagtgtgaggaataccctccccagacaaacatcacagatttccgaaatcaaacacgctccagcaagtgttctgcacaccccactgccctgccctgtgagcatgctaccctagtgaagacctgaaaccttagagcttcactacaattctgactgtaatactaagtccgcctactaagatggcgaggtttatttatacctttacctgttcagagtcttcgttgaatattttgtgatattattgagatcagaacaaaacacttatacattataggttctcttatgtctcttgaaatgattattttattctaggctatgaactaccctaaatacaaaactattacctctcattttatttgattcacaggagctcctacagtttatgacaaacgatactgaaacttcctttatgtcagtgaactcaacattttaaataaattgagtcttgtagttactaaaagcaggtgctgtgacaccatcatagttatgaacccatttctgccacatatgacttgtttgctttagggaaaatactgagctttctgtgctcagtttccccaaacaatgaatattataacagtttcctcatacaggtgttgtattaaggaataaattaaataataaagtaactgtagtcgagcatggtggctcatgcctgtaatcccaacactttgagaggccaaagcagacggatcacctgaggtcagaagtttgagaccagcctgaccaatatggtgaaactccctctactaaaaatacaaaatttaactgggcgtggtgacatgcgcctgtaaccctagctactagggaagctgaggcaggagaattgcttgaacccaggaggcagaggttgcagtgaggcgaggtcatgccattgctctccagcctgggagacatgagtgaaactctgtctcaaaacaggagtacatagatgaaaacttgtatttatttaattatataatacttagtttattcaaccaagaaatgtagcagtcgttgtaaaattatggactgggaaatcattttatatttttttttaatttgaagttttaattgtcctgaaattaacatttaatctataccaacttttattggagaacggtggaaatttaaaatcaatggaaaagaatgtgctaatgacaaattagctctaattttccgtaccattattattatagaggtctttgatctatcagtgacagttttgtttatactgtagctcagttattcacatataattaattataattaatagtagaaataaagatatggttcatatcatttaattagaaaaaatgaaaaggtaaaagatcattgcaaataatataagaagatgtagttgatacagttaatatctttctttaattcgggtgattgtatttcattttattttattttttttgtttggggatgtacagccaagatattgcatctctcctagcttacagtaaaaacactcaggcctagcatatttattaatagtaagacctgtttaccagaaaataaagaagacatttgattactttaaatgtaaaaacaaggaccatacataagatcaacccattcctggccagcactcaacaaccatctctgtcccaaccctgtaccagtgtgaacttttgggtgccttcttctctggctgctgtcatctgtatgtgttacttctgaccctcctctagccacctgtcaccttcttccctgaaatctttgccttgctcattattgatttggggatcattagtgtccaaagggcaagagctatggcatcttctttttgtttttgcagcagcgttttatacactgaaggttctcagtaaatacttgcagttgtcaattgaatggttaaaacagaaagaataaagagaccaaacaaacacaatctgttgattaccaaggggttctctcttgttttatggaataggtggctattttaacttggcctgacaggtacagttttggcacaaacaccagcagtattattgtgctttgctttgtctaggcagacacctcatcagttttctctttgttttttgtgtgtctgtcttccctcattcatcaggctggaggcgtggcatctggattaaatcatgttcttacgaacgacctgacagccaagaggctcctacatgtgaagggtcgtagagtggtgagagccacagaagttccccttagctgggacagtttcaacaagggtgactgcttcatcattgaccttggcaccgtaagtttcatatatacacatcgatgtctaaagaaaagtgaattgctttcggatcaaatcatatgtacatgtcattgaaaagaatcactttttctacacaccagaaaggggccacgtttatgtgagctgagtaattgccaagtatttaaatgacgcatgaagtgagacttcaaagtttttattttctttgataggtttagaatagtgatttagttcttcctaccatagaacagaaattgactaatttttaatacatttccccttctctctgaacagagcttcctctaattatttttgtctctaattgtgcatgggaaaacatagcttgagggggaaactggttcccccagcaacaaaaggttctagaatataatatggacataagatgaatctaaacagccacctaaagaattttaaagacatattttgatgtacgtatatacacacaccataccatttcacacttttcaattagcacaagtacaaatatcaagtattatcttaatggcatgggcaatggtatattatatctgacttatgttttcttcctggaaaagacgctcctctaatatcaggtatacttattaatcattactgtcatgacaaagaagcattatttcaagaccctttgctagaccctagaaggtagaatataagttgtgtctttaaaactttgtgaagtttttataatagaaataaagagcatttccctccactgaaaagccatgtgcaaaagcaatgaaagcaagaaagcacagaacttataaggctctcctcttcctgcttttcattatcatcattttcatcacaccatacatctcaacattctaattatcattcctaacatttctgggccaaacgttgtaacggagtcatgagctgacctgcattgcttcagttagcatgaggcttgtctatggaatttgctcaaggttgcaaagttagtaaatggtgaaggcaggattagactctcagcatatctgattccccacgaagcattttgttttattgcatctacttgggcagtattttgggataaagcagtagacagaagccaaaagagcttattccatctgcatagaggagggcacaaaagattctgaaaatagagttacaaagttctgtttaagcaatattaatctaacaacagtacagagattaaatgtactaaggttatacattgtttagaaaatgaccccaaagtataaactgcatcagtttctttaagtgagcgtgcatctatagttttattactacttatacataatccaactgtcttggatcataccagcttgtgtgcaaagttgagatcacaataatataaatgcccaaagtacaattcttaatattacacgtagacatctacaccctaaatggcagtacctttgccctgaatctcacaataaatttcatgggaaagtccttttcaacttcaatagctaattcattctcctaacagatttaagtcctgactctcatatctaggcagaatacacatactgttccacccttccattctcccctaccgccaccaccccctacactataaataaagaaataaataactcgtgcacataaatgtctacagccacacagttccgaaagcaattgcagcattcagtctctcaaaccttatgcacaataattttctatctcaactttcatctccaccacttgtactctaaagccctttataagtgcttttgaaaataaaatggcatttttattagaaaaaggagacctcagttctcattccagttgctgtactctgaggttctcatctgtaaaagcaaatatttgagtaggtgatcgcgagggtcccttaaccagaaaggcacttcccagtgataatgtaattaattgctgccattacttgaaagtatttcttttcttaaaaaaaaaaacttgttatatataatgtaattgctatgtaaatataataatctattcaattatcatgaatagcttccaattcagctttctaactatctgctatgatattgggcaactcattaatgtctctgagccttaacttcctcatttgtttttacatcttgactctgatttctgataccacttttatccttagctgactatgattcagtctcatctgacacacagtcacatctgggaaatggcagttatcatcccagtttcaaaaggggaaacaaaagccttaggctttagaaggtatgtgcaagtcactccacattcatgccagttgcgtgatgacccaggatgggtcctgggtttttctattcctactttacatttttttcaccacactaagctaacttggtagtatattagatagtatggcctggtaatagaatgccttgtgacagtttcagaatctgctgaattcagaactgatgatgcttaatctgctgagattccactgaaagcagtagtattcactaaatcatttattattttgcagaacaaatacagagtttccactatgggccaggtagttgggtgtggtggtagacaggttgtagttcttgtgccgtatactctcttcccatagtcaacctgtgggagtatgggccacaaatccaggttcacgtaatagggacagagtctctattataaggttccagggcattcatctatttaatagtaaattatttttattttatatagttaattatctttaataactttcaagttctcttttcccatgccttgtaaaagagatatttggaatgagagatatttgttgcagaggtactggtgcttggttatcaattatattctggaattttcctatactcaaaagggataccctggtgagaatcaagcaccagattcctacataatctatggcaaatacctccaggatctgtgtttgtgttattaacctttaaccagttggtatgttgccaaaagtttctgaatggtgataagatcttgaactaccttggcaactttattttggggtgtgtcagtaaacaaagaaatacacgtaactaaacttttctgtaccataatattttaatagtagtaattgcgctagttatccaaagacaaccttctgcatcagagagcctaaaaggatgccagtgcagtttcttcaagtttgtattatgacccaggtatgaaaaacttaggttaaacatccagttatcacccagctaaggccacctggccaaaactaaggttatggatataacctaaatcccataccttgatcatatatcagagaaatcagcttttttgatcaacagtcactattattaatatgttattccatattgtccttttattgaattttaaattatagtaaatattcccggacattacaatataacctcctcagcctgaggcataagatagtaaaattatcagtttagccagtttgaaagtgaagaacatcatcaatattttggagaatgatttagacccattgtctcatagttagcttatttttagacaataacatgaaatgtggccagatcttaccaatttacagagtcattggaaaaacacttttgaacaatatattttaaagttggtgaatttattagtcatgattttcccatgatttttaaagatatgaactatttttagaaattagtaaaattacatctgaaaatactgtaaaatactaccagtaactgcagaatgtgaatgatagtggaagaaaagcccatattcttaagatttggagtctggggttaactcttggaaagatatgtcacagtcagccactagtgaagaattctatttcccaggagtaggaattcctgtggtgagttactgatcctgatgttccccatgttctgtttccttgctgtttggtccgtgatgcagctttaccctgttctcctcactatttataaatgatcacgccctctcccattgtccagtcatgctgctttgaaaaaacagtctccacttcctcatttaccagtcagtctttaacccacagtcagactttcactctcacagttcctcggaaaatgttcttgttatgggcatcgatgacccctggtaaatccggtggacaccgtgacattatgcacgtgattcttgtgttgcaacccacacttttgacttttcccagcttatccagcctcactcctcccctggcttccttgtttttctccctctcaggccactgttattcttctttgcatggcctgcccttcaagtgcttttttaaaggattttaattattgtctcttcttttatacattcttcctaagcaaactcatccccacccagagcttcaactactacccatgagtcaatctaaactttaaatctaactcagacctcttgcctgagctccaagtcagtatttcagatatttcatgttatgtgtgtcataagaacctcaaactcaacacatctagaaaatgatttcttctctaattgtctttatcttattaatggagccaccactcactcaggatttcaaagccaaaatccaggagtcatcctgacttctcccaagtgctctacattcatttaattgctatcctagcctgttccaccttctaattatctcttgaatctttcctgttctcttcattgctgttgatactgtcttagtacccagtgcctgacacattccttcaagtcaccagacttttgctgttgcagatggattcctttgctagaatactcgcctcttatttggcaactttctccagcaggcatccaatattttctcatcctttgatatccacgtcagatattgtcttcttcatagtttgtttcctgaccttttcttctgcttccactgtccagtgtcccagccctttagggtcagatttagacttaacttccctgtcattatgcagagacttgcttctcagccttttttatattgcttgtccatttacttatcagccttcctcactcactgtgtttctaaaatataaagcctacaacttacagtcactcaacagatgtttcaacaaatgtatatctatccagcataaagtatatggctcatgcagccacatgtctacagtgttttttaattcatttataactcaactggaccctattctcaagctcctatttccccagaaggtttaaaaataattttgatttattgaaatgaattttgaatggccaataagtaaatgaaaaaatgctgaacatcactaattatcaggaaaatggaaagcaaaaccactatgagatatcatcttatcccagttagaatgactgtcatcaaaaacacacacagaaaagacaaatgctcatgaggatgccgagaaaagggaactcttatacgctgtggtaatgtaaattactacagccattatgaaaaacattatggaagtttctcaaaaaaaataaaaatagaactaccatatgatccagcagtcccactactgggtatttatctaaaggaagggacattagtatatcaaagggatacgcatgcccctatgtttattgcatcactattcacaatagcaaacgtatggaatcaacataaatatccataaacaggtgaataaagaaaatatggtatacacacaatggaacaataatcagccataaaataaagtatggaatccttccatttgcaccaacgtggatgaatctggaggatattatgttaagcaaagcaagtcatgcgcagaaagataaatacttcatcttctcactcaaatgcagggacttaaaaaatgagctcatagatctagagagtagaattgtggttatgagagattgggaagggtagggggaggggaggctagggagaggttaattaacagatacaaaattacagcaatataggaggaataaattctgttctactgttgtatagtgctatgtggtgaatacagttaacaataatttattgtatattttttcaaagctagaaaaggatttcgagtgttcccagtacaaataagtgataactatttgaggtgattgatgtgctaattactctgatttgatcattacacactttatacttgtatcaaaatatcactctgtagccaataaatatgtacaatttttacatgtcaactaaaaataaaaaggaataaaggtgaattttgttagccattaaagcagtttgaacttatcctacccatcctcttttccatccctcaggagtaggggacatatatgtaatattgtagcctgggggtggggagtgaggatgaggatggatgtgtgagtctggtttgtactcatcagtcctcactaatctataaccttcgttgaggtgtagtcattccattaattcttgagctttcggctttggcctctgttccccagacatttgctagggaatatccatagcctcattttagtcttctgatgtcatggccacatatcactacaacaccctttctggttctgtcagccactactgcattcttctcaggaactctgctttgtttttcccagactaccctagaattgtgggacacggtatcctcatcgtaccagtgccccttggcccagtggcttggatgctaccctcagtcatttctgctctaatgcttaggctcatggaggggtgtaggacaaatcaattggaagggaagtgtgctgggctcttctcaaagattgattgctttgggttagatttcctacttttttcagtcttcttttttactttttgaaccagacaaactagtcttacaccacctcacattcttgcctactctgtgtttcctgcaagatacactccagcccctaagacccacaccgtactgcttaagatgcaaaaccagctttcgaaacagcatcctcacttactcctggccaaaaagctgtagcaaaatcaaatttcttttaaattaaaactatgttggctttcagacttttgtctctgctattacttaaaaatgcttattttaaaactaaagactgaactaaatcttctctgttctggataaatttgtccttacccccaaagtaatgcataccactagatttataagaggagagccttgaggcaataagaatggataatgggaaagatacaccaaatcttagatctctaaaatgtaccctgaagtaaaagtagggatgaatggcatttattctgtgcctagtgcgtgccgagtgaatagaattgtaagggtaaacagcagataggctttgaccttcaggtactgtcaaatgctgggaggcatagacacatacacaagtaagaggatgacaaggtaaaatgtgagacatgcaggaggaaaggtgtaaacacattataattggagaatggatgagggcgctgtaaggttagccgagagaaaggacgagagagagacccaaggtcaggagagtaagtttactaacctgccaggctgcttcaccacagtcaaaggaggcagccctgagcttacaaaatgagggttttatatgggggagagagaccctggggttgtttgttggttaaccttaccacatatcatctcgtgaccaggttacaatataggaatttacaagagggtgtaacttaggtttatccacgtttctcgtgacctcccccatgctgcccgtagggctgtaagcaagtctggtgaccttgctgtagtgcctagataagggtccaggaatgcagctgcagagtattcagggtaagggacagctgcattgggtgggggggggggggtgcgggggcgggtgggaagggggaggggttctggtgcaacttgttcctaacattccagccttttaataggtaatagaagaggggcgccgttgtcctctggctgcttcttgctggataggggcgatggttggggggagaggctgggtagtagggactgctgttcctggagctgtcggtattctcggagtagcatcatgtcttgtactgttccatgggtgaaggctctaacacggccctgtaaaaactgggtaaggagatgtaagagacatgggccaagtgctaaatggaggaagagggtaatggcagggcctaggaagggcagtagccagggtgcccaggagttacgaaatcacctgggccgggaatctgaaaggcgctgcctgatttcagcagctttttttttttttttttttgagatggagtcttgctctgtcgcccaggctggagtgcagtggcatcatctctgctcactgcaagctccgcctcccgggttcaccccacacgccattctcctgcctcagcctcctgagtagctgggagtacagctgccggccaccacgcccggctaattttttctatttttagtagagacggggtttcaccgtgttagccaagatggtctcgatctcctgacctcgtgatccgcccgcctcagcctcccaaagatctgggattacaggcgtgagccactgcacccggccagaagctttttcatttattcgtccagcagcatcttgtactagtcctgactggttagtatagaaacagcactcctcttctaaaaagatacacaggccgcctttctcggcagtgaggagatctaaacctcgatggttttgaagtgtcactgctgcttaaagagtcttttggaattggagagcaagtctatttgggattggagaccccttcgtggggttttgggagggcctggtcggcttgttggcagaggagatagctcatgagggagactgttgggaggtattctcctagctgagagttagaagggggcctgttttgtaagaggaaagggcgtccgtatattaactcaaatggactgaggaaggagggtgcttttggactggctctaatgctctccagtgctatgggcaaaagggaggtccatggtttttggacttcaagagtgagtttggttaactgagccttaaggatcccatttgccctttcgacttttccggatgtctggggccagcatgggatatggagacgccactggatgccaagggactgagaaacctgttgagtgatttgggagatgaagctaggggccattgtctgattgtatggagccagggagaccaaatgtagggatgatttctgttacaagaatttgggagacttctgcggccttttctgaagaggtaggaaatgcttctacccacctagagaaggtgtctataagagtaagaataaattttgtcctcttgacgggatgaatgtgggtgaagtctatttgccagtcctcccctgggagtgttcctctgaggggatgtgtagggatggagggagagtggagggccccttgggaggaagtaacagagcatataggacagtttgaggttatgtctcttagtgaggtgaatagatggggggaggagaaatagggtgaaggagtaggtatgggggcgcacactgatatggaaggattggtgaagagatgtcagaatttctttggtctgctcttaggggaggacgagcttttgatttttgactatccagtccccttgaaaggaggctgcttgctgtatagcaaagctttctcggtgggagagttcttgggtaggattgctgggataacaggaaggagaggggcagaggcagaagaaagggaggcttcttttgctgcctcatcggcctttctgttgcctcgagatttcatctgaacctgttcgatgtcctcaacagtgtataactcctgctttagctgggaggtgtgtggcctgaaggagttagtaaataaggtggccattagtgataggggttcctttggcagtaaggagtcctctcttttgccagatagcagcgtgggaacgaggaatgtgataggcatatttggagtctgtataaatgttgactcgtttgcctttggaaagatttagggccctggtgagagctatgagttctgctttttgggaggaggatcctggcttcaattacttggtcaagggaaacaactgcatatccagcaatctggggggtagctggtgggcctggaagaggagccatctatgaatagttgatcatcggggttggtgagaggctcggaggaaatgtttgggaaatgtggctgtacgtggtccaggatatcagtggaagaatgagtaggaagggaagaggatacggggagtaaggatgctgggttgagggaagcacttctggtaagactgaatttgggattttttataaagagggcatggagtaattgaatcctggaaggaggaagggagcttactgcttgggaggagaggagatcttgtagattatgagaactgtggacggtggtattctggctgaaagttagtttcctgctttctagagctaagctggctaccacttctagtgctttaaagcaggctggccaccctttgactgtgttatctagttgtttagagaggtaagctacaggggcaaaggaaggaggatttcctttctgttgtcctaagacaccgagggctattcctcagctttcagcagtatagagagtgaaaggttgggagatatcaggtaaggacggagctgacgcagtgacaagagcagtttggagtttgtggaagctggggagtatgttatgtgaggggtttaggggttcattgggagggcctttggccacttcatagaggggatgagctaggagggcaaagttggaaatccatattctaaagaagcctgctagccctgggaaggaaaggatttcgcttttggaggagggtgggggtagattttctattaatgctgccctggctggagtcatagcctgggccccaggggaaagttgaattcctaagtaagtcatcatggagatggagagttgggccttggagggggagaccctataccctttgatagcgagaaagtttaagagagcagtggccgtgtgagtttgagagtcttttagagaggggctgcaaagaagaaggtcgtccacatattgaagatgactgggagacaggtttaaggaagtaaggtttcgggctagagcttgtccaaagaaatgagggctatccctgaagccctgagggaggacagtccatgtgagttgttgtgactggagggtgtcagggtcagtccaggtgaaagcaaataggttttgggaatcagggtgtagggaaatggtaaagaaggcatccttcaggtcaattgcagtgtagagggtggtgttggtagcgacgagagagagaagtggataggggttatggactatgggatgaatagggaggacagcttgactgatggctcggaggttgtgaacgagtcggtatgagccatcagactttttaacagggaggataggggtgttatatggagagtgtgttggtctaagaagactgcatgagcagagcttgtttacgatgggctgtaggcccttttggtgggttagagagatggggtattgaggaacattgggaaatttggaagagtcttttaactggattctgatggggtcatggtgagcagctacggaagggttaatgagagaggcaggaagtgggtactggggaaaggggtcaggggccggactagcggagaggagcaggaggggactctggttgaagggggcaagaaaaggtgatagaagctttgactttggctaaaaggtctcagcctagaatgggggtggggcaatgaggcatgataaggaaagagtgtgagaaaatggcatcaaacagggaacaagtaagaggtctggtggcaagcggacaagagatgagtccgtcaacccccacaactgagacttgagagggatgagtgggtcctgagaactcaggcaaagctgagtaggtggccccactatcaattaaaaaagagatcagcttacctgctactagtagagttaccctgggctccgatgcagtgatggcagtgggggccgggagccggggcccaggggccctggcctcatcagtcttcagtggctaggccaaggagctatgggagtgcaagtgattcttcactttttgtcttgttgaagggatggtggctctgaggagcatgcttgtctgcccatctgttgagaggacagtcagacttccagtgcccatctgctggcagactaggcaagggctcttcggcactcatgggtggggacatggccccgtccagtggccttctttgccgcacttaaaacaaggcccaggaggtttgctgctatcaggtcttttgtgcccttgggtactatggctagactgacagatagccactgctggaagctggtatttagcacgatctctttgggctttatctaatttattttgctcgtccctgttattaaagactttgaaagccaggttaaggaggtcttgttgtggggtttgagagccatcttcagcctttttaagtttgtgccggatgtcaggggcagattgggaaataaaacgggtattaagaacaatagttcctacatatgtaacaaacctgcacattgtgcacatgtaccctaaaacttaaagtataataataattaaaaaataaataaaattttttaaagaaagaacaatagttccttctcaggaggcagggtcgatgcgggtatatttttggagagcttctgtaaggcgggaaagagattgggcaggattttcatctgccttttgggaaatgtctttaagtttttcaaaatttacagcctatgggcagctttgttaaggcctgcaatgaggcaagtaatcatatggctacagtacacttggccagggtctgtgggttggtattcccaggaaggctcttcccagggaacagcagcagctcctacgggcttagtaggatcctgctgatgaaggtcatcggcatatgcctgtgctgcgagccacactctttccttctcttctggaaggagggtagaagagaggataaagtagagatcatgccaagtgagttcataagattgagtaagatatttaaattctttgatgtaagtatcaggatcggaggagaaggacccgagacgttcttcaatctgtaagagatcgtagaaggagaaagggacgtggacatggacgatcccctcaactcccgctacttcccggagaggaagcaagggagctggttgctgagcacattgggcccgagagcgggtgaggggaggaggcagagaggactcagagtcagaagtgggttggttggagagagtgggggagaggggtagagccggagcagggacatacggtggaggatcatgatgctctggtggaggatcatgatgctgtcgaggagggagaaaatccacggggtcaaaggaagaggagtcatcggctgggtctgtgggtggggtgacgggagatgagtcaggttttgagctggtgagtaggatttggaaagtagagcaggagtggcagagagaagggtggttacggagaatgaagaaagcctgaatataaggaatctcagaccatttctcattgcgatggcaaaagttgtctaagtctctaagtatattgaaatcgaaagtgccattttcgggccattgggagccattgtccaattggtattgaggccatgcagtattgcagtaaaagataagcctcttagaacggatccctgaacggaggccgagagccttgcgattgcggaggagacacccaaggggggtggtcttgggaggggtagactgagaggctcccatagtgaatggaggaggtgagggtagaggaagaagggaccacagacgacaaagacgagagagggcggcgcctgtcttgcaggccttgtatggaatagaggaggtagctgcggagtcaggcgtccaggaaacagaggaaccagaggcctggaggccagaggaagcccttggcccagcgctgggtcttttgggagtgaagagatggtcaagggttccaggtaataggcaaaagtctctcttactcacccctctcagaggctttgatggtggatgaggtggccaacaatgggagaattttgggagatccttagggtctttagcaggttcgggaaggggaggttggctgggtaagggatgataggagagagagagagagaatcctctaaggacgcccagccagagcctatccccttcctgggttttggcaccaaaatgaaggttagccaagagaaaggatgagagagagacccaaggtcaggcgagtaagcttattatcctgctgagctgctccaccacagtcagaggaggcagcgctgagcttacagaatgacgggtttatatggggcagagagaccctggggttgtttgtgagttaactttaccacatatcatcttgtgaccaggtttcaatataggaatttacaagagggcgtaacttaggtttatccacgtttctcgtgacctcccccatgctgcccgtagggctgtaagcaagtctggtgaccttgctgtaggcctagataaggatccaggaatgcagctgcagagtatttggggtaagagtctgttgcattggggtggggggaggggtcctggggcagattgttcctaacattccagccttttaataggtaatataagaggggcactgttgtcatctggctgcttcttgctggataggggcaatggttgaggggagaggagcaggcactaggaaagacaactcttaagatgttacgatttgtactttaatattcagccatagcttcacattagaatcatttggaaaagttttttaaagtactggtaactgtgacttgacccctgaagattctgattttaaagttttggaatttggtgtttggacttcttaagactccttccctccaggataccataacataaggtacactgaatgttgtaaatcacttcaagaaaatgtctaaagatgctggacaattcagggtcgtattgttaccagtagaaggtatccaaattaccagtggcaaatccatatgggtctgcagcaacctcaattcttacctcctcagaagaaagaattcgactgacgggcataaggcagacaaagagaccaagacaagtttcagagcaggagtggaagtttatttttaaagagcttagaacaggaaggaaaagaaaggaacgtatgcttggaagagacccaagcaggtaccaaggtcaagcgcggtgtttactttgatcctaggattttatagattcctttcccatgattcttcccttagggtgggctgccttcatgtgcagtgccctccttacccttgggaggtgagaatatgcagtgtgtctaggaagtcgtacacatgccaacctgagtctttcttcctttttccagtggcgtgtccccagaaggtcatactccaccatgttgtctcatcttgcacatccccaagaagttgcttctccctgacgtctgcgtttaattaagtgcaataggtgtggaccatcaggaaatggcctccctgatgtctgcattcactttagtgcaacaggtgtgaaccttcaggaaatggcctctttctggtgccagctgccaatttatcacttttagagaggcaatgtgatcattgctgaaccatcaactgacattcctagtggttgggggagggccctctcctgccccactcatgcctgcgtaactacctgtaacaatacgcatgaagaagcagtaactcttgatgttgattgagcagttgagtcaccaacttaggtggctggcagaaatgctttttgttaaagtatgactgtaagcttttttttttttggtttggcaaacactttgagtagtaagagaatataatttcacctgtgctcactggtgctacgcaaagatccctcccaaaactgttcatctggtcctgatgagtggcatcactaccagcaaccaagctagaattgtccaagtcattttccttttccctgtccctctactgcacatccaaatggcattattgaccaatcctataggcttagaccttctaaatatttatttctcttctctctatcaccactgatctgccctaattcaaatgtagttgcttcctttctggtcaccaagccttcagtggccctgcacaccactccattcatcttgtgtccttcattcagaggtagtttgaaaaacacacacaatatctttcaatacatacgtaactgaaggatattgagttgagctggctttgaggagacaacaaaatagatataaagaaacatttgtttattcaaaaacgagatgtcatattttaaacttttaaaataaaaaaggttcgtggagttatctcacaaatcattgtttttaaactatacttagagaacctctaggctaaagatacatcttaatgaatttctatatttgggtaactagatctaagggaaagctaaacacaggaaagacaaagccaatagatgccaggaagaggaagaagtctggcctcacgttctcctttaatcagattttagatgtatttagaataataacttagaaaaggaccaaagagcagcaagcctatgctgaattccttgcacatgttgagtcaacatcgcataggctgttttgggtgctcctttaaacacagcctctgaaatcttgcttttcctcaagggcaccattgagcattgttttacttttgcccttattttctgtcctcaaatgatgtctggctgcacttattaactcaacacatagtttaaagaaattttagaaacctctgattttcaagaccaataataggactcccctccccaaatgtggttgtttctataaatataacttgcttgctcttatttcttgtaactagtggaccagactaactgccagtaacagattgtatttatagtctcatttcttccttttccaattgtgcagaataattttgtttttctttaatagtttgtatattaagagttaattatagtttcacaaacttctgctagaggatgttcatatacaatatgtacatcagctttctgccagaatttaagtggatttcattccaaattatttataaatggataatttcatatttacagggcttttttaaacattgcttccctagagaaatatgatatttagtgttgagttgttaaatgccttaagatcttagatggtgaaatagttgcccctgaaactgtttgctttacaattttcagtgtctagcatacttaaatcaagtcaatgaatggtttttaaactaaattctgttaaagcattatacataaaataacttagattatagtgaaaactttctgttgtagtaataggtatttacctatcacatttattcagactttttttaactttatgaaggaatttattttttaagcctactccctggtggaaacagagtaaggtgaattaagaacagagtttttttcaagcatggtgccaaatgaatacaaagtttccttctgccagagtggtgaagtagtcataactaactacctctgaatagagtaagtgttgggccgcacagtttattaataaaactacacacacttacttcagcacagtagagctctgttaaaatgagatgtcctaaacacactatccacacatggtggaatatacattttcaaatttgatgaaatactaaaattgtgtttttaaagcaagttttaatgtactgctgccaccactgaatgaacatttaattagattgaataaaaacagtgttatcggcctggcacagtggctcatgcctgtaaccccagcactttgggaggccaaggcaggcagatcgcttgaacccaggacatcgagaccagcttgggcaacatggtaaaaccccatgtctacaaaaaacaaaaaacaaaaaaacaaaaaaagttcgctaggcgtggtggcacatagctgtagtcctacctactcagaaggctgaggcaggaggatttcttgaacctggaggcagaagctgcagcgagccaagactgcatcactgcactccagcctaggtgacaaagccagactctgtctcaaaaaaaaagagagagagaaagaaaaaaaaacagtgttttaattaataatgacttgtcaagcattctgacttttagccatttacaattaaagttattattttattaaattttttatatcaaccattgaaaagtaagtctactaaataggaaaatatatcactcgtatgtaaatagtggcataaaataaggtgaaaataaaaaagagaacacaggtcattcattttcatgctgagtaagaagttttctgtaaccactttgcttagtaatttagtcacctttgaggtaaaaagaaaacttgacttttaaattctgatctacttttgatctttcactttaatgtaaaatataattattagaagtctgtattctcagacttgcagagaaaataatcacttgcaaaatatcatggaataagataggaagaggaattttagcaaaacactgctttgtatttcatggtgagtgtgtgtgtgtgtgtgtgtgtgtgtgtatcacattttctttatccactcatggatgggcatttgggctggtcccatattcttgcaattgtagattgtgctgctatacacgtgtgtgcaagtatcttttttatataatgacttcgtttcttctggatagatacctattagtgggtttgctggatcaaacagtagatctacttttagttcattaaggaatctccacactgttttccatagtggtcgttagtagtttacattcccagcaacagtataaaagtgttccctttcaccacacccacaccaacatctgttttttttttattttttcatcatggccattcttgcaggagtgaggtggtatcgcattgtgattttgatttgcatttctctgatgattagtgaagttgagcatcttttcatgtttgttggccatttatgtatcttcttctcagaactgtctgttcatgtccttagcccactttttgatgggattgtttcttgctgatgtgtttttgagttctttgtagattcttgatattagtcctttgtcaaatgcatagtttgctaatattttctcccattctgtgggttgtctgttaactcttgattctttcttttgctgtgaagaagctttttagtttagttaagtcctatctatttacctttgtttttgttgcatttgcttttgggttcttggtcatgaagtctttgcttaagccaatgtctagaaaggtttttccaatgttatcttctagaatctttatggtttcaggtcttagatttaggtctactcagccataaagaggaacgaaataatggcattcgcatgcaccttggatagaattggagactattattctaagtgaagtaactcaggaatagaaaaccaaacatcatatgttctcacttatatgtgggagctaagatataagaatgcaaaggcataagaataatacattgacattggggactcaggggaaagggtgagggatggtgaggaataaaagactgcacattgggtacagtgtaaactgctcgggtgatgggagcaccaaaatctcagaaatcaccactaaagaacttattcatctaaataaatgccacctgctccccagaaatctattaaaattaaaaatttaaaacaaaaacaaagatacgtgtaggaaaaaatattctgatttatagggtcaatgtttttctgtcatgagtcaagtataagtaaaatgttttcaaaacaaaaacattagtttgggctcagcagaaaagtctactgagttgcactggataattagatgttacagattccctgttgtgcacaagtgtggtgtgctcagagtacatcacacttggcacacactggttgaatgctagaatcacctgaggagcttttaataaacacagctgcccagaacacacctgagatttcctaaggatagggctcacatctctgtatttttaaaaattaccttgctactctattatctgattttagtgctcagtggctaagagttgacttatcactgggagccctttatttttactctttgtaactgctaactttgtcatggtattcaaatgacctccacatgtatgcctcatattccaatgcccagatgtagaaaagaggttaaaaagaagcaatagaagtgcactattcttttagaaataggaaagaaacaccctttgaccatactaaataactgcattcgattcttgagagaaggagattgctagacgtagtccttttgattttatttcttataaagttttgcattcctaaaatgtgtattttattcttaaagaggaccgtggattaggtcatcaggaatgttaagcgggggtcagagagactattgcaagcctactttgttcagaatggtgcttccagtacctacaggagaggctgccccattttagtcactcagtaaaccattttttgagtgaagaaatgactctgggctggaaatttaatcagagaagaatccatttctctggatgttttattttgctatttctaatttatttactcttttgaaaaattgcaaacacactatcaaatacccagaaagtggcagcctaggtccatttccctcacacttaaccacaactctacatggttgactagatgaaacgtgtgtgggagtgttgtgaaaaccaagcacagtgcaaatgtattattagccaatttttctaccagtccacctctccttgctagttttttcttaattatctctgtatccccagcataataagcagtgagtaatgtatgtgacataaaaacaaacaaaaaaaaatcactgacttagatacagtaaacattgaaggctttctttctgcatatgcatgccctctgaatctcttaaaactgtttatcatttttttgtgcaaacacagagccagagcttgtgtttttgtttctacttaaatgtaattatattattctatgtctttattgtattcttgatgatataccttcactaattttctacatcagtatttaaacatttttcttaatttttaactactgaagaggagtggacaggactcatgcaatgacatttatgtagccatcctcttattgatgggcatttgttttgtttcttattgggggaagtcggtagaacatgagattcttaatctcagggtcctgggtttaagccccaggttgggagccagatatcggcggaacccgctcccaatgtttcaacataggttctttctattttccataagcatcagctggctgagaaataaagagaaagagtacaaagagaggaattttacaactgggcctccaggggtgacatcacatattggtaggaccatgatgcccacctgagccttaaagccagcaagttttattaaggatttcaaaaggggagggggtgcaagaacagggagtaggtcacaaagatcacatgcttcaaagggcaaaaaggagaacaaagatcacatgcttctgaggaaacaggacaaaaggcaaaacagaactactgataagggtctatgttcagctgtgcacgtattatcttgataaacatcttaaacaacagaaaacagggttcgagagcagagaactggtctgaccaaaaatttaccaggctggaattgcccaatcctagtaagcctgagggtactccaggagaccagggcatatttcagtccttatttcaaccgcataagacagacactcccagagcggccgtttatagatctcccccaaggaatgcaattcctttcctagggtcttaatattaatattccttgctaggaaaagaatttagcgatatctctcctacttgcacgtccatttatagactctctgcaggaagaaaaatatggttctttttgcccgaccctgcaggcagtcagaccttatggttgtcttcccttgttccctaaaaatcagtgttattctgttctttttcaaggtgcactgatttcatattgttcaaacacatgtgttttacaatcaatttgtacagttaacacaattatagtggtcctgaggtgacgtacatcttcagcttacgaaggtaataggattaagagattaaagtaaggcaggcataagaaattataagagcattatttgggaagtgataaatgtccatgaaatcttcacatttatgttcctctgctgtggctccagccagtccctccgtttggggtccctgacttcccgcaacagtttcttttgtttttatatcccatgttcgaatatttctgtagtatagattcctataaatggaatttcttgttattaaaagcacatttaatttttttttttgagacagtgtctcgctctgtcccccaggctgtagtgcaatggcatgatctccgctcactgcaagctttgcctcccgggttcacgccattctcctgcctcagccttctgagtagctgggactacaggtgcccgccactacacctggctaattttttatatttttagtagagacggggtttcactgtgttagccaggatattctcaatctcctgacccacgatccgcaagcctcggcctctcaaagtgctggaattacaggcatgagccaccatgcctgaccttaatttttttataatgatgctaaaccacccttaaaaaacctgtgtcagtttataccacccaaatagtgggtgataatgcccactcccacagccactccaggtctgggtattattcaacttctctttctttcttttggtaaacaatgttaatggaggaggtaatttttcattattattttacgtttgtatccttataccttctggacactataccaaaatctacaatctaaaatatatagtagtttaatctaaatggtagctaatataatctctactatatgtcacactgttattctgtttcgactttttcatgtttcgatgttaaagtttaattttaacagttaagtatcaaattttccctatatatcataatttatataactattatcctattcttgaacaattaatgcctttccaaggcctcaccaatataattacatagcaacgaaaacccttatatgtgtggtttttttctccttttatgaataatttattaaagtaaatgccagatagtgatattactgggacaatatcactctttttatggctcttgataagaattgttaaattgctttacatatattaattatcttgattcagccattccacaatgtatacatatatcaaaacatcatgttatacacaataaatacatgcaacatgtatttgtcaatttaaaaacatgaatagttttacaaaaatgttatatccattttatgatcatcaagagtatcatatttttacagattctttactacttttctgaagtgtggtatatttattatttcaaatttaatccatatgtttacttttataaattgtaatttatagattatatacacagagaatggtgatatatatatttatattttccatgcttaaaaactgcttactttgtaatgctaactgaaagcagcaggatgcagaatgaagtgtaacaattatgtatatacctcaacaataggtcatttaattttcctttttctttcctaattaatcacaagtattacactgaggctgaatgtcttcctcatattcttagggtcaacagatctgtctctttcttttaggaaatttatcagtggtgtggttcctcgtgcaacaaatatgaacgtctgaaggcaaaccaggtagctactggcattcggtacaatgaaaggaaaggaaggtctgaactaattgtcgtggaagaaggaagtgaaccctcagaacttataaaggtattgtgactcctgttgtttgttaaagggttaccactccaactcgtatgtgtctgtgtggtgtgtgtgtgtgtgtaaggcagcagggtggggaagaaggggaaagagattcaacacatgtttcaatagtgagcctagctacaattagtaagaggaaacaacagggttatctaagtgatggaactgggaaaacagaaagtcatgactttctcttaccgttggtgtcactatcaaaggagccctgggcctatcttctatagtatatgaggtgaaacaaatgagtgacacttctgaaattgaccgtaagaatgtattttggaaggaagacaatattaatagttctttcatctattcatctgggcttctcagggttttacttgttttttgtttttttgtttttgtttttgagacggagtcttgctctgtcgcccaggctggagtgcagtggcacgatctccactcactgcaagctctgcctcccgggttcacgccattctcctgcctcagcctccctagtagctgggactacaggcgcccaccaccatacctggctaattttttgtatttttggtagacgcagggcttcaccatgttagccagtggtcctgatcccctgaccttgtgatccgcccgccttggcctcccaaagtgctgggattacaggcatgagccaccctgcccggccttctcagggtttttttcaaacacggtggttttcttcaattttaaaattaacagttgcaggttgagtatcccttttccaaagtgcatgggaccagaagtgtttcagattttgaatttccggggtattggaaatatttgtatatacaaaatgatatatcttggggatgggagtcaagtctaaacatgaaactcatttatgtttcacatacaccttatatgcacagcctgaagataaatttatacaatattttaaataattttgcgcatgaaacaaaatgtgtgttaagtacttgtgggtggaatttccacttgtggcataacatcaggactcaaagtttcagactttggagtatttctaatttcagatgtttggattagggatgctcaacttgtatttcgttaaaggaattaaatacaatcttataccaagagattaaatatgccagtatttaaaatatttcaatcattttaagctaagaattatacgcaacacacttatgattttagtgtagttcttaaattaatgtgaaaattaagtgttcatggctctatagaccctgcatcatttacttaacgattatatgaatcttaggcatttggttgtgaccaaactttgtcttttaagaatattgcagtgactacctaagtatatatattgtatatattcccttaaataagactgtcagttaaggagtataactatattaagatgtcttcatacgtattcacaaattaatttccatttgttcatacaacaaatatttattgtactcctgcgatgcgccaggcactaaatgtttgcaccagttgctacttccttgtacgagcactgtgttccatcgtgactttacagagccctgtcaaaatctgttgatataatacctttttgaaacttctgcgtttaatagtggtaggtggtatctctgagttttcatttctctgatttcctggaatattatacatattcctccagtaattttagatttgcatttaaatctatctaaaggctatctcataaacatttttaatatttttgacttacagaaatttaatgcagtagttacatggtccagtgatagcctaaaaatccagtgatcagaaattatatgaaataactttatgtattgtaatgtctttaaactttattgctttaataatgcccagacacagactttcacattaatgatgttttggaaataattttaattcagtggggaaaattctcatggtataatactaggagaaaagacagaatataaaattttatatgcaatattatactaacatataatatgtgtatatagctctgtattcatacatatgtacatacctagaaaattgtgctaaaatattaccagtattacatcttgggatgtggctgcttattttcttcttcatttgtctttgttataattaacatatatgattcattttataatcagaaaaaaagtccatttaaaaaattaagataaaattagggatggttttactggattttcattggttagaataacatagctaataaatcagactttgaaaagtattcaaaacaaattcttgatcttttaatattcttttaaggcctctgttctagagatgggatcaaccatgtaagtcttctaacttggcatatttggaagcaaaaatctataaataagatgtatttctagttgactgtaatcccttgtctcaatagctatgcttggatagaagcagattcaggaacaggacttgccttgtgaagtggtaagaagagtgttacattaactatcggacatcactcatgcttctccagggtcacccttggcccaaagcaagtctcctgactattcattgtgtctgattcctcatatgcaaagtgaagggttagacaaaatggcttctccagtccctttaggttctaatgatctatccttctaccttacctcttgggcagcagctgtgtttaattaccactcatttgccacttgtagtctgttccaggaagtgatgctgctgcagctgaggggccctgctgggcatgtacatatgtggtgtcctggcttattggatttcattcaatgtttcgaaaaagaaagtgtaaacagtcaatacattacactgtaaaattaaaataagaaaaagcaaatgaagaaaaactgtgcaaaaatataatttggctttaaaatattagtgataaggataaagagatataatgcttaagataaaatgtgatgtctgtgtttccaagactcctcagtttggtttttagaaaaatcctacaaagcacccactttgttttcattcaatacattcagtgtctatactacattttatttgactgctttcactcacacaatgaactgagatgaattttcagtgaaaacctttattagataaggaaaaaaagcattcagtggtcttttcgcttttggaaatgtagttttgtagcctgattacaagaaagagtaattatttgattaattaattgagcacctataacaaacttgtttgacttctaggctttcttagtgttgtaatgataaggatagaatacaaaaagcccatgaacttggttgggaagaattacaactttattttcactaacctcttaactgaaatacggcctttcctccaattgtgaaagtaataagcaaacgtgagtagcaggaacagtactgtgacttttcagctcacattatagctattgtacacaacctcaaaatacgtttatgctcattgctacttggtaattattattgttattagatcttctgctcactagtatttaatgagttaatgaaaagctcatatattactttaccaaactttaaaatatgtattttgatattttaatagctgcatttcaatgtaatttatttccattataatactttgtatcttgttttatgcatttagcaaatatttttcttagaagggaactaataggtttcagaagtgttccaaaccagtctatactatgcatgcacacatgcacacacacacacacacacacacacacagagtatccttgtttaaaatttgaaaatgtcatttctttttctgagaccctggtgcaacagttgattttactagagatggagtctgaaaatctaaaaatttttcaaatatattttaaattgaggttttatttatttatttattttttgagctggagtcttgcactgtcacacagtctagagtgcagtggtacggtctcggcacactgcagcctctgccttctgggttcaagtgattctcctgcctcagcttcccaagtagctaggattacaggcacccaccaccacacccagctaattttttgcatttttagtagagacggggtttcactctgttggccaggctggtctcaaactcctgaccttgtgatccgccggccttggccttccaaagtgctgaaattacagatgtgagcctacgcacccggcctaaatttgaccttttaaaagactcatttctaatggggttcttttaaaattattaactttaaaagctttgaaagtctctctatgtgaaagttagaaatggcttgaaagcacggatattttaatcaattaaatgagcctgttttcattactctgtattgagtgctgaaatttttgaacttgtctaacacattaaagtgctcaacactgaaactcacacttttctgagagtcttttgaaaaatttatctttagtttgaagtatttcagctattgatcacagtattttcacacagtttttatatggcttatctccagggtgaccataaatttatcctccaaagcaaagcacattgtagagtaaaagggggcactgaggagataggacacaaccatcattaacaagactgtctggggaaacaggatgtgtgctcaccctcctttctgtatctttagtacttttaaaagcccgtgtgcctaaataggaagacaatcctatatgtggaaaaaactaaactctgtaactaaagtcaaattttactctgagcttgtttttgctgcaaatatatttaccataaatgactgcacataaattatgtaaagcttttttcgtgatctttcttcttttcatatttaaaataatcagtgaatgtgaagaaaaattaaatatttcactagccctaaggtcccaaactttattccttgattaatcgttttgtaaacattaggaggaaagcaaaaaacaaacaaacaaacaaaaaaaaccccaaggaaaaaaatactatgttttttagactttcattaagaaaaaaacccagcatctggtagatataaaaagaatgaagatgaagaaagggcaagttgtttgaaacaacaacaattttttttattctggaaagactttttaaatatagtttaatgaattcgttaagcctataatcattgtaaatgctggtggtgaaatactggcagtaaaaattctacagggagatggtaggcagatgctgtgttgctgaactgttgttgaactcttgcttttataaaaatgactgtaaggctctctggaaagtcatacatgcaatgattgtttcagatttttgacctaaaaaaaaagaaaatcagaataacatattatgtctccattaataactgtttatcaagtgcagggttggttcccaatgaagtttgaagactctgcttactttattgtctggttgaggagataagcatgcactagaaaatagtcagaaagtgtgggaatagaatcgtgagggtcctcagaggccagagagcatggtctgaataacaccacaatttgttggaagacttttcatgatgaaaatcctattttagactttatgatgttagcatatagtctagattaaactccaaaggttctcccaaaatagaaaatgtgttccttttgttttttaagtcataattcacagtatgaaaacaaaagaatgtattcagccattctcttggaaagttgatgggatatttaccctatgctgatctggctgtcctgttagtaaaaactagagttgaatagtgaagatagttcttaagttatcttttagagatgtactctacaaagcctgttaaggcaaagagtaaatttttagccatacttcttcaaagtactttgcaaaataaaatttatatgttatcaatgctaagttccttgagggcaggcactgcctttatatttgtgtagccctcacagctctaactcattgcccactcgtatttggataattaagacaattaactgtgaaatatgtagttccagaaactaagtatgcttgtttttctgttttttaggggatagtatggcttaaaaaattcccttattttaggtgatattgttgatgtagacatgaacaaagtcatatgctgattaaagtaagttttaagaccaactagatttacatggaaaggcagttggtacttagaaaggataattcaaatattctgctcctcttcttttttcaggtgatagttagaaccagcctctcgaaaaacaacaaacaggtcttgagcttatttatacttagtgcaatactgtcccacatattaggcagatggcatatactccaagtgaaagtgcttcacacggtaggaaacatgtagctagtatctaaaactcttcatctatgaattaaaatgcatgttaccttacgtccctctcaggtcaggtcatcaccccttttagaatccagcagccacaaaactccaattcttttcttgccaggacagcatgtaacactgctgcccgctgcctggctaccctgattggctgttgcctgcaattccagtgctgcctctttgggaactgttggggccaccactgctcactgctctggactaaaggtgaatttgctccatgaactccaaggatctacacagatgtagtgctttattactgagtcatctagtacatttgtcttgttcttcccccaaagttaatgtcaaaaggctgtgcacattgctagtgcttccaaagttcttttaaatttacagaaatgagtgatttttaaattttaataatttgatcatgggaacattcatacattttggaatacaaagtaaaagattaccaaatcaaattggaatttggaagcttaggattttgtcagcattccttaaagtttttctgtggaaatgtttgtcctaagtttactagacttacatgggtttgtattttaatattttaatgaaaatatagttgtacatttaaataaagaatgattgttttgaaaatgatactacagagagaggaaagagctttatttctggggcgtgacctttgattagataaatcaatcattctccatttatctttatagggttgtatcgaatgaaccaaagaagtactagtaattgaaatggggagctttgtgaaaatccctctcacgaccactttgtaacaatatatttagcatttttgaaagagtctaaggctttataggaaaatggtataaataaatatatagctaggctggtggtgcacacctatagtgccagctatttgggaagctctggtgggaggattgcttgagtccaggtgttcaaggatgctgtgagctatgatcatgcctgtgaatatccactgcactccagcctgggcaacataaagtaaccctgtctcttaaaataaaaaaaaaaaaagattaaggttgctttatgggtttgtaatacccacacaaaaaataagtcattaaactatttttctgttgccctcctattttttttcattctagtcgaaactctgtactttgtaagaatggaaatttgaattgtctgagttatcagttgggtctaaatatttgtatgttttccaagtagttttagcttccttatttatcctgcttttattttcctatgactttttgtaagtccttgggaaattgaacaatgtcttaaatattttgtaatccctcattcatgtagcattgtgcctgacacataggcactgctcatcaagtgtttgtcgtttgattgaaataacattattatgagagtcattgggaaagaggaggtccatttaccgacttaccattcaaagatttttaagttaaagggagcaaatatattcgcaaccctctctaaattagtcctgaggctacactgcatatagagaagagatgaactatcagagatacaagcaagtaggaatctttctctttctcctctttgctgcattgtaattaatgcattttctccattttgctttactgcaataatacttagtacactcctgaaatccaaagtattacagtgataaggagtacctgccccaagttgcgacgctctctagaacactagtgttgctccagctatttagatctaccatgtattgatggcttactgtttgccaggcactgttcaagacactattcattccttgttatttaatttaatgaatttgttgcttggatttctagtattgaatttggatacccgttttgttcctcaccaattcatccagtgggggaagttgaaatgttctgaacaaagataagaaattcatatagtaacagcttatcatatgctgcaagaaagtgataacatttcacataatctccccctttgtcacaccaaatttcataacgaagacttgtaaccttacagacaaggtaccactgttatattaatcagtccaagttaacaccacttggcaatcatctctgaatgagttaattttccctttagcttgcagctgaagtgagggaatatcaatagactctgtaaataggataatgcagttccaagacagatggatttaatgggtaggacaggggagagggatggatctttgccccacaagacgtatatctgaactgataagctaatataaatattgaactataatggcagtttctattctatccttttagtgttccacttgtcacaatagtgataatatatttaaaaaaaactaacagactgtattttttcagtaattttaggtcaagttcatcttatcctttgtgctaagactcagctaaacacagatataaaagggccaggtctctgattcagtgattcatgatttcttgcattcattttgtaaattagtttttaagtatataataataaacaatagtatttacttcgtatcagtttcctcttacatattgtgcttagagttagccaagcccagatacgaaaatgttaaatatgcaagattcagccattcatatctccttagtatgtatttgataataagcatttgtttaatatcatgaggaaatatgctcacatattggaaagaggttcctaaaatggtggccacctggattgtgcttccaagtactgtttttccagagcctagaatcacagagtgttggaactgggttatattgacagcacttgtataaactagtgttaatgtatcagaattgctgttatgtttgcaggggtatctagtgcatcacaatttttagaattacattattttgaaaaaatgtatatgtaataatatgtttatttaaaggctttaaagtgactttgtaaggaaaggatggtttcttcatgtaaatatagtattctgctcagtggaaaccaataggaaattctcagtgttagatatcccataatctactaatcatgaaaaaggtaccaacatgctgctaaaatatattaatatctgtatgtaaacaaaaaagcttcatagaactatgttggtaagtgaagtcatgtaccatgtatcacagagaaattaaatattaatggtctgaaatctgctgtcaaaaatacatcttaacgatgtctgatagagtgcatgtagagaagacaaatatattgattaaaaacagttttgaaacaaggagcaaatgctctacaattgcattgtgatattcactgttatggaacactattgttagggaatggcacgacttctctcatcttgtgttctacaagggtaaatgtagatggctcactggtaggctgaacttcctgttcattccttaatctttttgttacattttcttgatggcatacaagtgcttcttcttattaacacaggaattaaataatctaggaaatggattttaattgctgcaaaagagctaacaactactaccctgacaaacattcagtgctaaccatagaagaggcactcttctaggagctttacaggatttaactcttaaaacccttactgtgatatggagacattttttattccctgtctatgttgtgttcctccaaaagttgactctgagacaaggacttgggggcaggttgttatttgaaaggtgatcctgaaagcatcaagtaggagtaaagtgagacaacattttgttaacaggtgtcttactacagtgagcaactggggctgagtcccaaagagaccctcaggcattagccctcagaaggctgagtggttgctgggtctagccagtaactcccatccctcattgcttgagcattgctccttggttcttaatgtcccagaacctgccttgtatttggacacagtacagctccatggctagagaatgccaccagatagaaagcaaaagacttcgagctttaagatactatctatagacagctccatggccaaataatgccaccatgtagagagcagaagacttagagctttaagacactatctgcaaatgaactctaagttagatcaaggtgatatgggcagagcaccaatagcatctgctacatccttactttacagatgaggaaactgagtcatagagaggctatgtaacttgcttaagtagaaataagaataagaaatctgtggatcacacccaaactgtctttcttacagacactgcgatcttaaacatacagagcaagggaaatcccaactgctgtgaagttattttataacttcaaaaactttgccagaaatgtttgataattatgcctcattttatatattccatataataattactagttttaatagcacagtgtttgtactcagtggactggtgatatggtttggctctgtgtcctcacccaaatctcatctgtaattgtaatccccacacatcaagggagggacctggtgggaggtgattagatcatggtggcagtttcccccatgttgttctcgtgatagtgagggagttctcatgaggtctgatggttttaaaggtggtagttttttcctttgtgttccctctctctctcctgctgccatgtaaaatgcgccttgcttccccttcaccttccgccatgattgtaagtttcttgaggcatccccagccatgcggaacggagagtcaattaaaccttttttcttcattaattacccagtatcaggtatttctttatagcagtgtgaaaattgactaattcaactggcttacccctttgttttttatctcttaccattagcattcagcccttcatccaaattacaggggcatttggtttagggtaattgaggtacacatttttttttggaaagaatatacattttcttaatgtatagcatagaagttatgcaaatatttttaagtgcctcagagtacttgaaaagccatttttgagtttgctcaattaaaatttcatgcttggaaattttctggattatgtagataaaaaagttttcccaactcccttgccattgaaacaaaacttggccagattgaattaaaagttatatataaatcaggtttatgtaccttttcctcaaaggataagatgagataaaattaaacaagttcatataaatatgtgtatatgtatatgtatatggtgatacagggcagtgaaaaaatactcctggaggtttagctcatgttctcattataggggtgccctattttcttctccatttctccccttacccaacttagttttttatccaacttagagtaccagagggtaatcttttccaaaatcagtgaaaataagcaagaagttactgagactaataatgttaccagagacactgtagtgaagccccagcggtgagaggagaatgatctttatggacccagcagttttgggaaatgggacctaataagagatgactagagccctcatgaatagtttgacattattattgcagaaatgggttatttcttgagagtgggtttattattatctaaaagtgagtttggccccttcttgctctcttgctctccatgttctcttgcctttcttccttataccatgagaagagatagcaagaaggcctcaccagattctgctaccttgatattggacttcataatgtgagaaataaatttattttctttatagattacctaatttgtggtattctgttgtagcaactccaaacagcgaaaacactgcactgaaagttagttcacctaaagcagggatcaaagctaacctgttaaccattgtagactcagctctttcccacagagccagaatattatagacacgcaagaaataaaccttacataacagatatatcttgcctcaccaaaataaggtcgtatgtacaagactatatgggaaaatatgatggaaacacagaggaggatcagagaattcgttttataatcaaggactaatgacatcatagacaacacaattgtggacttcaatgaaaggaagagattactatatcatattcctttttctcagcattgtcacctactcttctgctgattgcataaaagacttttctccaggttttgcctggagagggatatacaggtctatattcaatttgtagtttaaatctaagatataagattttgacaaaggtacattaccaagacatatagactgctttataaaatcattagatcagtacgtgaacaaataataaagtgtaagtccatgaggaggtgtgtggcaagaagtccagtggtaaaatcattatgcaaaggattagtccagtaatttgcagggttgtataagacagaaagagtaatgctttgaccagggaaagatttgactctgcatatgtaaaggtgaagaaagggtacaggatctaccatttgttgaattttcaccatatgctagtcatagtaataatcacatgataattgagccatattatttattataccattttaagtgtggaaattagattacagagactcttagtagcggctccacccagctcagcctgcctgatcctgccaagtgaagggaggtgtcaaaaagacaatggaagaatgcacagaaattaggaaccccaaaggcaagtttcggaagcgttcatccaagcactgatcagacagaaatgtccaaagtgggtttgaagccttagggaaaaaggtttggtgatgtctagaaaaggcaaatgacctgaaatcttaatacctgagatttgccccagagcagctctcagaccaccaggccctaataatttgtccaggggagatgtgttctaacaagctaatgtgaacctcagaaatgcttggcagacctatcccaatggttgaggtagataaaccaggctagcaaagctgatgccacagagcacttgaatcacatcaccaaagcaggcctagaaggcttttcaaatatacaatgcatgggctccaatcagaataaataaatctgaatttctagagattggattcagacattggcattcttttttatatcagcccagatggttctaatatgcagccagtgaaaacaactgctcttgtttaataagttggcattctggcttatggcttttaatgacttgtgattttgctttctgtgttatagtaacttgtaaggtaactttccatattatagtaacttttggggtaattttcttatgagtttgacccttcaacatctatcctctaatacgctgatattctaggaatgctgaagtccagtcctgcctgataagttccccactgccacagcattccctgaggcctctagggctgcactctgtgtctggcatcctcaagacatgagtgactatttaagtttacatttaaattccttaaaattaaataaaatgtaaaattcagctactcagtcacactagccacatttcaggtactcattagctacaaatggctagtgagaactgtgtgggacagcaaagatgtggaatatttcatcattgcagaaatttctacaggacagcactgcgctatagctaaatctcttgcagaagcccagttcactttgtctttttatccaaatatgctttcctacctctaaaatacctcacatgctttccctcctctaaaatacctttatccattctttaatatatgaaatcaccctctattttacttatgaataaaggaataaaggtatttttgaggccatcactgagagagagcagcagagtaaatgttggaatcttatatccagagtgggtggagctggctaaataagaccacagctttctcggaataactggtcattttatatctctgtggatcttccctaatatcaaatatttgtcttacctaaggcataaaatgccttgcagcaagtaaatataccataacaacaaggattagcttcactcttacaatttatttctatgctccctatgttacactctactgattgtttctcagttaaggaaaagaagtaagatacagaatttacaaattaaaatgttcattcttggaacctgtgagctgattctgtttttagtgaaaataaaacagagtcatctaccctaaaatgattaagatgagaagaatgaaatgcctcattttctatataaagagctttgaagtagaggttagaaggcctggggtttacatatttgctttaatatttatgagacacggatctaaggcaaaactcctaacttccttcaggctcattttcttaatctatgaagttaaagtaatcatgatacaggttctgcctctctctcagagttctgctgggagcacataagaccctcaatgataaatgcctttaggacttggcaccagcttggcacattttcatccacagtgatatgtagctttgagttacatattgtgcttcttcaaggtcatgcatcattattgttttcttatgatgcattacaaatatttattctaaagtggccaaacatcttgacttttttgtataaagaagggaaaccacatcttgagaacaagccagtgtaaatgttggaagtttttatccaaagtaggtaaagttgactaaaaggtaaaaaataaataaataaataaaaacagaggtacatgctgtgaaaaactaaggattaagagagtaaaagagtatagcaattgtttcttggctgcctgatccttttatctgaaaatacaaatttccacataagcctgcttaagttttaaaaagaaaagttcaccttggatcatagtagggaaagaaataaacaaacaccaagggtggtcttgagacaggtcatgagaaactctgaagctggtcgattattaatctcctagctagctacggggaaagaatgggcatggcttccatatggaatgccgagtatgtcagcctgattagagacaggtacaaggtagggaatgctgagaaataaggcagggtagatgacattcagcatctgaaggggacttgggtttcagacagaagttttgggtcagtgggagcacccaattcagaataatctagattgcagattcctgggcctcaccatagacctgtttatttactcaatggctggcagctaagaatctgtatttacaaagtaacacaggtgttacttgagtacattgaagttcaggaaccactgcagcagatgtaaaatataaatcttttttattttttagttttttaaaatttaaaaataaattttaaatgttttcctgctttataaagggataattgacaaagtttgtacatatatatctatcaaatgatagacatatatgtacaaactttgtcatatacaaaatgtcatatacaaaatgtgatattttgatagaagtataagttgtgaaatgattaccacaatcaatataattaacatctgtcaactcacattgtgtgtgtgtgatgaaaatattttgatatcttctctcttagcaaatttcaagtataaactacattattaataactgtaaccatcatactatactttgtctccagaacttatttatcttatacctgaaagtctgaattctttcaccaacatttctccatttcctctatttttcagcccctggcaatcaccattctaccactctatttctatgaattggatattttggattccacatattaatgagatcatgcattgtttatctttttgtgtctggcttatttcacttagcataatatacaataggttcatccatgttgttgcaaatgacaggatttccttgatctagagtcatattcctacaacataggagtaatgtgaaataaggggccttgcagccagtgtccaggaataaacaggaatcagtgactaaccatgattaaaaataataataatgactaagtgggtaggagatccaaattggaggagaggaagtatttaaaactgaccacataattttaagtccatataaagaggagagaatagagatacattgacacaaatggagaattgagagtggctaattttgtagaaaataagttcagtttggagtatttagatgacggcaatacttttaaacagaaacttacagaaagtaattgaaagaggagctccaaacttgcaagatacatcttggctagaacaactgacgaaatttttatgtaacaccttcaaatgaggcttctctgtgtttgtaccccattaaattgtcaaaatatatgttatttcacatacaaaggattacatgagctaaatgccaatcgcgtgggcaacccaaaatgaaaatgtttcacattcaggcatgatcttccaagctgtgtttacagtttatgtcaaagatcaaaatgtatggcctagttgataaagtgaacatatttagttatgttgctctttctacgccagatgtaaagcccttaagtgttggacaacatggttagaaactcatttatataccccagtgacctcaaatatttgataaatgcttagttgagctcaattttaaagtgatccttagagatgatacctgacaatatatggcatctctctacctctggagttaagcctgtttttgctaaatcccttgggttcaattcccaactatgctgcagtcctttgagaagctaattaagatgcctggctaatatgggaattgtggtctgaaaattaagagttagagtgtgcctcaaatcccagactgggtccgcccactgggaggtttcctaatattagatatgcccttaacacaaactgtttattcctaactatggtcttagttggaggagaattagaaaagtatatgtgaggagatctttgatggctcttacaagctatacatacttctagcaaaagtgtttttttaaaaagcttttggtcacaagtgttttagttttttttttttttttttttgcttgattctatttttagcaaaaaaagaaaaactgcattacaatcatttagcatgtacagtatctaaaacattttattgatcacagtacaaataaaaagataggtatgttcccagaggacataagttctctgatgcatctctaaatttgagagtgtacttacactcatgcaaggattaaagtacatttttattgttttctggtattttgcagtacacatttttatgcaatatattgtaaggaatagcgaatataaaacacattatgtaaggaacttattgtgtgttaaatatttgttgtatctaaatgaacatctttgcattttctaaacttgaatttatatctatattataaaaattaaattatttaaaataagtttatatttgattcctgtccttgacattctatgctgtttgtgttaattaataaattaattaaggtactcatagacatattttttattttaatataaagaaattcaaagcagattcaaatgtattttctaccaaacacttttttggacttttggattgcatcacatatgcacagaatagataaattcatttattcattattttgacaaacacttactctgcgtatactatgtcccaagaactgttccaagtgccaaggatacagcagaaaacgaagcatgatttgggtgatcaagagcttgcacttcatcctatatgtcaataattatagtagtattttacctccaaatagtaattttgattcaaatctttattataataaactcataaaactgagagattatttctagaagcagaggtcatagaagaaattctgctgcagagctgaacatagagctcaaattttaattaattccttctagctttcagtaatatggacacctaggctctcaaattagggattttcctttcttgaaattcattgtttgaggttgcaaacaagcaacctcagtgcttgtttacttaatgcaattgattgatttggcctatatgaaaaggactaccttgtatgcattgatgagaagtgtttgagcctggtcattttaattgcaaatattttataatccatgtctttataagtgtatttttctaactctgcatccttcaatgggagatctttatctttgcatccactgctcacttttttccaggtcttaggggaaaagccagagcttccagatggaggtgatgatgatgacattatagcagacataagtaacaggaaaatggctaaactatacatggtgagttcactgtaaccaaatttattgtttcaacagtactggatgtagctagggaggcctgtattgggcgggattcccgttgctgcagttgagaactctcctcattgctctccaagagcaatgtgtagatagaatcagttctttgctcttgtatgtttttttaattaagttttaatactttttgttatttttatgaaaaacaacaaatatgtgaacttattgctgtgacttcataaaattatatattgttgctgtactagtttgcaacgatcttttgatatataatactcaatacaatgtttcctttatggagtaaaaatattttatcagctttttcttataaattcttgataagaatgtaaagtcttcaccctatttaaaacattgtctttagccataatgaaggagttctttgttacaggagggctgagctaccaaatgaaacagctggagggaaacagggtaaaaacagttctgttccaggcattaacctacctacttccatatcagctctatagcacatgattaggagcatgactttgcacaggacataaccactctgggtctaagtattcttatgcacacacaacaaagaaagtaggttccttccaactctatagttttttttattctttgtttgtttgttttttctgttgagggtaacaaaaactgcaagacactccagttaaggaggttgctacagtggtattcttccagtgttccctccccttgcaactttctaagcgtgtgatttggagcagatcgtaaatctccatgcagaatttagtagttttctcatctgtaacagaaagaaactatatttgctgctctttaagggatttttggctccgaaactctgtgattttacatgaagaccaaattaataacttgtttagcgtaatttccttttcataatgaataagtggattttttttcttctagatgcaaaaggaaatatggttaccatttctgctaaatactggtaattttaatatgagccatacagaaagtgttagctaaatattttgtgactgcttttaaaaattactatttctaaaactcattttcaacagcctaacagatatcttttatttcacatcatcaaccaaaactgttctccctcctggacagcattatgaactaaagaagtatttttaaatgggaaaatattcatcctgagtcatagcttcctctagtggagctatgctgtattacatggatataaagtataaagttcctttgaaaataattcgggtttcttaacaaggctggcaagcaaaatcacctggggcattttcaaaactacagaattcagactccaccctggtcctgcaaaactccactaatctagggagggctctggaatctgtataataggtaactaaactgtagcatacaagctggccattgaaaaccagtaaatcctaacctgcacatgaatatcactttcaattttgtaagaccacttaaaaatttgttttaatagtctgtagtcatttctaaatgtgacagaagaaatttactttgataatttatacaaagtttacttaaattgcaggacctatgttgaaaaaatctttgtgcataaactatatcaatatcctccttaacaaagcgactggtatatggtagacagtaaatgttgactgagtgattgtttaaacttcatcttgtgtgtatgtaatgattttaagattattacctacttgaaaagattactctaaaatgtacaagaaataatcatggaaagttaattacatgatgcttagtacataagagcatctgaatagacctcagccattattattatcactattcttttctgatgttttaggcacagtgtcaaaacttaactttttatttgtagttcctttaccccaaaggactttcaaaaaaattagagtataattagtcttgtggattcttttcattttctttgaaacagttttattgagatataatttatacaccataaaattcttgcatttaaagtgtacaattcaatgctttttatttgatgacatttaccgagttgtacaaccattaccataatctaattatagaacatccttatcatccccaaatgaaaacatggaggtcatggtttttatattaggtttcagatgcaagtggctccatgagagtgactgtggtggcagaagaaaaccccttctcaatggcaatgctgctgtctgaagaatgctttattttggaccacggggctgccaaacaaattttcgtatggaaaggtaaaaaattccattgacgatgctgtatttcagatttatagatatttcctctataagggtaaataaaatatattttttgattttaaaaaaaagcccaccttttaattaagacatgatctataaatgtctcacataaaatgcagccattttcctcctaccaacatcatataccagggattatggagttaaaaaaaaagcatttgggcaatataaaaagaattgttttacaaataacgttttttcctgtattgttaaatacacttaatataccaggaaatttttgctattcttttttttttttttttttttccgtcgcccaggctggagtgcagcccgccaccacgcccagctaatttttttgtattttttgtggagatgggctttcaccgtgttagccaggatggtctcgatctcttgacctcatgatccacctgccttggcttcccaaagtgctaggattacaggcgtgagccaccgcacccggccaattttgctattctttcactgctgtatttaacttcaattataatcatgtttattatggtacacaagtatttcttaatcatagaatgtcttccttctctgaagttctttctctttaatttaccttgtattttaggtaaagatgctaatccccaagagaggaaggctgcaatgaagacagctgaagaatttctacagcaaatgaattattccaagaatacccaagtatgtgtgaaactgaactggctagaaaaaaatagaaaacattggagctcatgacatctccacgaaactcatgaaaaagtttgggtcaaagtaacgtctgtatgtgaagtgattctccacctgcctgtctgctgcaatctggtgtccctcttctttatctgcgtgggggttagaattttttagaaactgcacatcagactttccatagagctgcccattcacttcctccacagcctttaattcaagatagtaaaccacagtaggtttagctaagagcacttaagagttattattccttagagcaagttgtgcagacttggcctgaaacccagatgatatttgtcttcatcgaaatcaatttagaccctggctagttactcctttcctttccgaatctctcagcctcatctactctcctcatttttatgtccctgcacaaggaacacaatgagatcatttcttccaggtcacagagctcttgtgaaccttatgtagaaagacaaacttattttactgcaggggtaacatattaaagaacttgattcttctctcaaatattcaaattcagcggcaattactttagttgtgagaaaaagcaattttggattatatgagcttgatagctaaaccaggataattttccatttccttacttttgtctccactgccagattcatattttcccttaatttcttattttcctgtttactattattattattttaaatttcagattcaagttcttccagaaggaggtgaaacaccaatcttcaaacagttttttaaggactggagagataaagatcagagtgatggcttcgggaaagtttatgtcacagagaaagtggctcaaataaaacaaattccctttgatgcctcaaaattacacagttctccgcagatggcagcccagcacaatatggtggatgatggttctggcaaagtggaggtatttacctgtttttgtttttatcaagcccattaatgccagtgtatgtagggggagggtgggggagatcacttgaggacaggagttcgagatcagcctggccaacatggtgaaaccccacctctactcaaaatacaaaaattagccaggtgtgatggagctcgcccatagtcctagctacttggtaggctgaggcatgagaatcgcgtgagcctgggaggtggaggctgcagtgagccaagatcataacactgcactccagcctgggtgacagagtgagaaatgtgtgtatacacacacacacacacacacacataaatgtgtatatatacacatatatctgtgtgtatatatacatatatatttataaatgtatatctaaatatatttatacatatttaatggctctccacagccttcctgagaagatccatcttcagctggacccttgaccctttccgtcatcttggcttcacccttccactgccttgaggactgacttcccctctgccatctagctaatgttcctacgcctccttggcaactcagttaaatcacaagccataccttttctgagaaggcttccctcagcgctgaagtggcctttctctgtgctcaacctctagcgatacttctcacataatttatcatatacctaccacagagttgttcatttactgccagatttctcctagagctctcatcgattccttgaggacaggaatgaaatatttcatctctatattcctagggcttactacaattcttggaccaaagtatatggtcaagaaattagggaaataatttttcctcttttcaaagacgtgaagcgtgaatctaagcggcatgggtgttggagagtgggaagtgccaagggagaaggtcacaaatgtccctcatggctgttgtcagaggggtattgacttctgggtctgcatctgtctcctgctcagacattcctgccagagctcagccctcctggcaaacttggtccccagcaccagctgtgtcctggctgcagccttctcctgtgccatcctagggctgctgaaatctgggggctctctctcggatcttgtgctctctctaggatctaaggcttctgctcactaggatagtatggggtggcctctctctagaagcactgcactgttcctgtccacttgcttatcttcagatttcaaagcaaagagtctgcccttcccaactgagaacttaggcaagtgtgcgcgcgtgtgtgtgtgtgtgtgtgtgtgtgtgtgtgtgtttgcttgcatgtacacacacagtgcctggcagcctctccttcgtttgttactctcctgtttcatctacaattctcatctctccaagttggagggtgtttaatctgtgctgaagatgaggaggcagaatgaaagtggttctgcctgcttttctcccagcatcacatttcggtcttattcctggatggcaccttttaaaaacagaagtcatattattggcatggtcttagtctgttcaggctactataacaaaagtaccatagattgggggtttaagcagaaacatgtatttctcaccagtctggaggctggggagtctaagctcaaggttttgatgggctcagtgtttggtggaggatccactttcaggttcatagactttttgctgcatcctcacatggtggaaaaggagctagagagctttctgattataagggcactaatttcactcatgaaggctccagcctcatgacctaattacctcccaaaggtcccacctcctaataccatcacactggaggttaggatttcaacatacattgtggagggactcaaacattcagtgtgttgtagcatttttagtatttggtcacagtctatcaagttttgcctgggaaaataatagtccgctatcttaaagcacagggaaaaaaatatatatatatgttatttcataattgaagaaaaaaattaactataaaatagatatatatttctgagctgaatcttgcagttttttattccactggagtgtcatgttatttccactagtagatgaaacaataagtatttattaatcaatgggctcggaactgagcttaatactgtagaggaagcaaaagacacataaaagtagttaaaatgtcaataaattggcaaatcgataacaatttctttgcttgatttgtaaactagttaataaataatttaaaagttgtttaataatggatttgaaccaaaaattatttaaagcttatgagaaatattattagatcaagaaaattgtaatttgttgtatatattccattccttccagatttggcgtgtagaaaacaatggtaggatccaagttgaccaaaactcatatggtgaattctatggtggtgactgctacatcatactctacacctatcccagaggacagattatctacacgtggtgagtttatacgggtaaagatctcgagttccacaggagccagattttgctccaaagtattaaattctatgcattatggggtagaataatcctataatcatcccagtgagatttgtatagcatgcatatagtattttctttttacatgattttgactatgttttgcagttgccatccacaggcagcaggagtcacataaagatcatgctatctagtctaggcaaaaagttttgatatcctaaaccagtgatgttctcctagtggatatgtagttgaatatctcatcttgtatgcaggttaacactgcaacagcaagtgtcaggtaccatggtttcttatggttaaaattcacagaggtccatcctaattggaactgcaaagttgcaatatggcaaaacctgtaggagatacaatttgtgattccactgatacctcaacttgatgcaattcttattcttgtttccattaaattcacaagaataatggaaaaaatatgcaactgtgttttcatattacatggttttgcatgatgatttaattgaagtctaaatttgccaatgccctgctcaaggaggaaatgatcaaatgtccaaccaagtaatttatgtgcatacaccatgctaggatatgtcaagggatagggattctgcaacaaattatataatgtgaaattctctaactttttattaagtgaaatcaggtaaaaatagaatattgctaagacggctggaaaaaagaaaataattcttaaaaaagatcttcaagcagagaaatgtgggctgtgggcgtaaggtacaaaggcagggcagacgcctacctttgcctacatagtgataacaacctataataggtatatagaatatagatgcattcagtcctctgctgatatggtgacatttctttttggtgaacctcacaccgagacagtcacatgcatccccatagtctggtcatccacactgcccagtgccttgagcccagtcaagttcaggagatgggatgacaccaaaagagtggtctgggaactcggaggtatcaatatcacctgggagcttcttagatatgtagactctcaggccccacctttgacccacaaaggcagaacctgcattttagcaaggacctcaagtaattcatatgcactttaatgattgacaggcactgcttcaggcagtggtttagaacactgactgcatattggaataacctggacaatttctcataaatccaaatgctgtcacccacaccaaataaatcaaaatctcagctggggggaatcctgagattctaatctataccaccacatcggtgtgaaccaccaccgcacccagaacactctgacgccacagtcaatccatatgctgtcctagacgaatgcatttagctatttagctctgcgattaacatgtcgtcttaatagcaaccattctgtgagcagcatgtttgcactggcaaagtgccagatgtttccttgtattttttatttctttccaaaaagagtggagcaggggagattagacagattaagtaatttaactcaaagtcacagctgttgtaactggtaaagcaacattttaaatcttaatctattggtctctttaaggcctgagtatatcaataccaggtagttatgtccttattttgcaatttccttttctaaaattttaattcagaaaagtgtttgtgcaacaaaatcatggcatttatagggataaattaattattcccagttaacttttcttttgcattttatttcatggtcttcctcttaattctcttttgaatatgaaaaacataattgattgtggtacttacattaaacgaaaaaagactaagcaagtaatgcaaaagagtgttttgaggaattaacagtttgcaacccatataaatgcctatgtggacatattaaaatagaataaatcaggttacaaattttaaatgctaaatttgagttttaaatagtagctatttcttgtatcatttgaaagtgtttattgagcactttatgtgccaagcattgtactaatttctggagatacagtggtggaaagaaaactataacccgtgccttcaggagcttatacgtaatgagaaacagatgattaacaggtgtttttagtgcaatataaaggattttatgtaagatcaagttgagtgatctttggataattatatacagaccctccaccatacccctaggctattggttaaatatttgtaccctctagaactcatgttgaaacttaattttcagtgtggaagtattgggagatggggcatttaagaggtgatagctctcatgaatggatgagttcattaatggatgaatgggttatcatgagaatggggccagtggctttataagaagagaaagaagcctgagctggcatactcaaccccctcactgtgtgatgacctgcactgcctcaggagtctgcagagtctttgccagcaagaaaaccctcaccagatgtgatctcttgactttggacttctcaccctccataactgtaaaaataagttccttttccttataaattaccctgtttcaggtattctgttataagcaacagaaaatgaactaagacaggctcctagaaaaagtgacattgaagtgggagatagacaggcatgcaaatagagaagttgatccaagaaatgcaggaaaatagtgtgctccaatctactcgtcatagagtatggctgaagaacatttagggaacaaaagataaaacgagggaaattagaaggagccaaattgcaaatggcctcataaaccatgctgaagaggacaaactttatttttaagacattgggggtcactcaaagagtttgtatggggtgttatatgattggttttcattttattttattttattttattttattttattttattttattttattttattttattttattttagacaaagtctcactctgttgcccaggctggagtacagtggtgccactcttggctcattgcaacctccgcctcccgggttcaagctattctcctgcctcagcctcccgagtacctgggattagaggcgcacaccacatgccctgctaattttttgtatttttagtagagatagtatttcaccatgttggccaggctggtcttgcactcctgacctcaagtggtccacctgccttggcctcctaaagtgttgagattacaggcatgagccactgcacctggcctgttttttattttagataaattattctgattgacatgtacagaatggattggtggaggaaggctagcaacaggaagaccactgggaatgtgttgcaataatccagctgaatgatgtggcctgaatttagtgtagtgacaacagggaaggaaagaatgaaacaaatttgcaaggtgttaaggtattggcaccagaaaaactgttaatggggaatggagaagacaaagttgaggatgacccctgggtttctggtctgagcataaatgggtagtgttttatttcctgagattaaaaatcttaagaagacaggtttggcccacactgtaaaaaaatgcaaaaggaaaaagagaaagagaaggcaccacatcggtaaaagttactgtctttggaatgcggctggaggggatggtcatttagctttcttctttccaatttgaaatgttcaacatttccatcataagaatgtatatattggggggatatcaagaatgtaagttagatacttcagagtccttgtgagtcttcaccatttgaaatcatggatgtgaagtatgtaagtttgttagtgttgtatggtttgtggaacttcaaaagcttccataaagatagtgaagaggctttcaaaaaataagcagttccgttgaagactggcttttaaattaaacaactttccagtttatgtgataatttcaatacagggacataaacaggttaagtccaagaggcagagttaaaggtgagaaactagaattaaatcaattatgaaatcacttgtatgctgaaatgacaggacaaaaaaaaaattcagcaatgatattttatctgaaataacaggtaattaaaattgaacagatgacaatgatgaatctcttgaagtagtaactcccatttttacacagcactcatctttaatgagcaacaaccaccacaggtttataaagaaaaaatatgtcaaagtagattgctttttttgttcagtatacaatttcagaattagaaacaaagagtgactgcgttatttcttgattggagtggaatacttgaatctgtgtggatggcagtttggtacttgggatccagaagagaggtttaagatgagtagagaagtatttgttcagggtgtcatgaggcagaacttagtgatgttttgcaggtttgctagttgaaatactccaaaaaaataaaaggagcaaaatgaagacaaaagttaggtaatattgtctgttcggtggttggatttcttccctccagaataaaagcaaaatggaaagcagacatttttaacagctggaagcgagaactcaggaaaccacagatgtgacaaagaaacaatgcatgataacagaccctgcggtggcccatcatcatgcagctctgtgtaactcctcaccttgtgcttccagtgcacacagatgtgttggctagcattataggctcttgggaaatgtaggctattgacattaaaacactacgtttttagtagttcctttattagggaaagcattttttattttcttatcaacatttgtgtgcatgttttttttttttttgcacccctctgtagaacatttttacatcaaccatttgccttttctggtccagtggaaaattctgtgataagatacacaccctgttcccagtgttttgggcggaggggggtgggtattgcccaacgtggcaggttattttaatctgttccgagtatggaacagtttactgtcaaagttttagaagaaaagatatattaggattggtgcaaaagtaattgtaggtaggccgggcatggtggctcacgcctgtaatcccagcactttgggaggccgaggcaggtggatcacctgaggtcaggagtttgagaccagcctgaccaacatggagaaatcccgtctctactaaaaatacaaaattagccgggcatagtggtgtatgcctgtagtcccagctactcgggaggctgaggcaggagaatcacttgaacccaggaggcggagactgtggtgagcctagatcacgccattgcactccagcctgggcaacaagagcgaaactccatctccaaaaaaaaaaaaaaagtaattgcggcttttgccattacttttaatagcaaaaacagcaattacttttgcaccaatctaatagttaactttcaaagtctaaatccaagtttagtattcctgctgctaagctaaccactagtcaaatagaaatgggaaacctggctaaaaataaataatgctcaatgaatgcttttaccatgtttggggctttgttttgtttttttactgtcttctctacaagctcatcaaacagcagatctcccacaagttgctttacaggttaaggtgacacagagttaacagccacaagccaccctagaaagagaggctacgaatgaactggacatgttgattgacccttatctgagtgttggaagtttagcctcttgtatagccttattaataattccttatggtgggaagggtgcagtgcctcacccctttaatcctagcactttgggaggccgaggcgggtggatcacctgaggtcaggagtttgagaccagcctgaccaacgtggtgaaaccccgtctctactaaaaatacaaaaattagcacctgtaatcccagctactcaggaggctgaggcaggagaattgcttgaacctgggaggtggagtttgcagtgagccaagttcacgccactgccctccagcctgggtgatgagtgagactctgtctcaaataataataataataataataaataattccttatggaattgctaagatgacaaaatgggacctctccattgtctacttctcattattattttcttgatttttctgggttacagacgtttggttcatgctcaccaaatattcatagaaagacaaaatgctggctgggcgcggtggctcatgcctgtaatcctagcactttgggaggccgaggtgggcagatcatgaggtcaggagtttgaaaccagcctggccaacatagtgacacccccatctctactaaaaatacaaaaaattagcccggtgtggtggcaggcgcctgtaatcccaggtacttgggaggctgaggcaggagaatcgcttgaagccgggaggtggaggttgcagtgagccaagaccacaccattgcactccagcccgggcgacagtgcaggactccgtctcaaaaaaaaaaaaaaaaaaaaaaaaaaaaaaaggcaagaaagacaaaatgcccctaacattcaacctaataagtttggctcgtattttcatctcagatggattatttttcactgtagaggtgttttctaaaaagcaggcagctccaacttaaaatcaggtgaacccaattacttagctaaattatgtaagaagcaaaagctcaatttctttaacatggagataaaaatgcctaccatatacagttctagacaacacataggacaattaaatgttagataccttgacaaaaacaatagcttaacagcttgtatcatgttaaaacagttcgcttcttcttgatctttcataataacttgtctctgcttgcaatgcctacatgtgacgatcttaaaacttaaaggcaagctaattcgtttcactttcattcctctaggcaaggagcaaatgccacacgagatgagctgacaacatctgcgttcctgactgttcagttggatcggtcccttggaggacaggctgtgcaggttgggatatttttacccccaaaactcacacaagttaaagtcttgctagctcaatggatagctatagctccctcccaagttgggatagaaatttgacattttcttgatatgaactgtgttttcattttgaaattcaaatattcctactctcatttcaaattagttatctcagattctggaaaggaggtagcaaacaaaaacaacaaaaatctatcaacaggtgtaagattccaaaagaatcttcccaatagaatcacaccctatgtcaatgatagcctcttgacattaaaacggttttatctgtattactgtttccagctgttgttcaacagatacagtaggcagaataatgcccccaaggtgttcatgtcctaatcctcaggacctgtgagtgtgatatgttacaaagcaaaggagaattaaggtcggagatggagttatggttgttcatcagcagatcttaaactagggagattatctgggattactgggtgggcctagcgtaatcaccagggtccttgtaagtaaaacagaagccagacagagtcagagggatgcagcatgggaaagactcaaccagcgattgctagctttgaggatagaaggaacaattacatattatgtagttgcaaattgctagaacgaggatatcgaacattcccaacacaaagaaatgataaatatttgagatgatgttatgctagttaccctaatttgatcactatacattgtatgtaccccatgaatatctacaattattattaatcaattaaaaaataaaattaaaaaaaaagaaggtggaagagagtccccagcaaaggaatatgggcaacctctagaagccagaaaaagcaaggaatagattgattcctagagcctctggaaaggactatagccctgcaatagcttgattttagccctgtgactaaattgttattccagattttagcccagttactaaattagccccataactcatttcagacttatgacctccaaaactgtaagatgataaatttgtgttgttttaagccactaaatcatagtaatttgttacagcaacaatgagaaataaatacaacagtgcagaacaagcacagattaacaattcgaattaataggttaaaaaaagatgcattttcttacactctcaaatcgtaaacatgcgtaagttatgttttgcacaagtaaacagaaataaatcttgataaaatagcatgggtccttatatttcccttttaggtaccagaatctttactgaaacaaagtccaacacccaaaagtgagggaggaagtggtggagagggagaaaggatgaacagaaatgggagggacaaagagaaaagacagggagaaaggggaaagaaaagggataggaggagaggagagggaagagaagagagggaaatcatggaggaagaaatgagacaagtaaggaggagaggagggggaagagaagagagggaaatcatggaggaagaaatgagacaagtaagaaggaggagagaagaggaagggcaagggagaggatagtgtgagagggaggagagattgagagggaggagagatgtatttttttacttgggtatttctgaaataaaaaattacttgtcgagaatgactgaatccaaattcaaaatgaaaatttcatgtaattataaatgagtcaactttttagtatatctatctatctaacttatctatcttagctatctctatctagagacagattaagatagagaaaaagggacaggaagagataatatgctgttttatttattataaaactttaaatgttatacaatatcagacgatatcaatgtctagttctagatctcctcactgtgtctaagagactgctgtttctagcctggttcaatcttctgtactctcctaagttcaactgctcctccttttatatttatggtggagtatctgctacttgtttcaggacgcttattagttaccatgaaaaagtttttgggtctttgttttttagattcccttactgtataactgacatacagacttcaagaagaccctattttcctctagtgtgccccaatgtgtccgtctgctttctcgttcattctgtgagagagtactttcttgttcctttttcctacagctagctggaactatctctctccctctctctcattccctgtgtcttcctagctggagctgcacacactgctgcctgttttctgcctgcctgttgtctttggccagtttctgagaagccatctgctcccatctggtgggaaaagcatcttacagattagagttcaaactgaaagcaggtgcttacttggccaatgcagtgatgtttctgatacagcagcattaaacactccctttacatggttgtgcctgtttaacttcctcattcctgatgtcaagggagctaagactctatatggtacaaaagggtttttctgtcttgttttcaaatctttgtaagtgtgtaattgcttattttaatgtaataattaaatagagagaggcaagttagacacttcagaacataaagtataagatgtgaaggctgaagttggtcttccagctggtctcctttccatcttgatacaagttagtagatacaaaaatcaagttaaatctaaatttaaaggcgcatgttaactttttaaaaataagttaacttgctacttttaatcaataaattaatgaaatgactgaattctttaaatgcactcaattctatggaatttagttgatctttaaggtattacttaccaaactattaaaaaactatgaagacatgcattgtcttacatatttcatatttcatagtactatatttgatgcactcgattaatgagttaccatgaattgttagccggttgaatcctaaattgacaacaaaatggtaatttttagtttaatcactagatggcagtagcttacaataatgcatgaaaaaactaaagtattgcggttttcaacgctcctttgtagaatatattaaccatattgaacatattttaatcagccttttttctttcttattctcctttgacagtaagggatgggccttaatcagtgtttctctttctctcatgttggcaattaaagttttctccatgttatatgaaatgctaagctaacagttttaggtatttgtgagactataactgacaaaacgtttccataatttgctgctcacttatttgaatgcctactaattgaaatatatttatgaagtcaattattttcaatgcctttcggcctccctatatgcaggtatgtatatgcatgtaatgagtacatgcatcagcattcccattcacctggcttctagaaaaagacaaaccaggggaagtgagacagttcaattttagcacagggcagaacaaatgaaaacaatgggagactgacatgaaatttgaactctttatgtaaatgcatcaatagtttgtgtgagaaataggaaattctaatccaatatttggggctaataaataaaatcaagaaaataatttccctttttttttcaatttcctcatcctgaaaagtctttatattgtattttttaaagtttcttatattgagcatatctactattacatttctataggtaagttaaaaagtagaaaacatattctgtttatttttgcccatttttagtgcttgcatagcaatctttgtgtgtgtgtgtaatttttttattttacaaatacagagatatagaaataatgggtatgatttggggtcatcttatgttgtgaagcatttgaatgcacatctcttaaccttctgaaccagatccaaaacacgtgagattctagtacctctgtaaatatctgtaagtgttactggtgcccttgaaagaagagtgattttcacataaggtcgcagacaccagcaccttttctctttcggagatgtagatgaacagacttacatcttcatacttttcaaaaacagaaagtattggagcatggtgatgtttcccctgacaagaaactactcatggacaccgtgcctgcgataacaaaagattctcaagtcaacagggaaaattaattatcattaacctatatgttctgttaatcatcattcctcctgctcttgactttttattttttgttttattttcaaaaagacaacataagaacacatttggaactaaaaccttctttcacagcactcttaattatatttcttttattccccctctcccccatcagatccgagtctcccaaggcaaagagcctgttcacctactgagtttgttcaaagacaaaccgctcattatttacaagaatggaacatcaaagaaaggaggtcaggcacctgctccccctacacgcctctttcaagtccggagaaacctggcatctatcaccagaattgtggaggtaatgtcatgcattccataaaacatgccctagttatggacttcccaatggacctgagccatcagcaaatattagactttaaaaacttggcaaataaactcccttcattcctataattaatccactgttcaaaattttaaaaacatttaaagcaggagagttgagtaaaaagtaaaactccagataccaggcctttcgcaattttcaattacattgaacccaaacagataaatttttaagaatactgtcacaaattagctgtcaaaagcgtgaggctgcttaagctccatcttgaaaggccttaggtggatagatcatgggtgatggtcaggtgactgatcacactggagacatttgagagggaaggccctcgtttgcccaagtgtaacaaatatgggaggcatgtcccaccacactggaccagaaccataactgaactggccccatgagctgtttctgacagcagctgggatcaaaccccatgccatggtgccataagataagaagacctccaggtatagacaaggccagcctgcccaggtttttaaatggctaagtgctttcaccttaggacaatcctgtcaccccagtcaccattgaaatccaggtcttccacatcacccttacgctgcctggcatgctctgcatatcaagcctggagctgtccctcaaacttgccctccatacaagtcaatcagcagaccccttaaacttgggttggtcatctcatccctccacctgcaacttcttctctaagcctccctctccctgcacctgatttctctacgactgtcctctgaggacagattccctggcagccctctcaagtggaacttgtgttttcccaagacccactcaccatggcctcagggatggggctggacaagttccctccctgctcacccttacctctttgattttatcttgcctctctcttttatatcagactttccgtcctctagacctcttgtgctttcatagactgaactgccagtcctcctcttctttgatgacttcagccattatctcactatttccatctctccggcttctctcttccagcagtcttttccttgaccgcatttcatctcacactcacatggtcctatactaaattttgccatttgcaataactatagctcctcagaaatctgtttcagtcatctaatctctgacaactctctcctgtcctttggctcctttactccagaatgcacattctggcaattctccaggcctatagctgaatccatgaacccgctgcctccttcacaccccatgcttcatgtcctcctttctccccagatccccagcacccccttctctctactgataactttgattcagagttcacagagaagataaatcaggcataaatctccttatctactcccctgcaactttatcaatttgtctgcatctgtgtatatattctctttccctcctcttttatgaaataaatatcaaatttttatttattttttaagttaatattttatattaggaatttccatatgatgaagtgtcttgtaagtgaatattatatactatatgtattatatatatactattatccataaattagcaataaataatatatttgtgtacagtgatatatcaataaataatttattaaatgtttattacatagactattgctcctatctaaggcccaattcctcccccacccatctggccaccaacttctgtccggatccttccctcttttgctttcctaaggaatctcctggatttctgtctttcccgtgcatttattccatttctatttcatcatgattgcaggcagtaatctcctttcattctgtattatcaatttatttttctatctggaatcattcactttgaactacaaagatggctgtaacagaaacctcctgtcatttctttaaaaactgtgtcttgaccttgaccatgaccttctccagctactgcatcatttctctgtccttcttaagagcacatatcattgaaaggtttgtcttgagtgttttcactcactcaccatctctactttttaaagccagttctctctaaagccacctcaatcaggtatccatcccactagtccactgaaatggtttttatctagtttgccagtgacctgccacatgccacaaacaaaggtcacttttctgatctcatttttctcaacctcccactagcatttgccagtcagcctttccagttttattgagcaattcttttttcactaggtgaatgtatccccacacttacaatggtttcttcctaatctatcggccactcctctcgggctagtttgctgcgttttcctcttctgtttgacctctaagttcttgagcgctccaagtctcggccttggccccttcactgtggtctcattcagtcatatggtttaaatgctaccatatgtattgatctcatccagaaccttctgtgcacggattcttctgtgtttaattatgactatttttttgacatttaaaaactatcaaaatgacatttaagcatacattatctacgggcattctcagttgatttcagatgggaaagtcaaccaaaatgcaccattgttacattctgatctcttccccagtggacattcctttgtgagacctcatcagctgctttctgtgcatctctttattttcttgcagcctctcaaaccagctttcacattcccaacctctctgaaatgcaccagtcaagatcattttacaggtctttctgtcttcatctcccggcaggctaaggctttataaagattctgttttagatctcatttcctgatctcacaccagtctgggcacaggtctcttgtcagcttctatccatcatccgggctctttcctctgtacccataatgagatgtttgtattagaaattggaagccctggaagccagacttggttcctgtaattctccataatcacatctgatagattcctttgagcttgttctgtgaggcctcattcctgctgggagaggactttaactattttcctgaatgttcccaattcctggacattcctttaaaacttccaacagccattccttccacctctagtgttctctccttcaacaggctcctgacaaacctggtgaaattcaactctccacatcatggctgccttcatcctggcagttcagtgtggttggccaagcagcaccatttggcacagcaaatcacccctgccttcttgaagcattttcctcacttggcctcaagatcactttacgctcttgttttcctcctccgtctcagctgctccccctcagtcttgcttactggttcttcttcctctttctggaatcacacatcacacttgtttgacaattatacagaaagtcataccagtgacatagtagcacagtcatatggtcagacagttctcacagagacagacacagagtcacaaatccacaagtgacacagaccgaagtgctcctactctagggtttaaaataccatagtggtgtcccagagcggctctgaattaatttcctgggatagggcagaaggcgatgtatggtttgccacagtcacagcttctgggacatgtttattgagggagcagcaatgaatttgaatcattgttttatttttcttcatattccaggttgatgttgatgcaaattcactgaattctaacgatgtttttgtcctgaaactgccacaaaatagtggctacatctgggtaggaaaaggtgctagccaggaggaggagaaaggagcagagtatgtagcaagtgtcctaaagtgcaaaaccttaaggatccaagaaggcgaggagccaggtgtgtgctctggggccaagggcactaactagaatttatactgatacgattgctaatcatctttttttcaccaaaaagtcactttctaatggcttataagggttaacaatctctccattagttgcagaggtgggtgggtgatggtacctgatttctttaagtaatttctcaacactgaaatcaaggtgagataatatttgttcatataaagcgacagcaagcatatgtccctgaaaatgcactggataactgagtgtgttttccacagaggagttctggaattcccttggagggaaaaaagactaccagacctcaccactactggaaacccaggctgaagaccatccacctcggctttacggctgctctaacaaaactggaagatttgttgtaagtgtccttaaaaatagtgcgatagggctggttgcggtggctcatgcctgtaatcccagcactttgggaggccgaggcaggcagatcacctgaggtcaggagttcgagaccagcctgaccaacatgtagaaaccgtctctactaaaaatataaaaattagctggatgtggtggtgcacacttgtaattcaagctactcgggaggcttgaggcaggagaatcacttgaacccaggaggcggaggttgcagtgagccaaggtcgcgccactccactccactccagcctgggcaacaagagcaaaactccgttaaaaaaaaaaaaaaaaaagggccgggcgcggtggctcatgcctgtaatcccagcactttgggaagctgagacgggtgtatcacgagatcaaggagttccagaccagcctggccaatatggtgaaaccccctctctactaaaaatacaaaaattagtcaggcatggtggtgggtgcctgtagtcccagctacttgggaggctgagacaggagaatctcttgaacccaggaggcggaggttgcagtgagccaagatcgtgccactggcaccactgtgttccagcctgggcaacagagtgagactccatctcaaaaaaaacacaaaaaacaaaaaacagtgagatagaacctaacaacgccgggaagggcattcccatgtggctctgacaccttcagacatgctactgttctgaatctcagtttcagcctgcctacaaaccacggtgacaacctttgctctacacagggtattttttttaaacttttattttaagttcaggggtacatgtgcaggttcgttacataggtaaacttgtgttgtgggagtttgttgtacagattatttcatcacccaggtattaagcctagtatccattagttatttttcctgatcgtctccctcatcccaccttccacctttcgataggcccccagtgtgtgttgttcctctctatgtgtccgtgtgttctcatcatttaggtcccacttataagtgagaacctgcagtatttggttttctgttccttacacagggtattttaaggattaatgatataattaatgtgaaagcattaatgttgtgatgtcctatatagattaagctgttcttaaaagtactagctactttacacctgtgtgagcatgcagttgctgtatgaatatatatgtggctagatgtgttaatttaataatttggcattttctgtgggcagcaatcattatttctgatcaaactatgtaaattttacatgtcaatttcccagcggagtaaaaattttcaccatattgactgaattaaaaatattatggaaatattatgatcattgggcaaaaatcacagaaagctatatatgcagttacaaattaactgatatcaacaggaatgttttatttcatagtcatttacaagctttgacttccagtccagtcagaagtaaaattagaagtatgtgtatgcatgtcttagttcaagctcctatcacaaaaataccattgactgtgtggtttaaaccacaaacatttatttttcatggttctgaaggctgagaagtccaagattaaggcaacagcagatctgatgtctggtgagggaccactgtctagccttcttgtgtcctcacatggccaagagagcaagctctagtcgtgttctttccttataaagacagacactaagcaggggcactgtaccctcatggcctcatctgaacctaattacctcccaaaggccccacctcctactaccatgccattggaggctaggggtttagcataggaattctggaggcaaacaaacatccaatacaaaagaatacaggagtgattttacactaggctctgaaatatcatcctgaaccacagcctctcacctaaatttcaaaaaaaaaagttatactttctctgtttgacgtgctaagtttttggtaaatttttcatttaaagaatgaattcttcttttatataaaatttgatccacagattttggtcaacatgccctagtgaataaatgcaaacttcatttttcaacacaggaaagaaaatttcccacgtattttgtcagatattttgattactagaaataaaattatttgagatgaagtggttcaagtctcccttgaaggttataaatgatttgacctacaagttaaagatttaaacagtgcattgagataaatatttggttgctgtataccacaatttgctcacctactttacaggaaatccctgaacttgctatattttatagatttgtcatcagaaaaatctgctgttttattgttttgacttgatattgcatccaagcaacttatttttcagcatatgctcctataatttcttattagaattatttattaacattgctataaattagttgtttgtttccaagaaaaatgtattttacaaaaataagtacctaggctttgttctcagtgtgtttaaagaaaaaagatctgttagtctttggctttttgttatgcgtatatattagcctttaagagaaatatacatttcctctgcaccaactcattttcttgtttgatatttggaaccccttctgctccctttatagtttaaggcaaaggattgttgctaacaaatctttgatcttataattactatcagaaagtaggctttacacgtgtagattcctacaaggcagctacaaggcagcagagcttattaactaaaagcacagcttttagaaccaatctgcccatgtgctgtcacttatctggtggtagtacttgctggctgtgtgactttaggctggttactgagcctgtctgggctgtagttgtctcaactctaaaatggtggtaatcttagtacctacttcatagagctgtgaatattaacttagctgttgcatataaaacattagaacagtgctgacgtcaagttaagtgctaaagtttttctttttaaaatgattatgtgattggtgtatgtcctctaaaaagataatataaacaaatcctttgccttctaaatggtcaaggttttttgttttgtttattttgtataacaatctcaaaatctcatcagattagaacaaacatgaattgtcatgctcagatgtctgcaggctgccaggaactaggtttatctatgctgggcgcatgttttgagtttatacatatttttccagtgacaaagtcaaggacacaaaaaggcccttgctgagtcacctttgctaatatgacatggccaacgccccagtcagctccatagcaccgcaaagtcacatgccagagggagtgaataaagaatggggaaccataatccaaactcctgcgtaaggatcaggggggttttcactcagaattctctaaaaatactgaactttagattaatacatgcccattggtatgtattaccaatgggtggatgaagctaacccttccattaccctttaatgctaactataatttaacacaatttaacccattaaaaataaaaaaaattttgtacatgcaaatattatgttataatgtcatcttattgaaattttttgatttattaaaatgactaggcctattgactttttctctctctctctttttttttttttttttctgagacggagtctcattctgttgcccaggctggagtgcaatggcacggtcttgactcactgcaacctccacctcccaggttcaagcaattctcctacatcagcctcccaagtagctggaactacaggcacctgccaccacacctggctaatgtttgtatttttagtagagacagagtttcaccatgttggccaggctggtcttgaactcctgacctcgtgatccacccaactcagcctcccaaagtgctgggattacaggcatgagccaccacgcccagccctattgactttttaaaagtaatcctaacctacaaaatgaaagataatttaatactcagaccataaactcaaatgtttttaggaactagataggcaacataaatctgtgaaacaactattcataaaggactggaagtacagaggattgtgagcaaattgactatatatgtgggcattcaaatgtgtcaaccctaaggatgagatttagaaaatacgcttaaatatatagtttattgagatgcaaggcttgaggatagccacccagaaaacgctgactccaaatgaatggggtcagcattttaaagtggaggagttaaagtttcactgacaataggcagaaacagagaaattttagcaggattatgtaattttttatataagaccagtgtatactgacagtgatttgattggttacagattgctatgaatacattccaaggaagagtactttcttactctgtgaggagtggtgatatgaggggggtcttatctctggcactctttggtcttcctaattatttgcagaaaaaaagacaaaagctcgagtgcatgcctcaagactcaggccacacagccgcattcctctcaaagttcagaataatttaaggttccaccagctttatatttgacttatttaatttcacaaatgcaatgtttatattaaatactgttctggccaaataaaatactactagtttgtgatgccaaatcaatgaacaattatttaaatttttattacgtgaaaaagaagaaaaaaattaccaccaaattttattttcactatactcaaaaaaaatacagggcatttctatcctatgtattagaaaaattactgctttactttttgctcatatagctttttatacctttcagattgaagagattccaggagagttcacccaggatgatttagctgaagatgatgtcatgttactagatgcttgggaacaggtaaaactacattttgttcataagaagagaatgcatttttggttgggagatgacagaacttgatctgagaaatggtaagtctagatataaatgagcctagagatttaggctgtatttaaaaaacacacacacacatttggtaaaaaatgaaactaacacatatggcaagttgatttcttagtatgaaaataattccagagctaccatctttggctttacagttgtaggcaaaaaacttttatttttcatttatttgtaaaagttactcattcctaatttgtttataattcatttaactaacaagtgcattcgtgtgtacagtgtcatgggggtacaatgccattgaggaaaccgacatattcaaagtttcttttgaaatttgacaagaagtcatgggtagccctcccctggggaagaaacaggcagaatagttttgaatctacacagtaaaatatgttcctgttttatttatcttaattttcaaggaaattagtggtgatttgacgtgccacatctgataggtttttaacctctaaattaacggtgaaagagaaaagtaaatatattatgaactaaattatatagaacaagtgtgaaatgcttatctgaattaggcctagtcgtagagtcaagcacagagattgttccttttaagtttgttcccaattaataaaccattcagttatatcacaccctagcttctgatctacaatgaccatgtttgacttgagggcccaggctcagattcttgccaagtgaatggattacttatttctagatgagaattaaatctccaggtcaataaaacattcttgtgtatttaagaattaaagaagaattacacttccttattcagatatatatttaatttttctcatttgcagtcaactcctgtttctgtaatcatgggtactttttggaagatttcccatgccacatttcattttttaaaatcatgccttttatttacattaccatgctttcatggtttgttctgttccctgcacacaaatgtttcagcactttcagtatgaaatagaacacaatctaaatgtaagtgaccgaaattgctctgccacaagtgattttaaagtgatttcaaaaataaggtaattcaggacatttttttcagcattcaagtacccccacccacacacttgacaaggaggaggatatatacagattgtataattatatcaattttttaaaaaacacattgctatttaaatactaaacattatagcatttgtaccaacatcttatagggagggcaagctactagaggagaaaaacactaaccttaaatcaaaggttcctagagggagtctgggatcacccacagacaagctctacacgtggtctacatgtggtctcttccagccaagatccacctctaggaaatggggataatgactgtgtaagggccaagggaaaatttccccttcactgtccacaggttcacataaaaatcagttgataaagggcagattaataggagaaaaggcatacaaatatattaatgttcacaggagtcatacagaatgcaagaactaaataaatggctggatggttgatgcttttctaccattttgaagttacagaaagaatgggggattgcaggatggcaaaactggttatgggagggagagaagaggcctggctaggaaagatggtcttgttatggataaaacctcacataaagtatagatggtaaatgtttctttcagacctttaagagtgtgatactctcagttaatcttccctagatcccgaaaagggagggcctcaaagaaagtccggctgcaccactgcagattctctacagatgcagatcttcccctacaaaaggcagatttgcagggctatttctgtttgcaagtcctctgaacagccatctcgaaatatgtcaaagaagtgtattcggaggtgaaatattttggtttccttcgactgctgtcacaccctagggggtggatgaaaaaaaaaagtccacccagacaatctgtttttttttgtgaaagatcactttacaaactagaaagtaccatgtaaacataaaatatccaagtgtgaaatctgaagtgaaacaggctggatgtagatttaggtgtctcctgatgagtgtgaacactgggaaagtgatggtacctctctgggccaccacctccacgtccctaacttctgcggatattgtgaagattgaatgagcaatgtgtgtgtgaagcactttacatagggcctagcactgagtcaacatcccagaaatcatacatattgttattgtttcatttttcagatatttatttggattggcaaagatgctaatgaagttgagaaaaaagaatctctgaagtctggtaagctcaatcgatggaccattatagcagtaaccgggcaccattatgaccgagtgtctggcttgctctttgccaccatgtcttacaaaaatacatttcaaaatcaagaagtagcttagcattcctcctcaaaactaaagagtaatgggattttttgaactggagaatttccaaatgggcacaagaaaacaatatgttttgttatctaatctagaatagaattatatcaatttaatctgaaaacttaaattaatttcaacccttgttttattataagagtaaaacctccatgactgtgataagccagattttttaaacttccttttgactatgctgttctttctggcacaattttccttttactgaaacgtataacaataattatgccacaaggacaattccataaaacttggaattctttcaggcattaatgagattcacatgttgcctttcatggcagacgagagaaatcaaaaagaaattgtatttgtctacctggtcaatggaaatttattactttgatttgaagaattgtattcgaagaattttcattttcaatgtagccaatatttatttgttcttctggaaatttaattcattacttttattcgaagaattttcaatctgcagttactttagtttaacccaaactaactgaatttatatgtctttacaactttttttagccaaaatgtaccttgagacagacccttctggaagagacaagaggacaccaattgtcatcataaaacagggccatgagccacccacattcacaggctggttcctgggctgggattccagcaagtggtaaattggtatttgtaaaaagcaaacaaacattacaaggcagttatctcattgctgttttgggagaggaacgggaaaagctttttgcttatttgtcttttgaaaattaaggctgggcgcggtggctcacacctgtaatcccagcactttgagaggatgaggtaggcggatcactggggtcaggatttcgagaccagcctggccaacatggcgaaacctcgcctctactaaaaatacaaaaaaattagctgcgcgtggtggtgcacgcctgtagtccctgctacttggaaggctgagacaggaaaattgcttgaacccaggaggctgaggttgcagtgagccaggattgcgccaccacactccagcctgggcaacagagactctgtctcaaaaaaaaaaaaaaaaaaaattaacctcaaccaaacgcctattttttaatgcttagttttggcttgaaattcttcttcacctggagttttcttacgttaatacattaaaataacctgaaggaaactttcgttatgggccaatattagctcttatggaaactgatttatatcttttttatgacctttcaaaagtaaaatactatgcataatctagaaagatttgtcagataggaaattttataatgcattagccattagtcagagttgttttttaacatgccagagaaaaagttgtaatgccttggaagttattctcttttctatagattgtgttcaaaagatgtgtatacttgcaataaggtttatgttaaggtggctttaacaattggttgctattttccttctttagtcaatatgactttgatgtcattaactgctaagtgttattttctaagaggaattttatcttttttttaaccttattaaaagcctttgaaaacaca

SEQ ID NO: 643 - DNA, 9523 bp, Homo sapiens
gcatagaatgcagatgagcaaagtgagtgggagagggaagtcatttgtaacaaaaactcattatttacagatgagaaatttatattgtcagcgtaatatctgtgaggctaaacagagctggagagtatataaaagcagtgcgccttggtgcagaagtacagagcttaggacacagagcacatcaaaagttcccaaagagggcttgctctctcttcacctgctctgttctacagcacactaccagaaggtaagatgattataaaattgtaaatcctgtttggcggacagtgaagtatttttaagggatcaaaatattataaattaaaatgttgttctttcatcttagactttattactaatagtacacagagaggaactgagatggaaaaggttatatcaaatgcatttacgtgtactttaatatagcgaagccgcaaagcgagttggaaaaataattatatgcaaaaatataaaacagaaaaaaaacaaagattcaaatcaatgcacttgttataatacttaactgttatgagagttgtattttaaaataattggtaacattttgaagaataaatatttttcttggacttgatagatctgtatactactttgaacagaaggcgtcttttaaagtaagcagaaatgtgtccattagggagcctataacagaaattgctttttaccaattaaaatctctggttttccaaaagagcaaattaaataacatctttcaaatattcaaatttcagacatctatcaaaaaatcaaagtccattaaagcaactctttgtaaataaaacatagcgtacttggtgcagagaacaagtgtcatctatttggggggttttctttggatgcatctgagtgaagccatacattaataactatttactatgtattgaggataaatagtaataaaatctaaaatagctaccctctgcaataaaattttaatttgtctttttagattaggctcctagagacaaaaaacaaatttacaaagatctttgatggagtaaatgattaagtggtgtatttttccatacatactgaagacctattacataaaatgagctaaccagtttgaaaaaggatttatatggactacaatgccaacacatttggggatagaacataatgtcttcttttttaggtctaaggttaatctttctgtaagacttcctacttattattgttaccatactttcctttaaattttagtggaaatttgtagttcttacaaaactgcaggctctctttagactacctaaagaggggggaaattaactggaaattattttcttattgaataagattttaatactaaaataacataaatctctactttctcagcaattgtattcaaacaattaactctattcttttttttttcacaattcgatagactttcacaaacaaataagtgagatttttaaagccagttctttcttcagaagaagtcatttattgttggtaatattattagatacggaacgctcacttctttatgtggtttatggttgttctttcttccatcagctcctgaagtggcaggatacctcctgctctaaatcctcctcaatggaacataataggagatattgcaaaacgcttaggactttgggtggaatgaatttttttttcagtcttgtgaaagactaaaagcttttacaagaaacttttcaacagtggtataatttttaaaagaagtgcttactttaatatttaaatattcctgcaagcacggatataacaattgagagttataatcagtagatactacctaaatatatggcaaggtttccaaagtctgccaaccggttaaactgaagcatagcaaaatgtcaaattggtaatttgatgttgatgaatgaagaaaggtgaatatatcattcctattatgttcctttgtctaatcatccattcaatgtacaaaaaacttaatatttcaaagaaaaaagttactgctgcaggtattacagtgtctatgttttagtgccagagatagtaaatacagctaatatattaaggaaaagattgatagtttaaaaatgataatatttgtgaaatccttattccaaaccaaatgtcatttgctaaaaatattcattcaaattatttgtggataagcatagtcaaacttggattgaaatgcccgcttctcaaaggaaacaccattgggtttcaaagtagccgagatccatgacaaagacggacttgacgttcccattcagaaaatagaagcgcttgctctgtggggacattctgtcccacattcatgttggtcccagtccccgtcgacactgcatcatcacatccttaacatactatggcttcgcagggcatctgcttgtgacacagggacaagcaatcaggtgtatcctataaccaagtctatggtgtcaccagcagtgaatgacatgtcctcatctaagtccaattagaaaacaacctggggacttttatgactttagaagcaagctctaatttttttttacatagtaatctcttagttttttagttgtgattgttcacgttgccagaagcattagttcttgttgcaaattgcttgtctttaaaatgattttttccctttaatttagaacaggtcaaagcaccctaaaatacctcaaatctgttggccgctttataattacaaagtctagaccaagttacactatttaaaatataaatgaataatacatctgaaccgacagctggtatgccaagttgtagcctgaggctgctttaagatggttgaaatgcagtataatgtaaatgcttggaagtgaaggactattaattgaaagccagactgatagtgaggggggtggcatgatggataaggtgccattcaggctaaccatatgtagcatatcatctacagtgggtattttaaatgttgattgtggacattttaatttccagtctggaaatgagccttctaattattaaacagaagtgtccctacattaatgaaaaagcttaatggtggaacacatcttttgtgtccttttttgcctccaaaaaatctggggaaataatataacccactatttaaaattaagctgaaaatataatcagaataaaagtgataacactagctttttccttctacttatgatatttatctagtcaaatctaattaatttagcctgacatgtttaaaaatccttgcctgcccccctcaccctacccccattctgtgttctgacagacagcagaaatgaaaagcatttactttgtggctggattatttgtaatgctggtacaaggcagctggcaacgttcccttcaagacacagaggagaaatccaggtattaaatccgtagtctcgaactaacatatcaatatggttggaataaagcctgtgaaaactatgattagtgaataaggtctcagtaatttagaataaatattctgcacaatgatcaaatgtttaaagtatccttgtgataaaagcagactttgttggagtgtagatcagagtttgtgttttttataataaaaggggagagaaatgttgaaaaacatgttacaggggaaattatagctccttgaaatctacagatgatcctatctatcaattcattactcacacactgcataatagattacttcaattattcgcaccaactcttttctcttttttcctcctttaaaaaatagcattatttcttcctaaatgtaaaagccatacatgttcatgatggaaagtatgaaaaatatgcaaaaaatattaagtactcaaaattcctctgtccaaagaaagctattcaaagtaaacaaatttggtgtattactttcctgtgttttacgtaaactgtacataaatatctcttggctcattatatggctttgtatcatgcttaatatcttaacattgtattattatacacttttattatattattaaaaatatttgttaaacatgatatttaatggcagcatactgtttcatctcataaatgtacaatatttgtttagctacttatttgggaagcttaagaggtcttaaaatttattccacaaagaatgttgcaaacaacattttatatacacactttcctacatttcttactatttttttgcacataggtttctagttgtagaaatactgtgtcaaagggcctgaatgagtttaaaccttttttaatatcttgccaacttgctttccagaaagttcatacacatgcacactctcatcagcagtatagaaatactcctcataatatcctcctcagcattcaagctttgctaatttcataggtaaaaatagtatctcatttctgagtattaattacattgactattttcccatgtatttaccatgccaaccaactgttgattagtggcatagggattattcctgatacagtttcaaattagcaagtatcctttttcttgcctttctttgaacttctagttgtcttccttccactgctagccaccatataactagataattgtgctgttttcatattaatatatgcaaaacaaaattgggagcttaaatctgctgcccaaagaaatgatttgggattcttcactcttttaaaatattcaagtcactactctcttctgtcactattagcataatcatgagtagattaattagtagaaaaagatttgtttaatcctatttcagaaaaaaagaagtcagttgagaaacatgtttctagaattcagaataatagcgtatgcaactatactaaaacgaagggattctcatgacaagctaaggaagatctttctaaactacctattgaaatactctagatgcctgccttactgttttatatggtcttgtattttgtagtgaagatgcttctcaagtgagtctactcttgaggagagatttatgttgtaccaatcactgttcttcacagatcattctcagcttcccaggcagacccactcagtgatcctgatcagatgaacgaggacaagcgccattcacagggcacattcaccagtgactacagcaagtatctggactccaggcgtgcccaagattttgtgcagtggttgatgaataccaagaggaacaggtaagagtctaagcctggctcaaaacttgcttataaatgtattaaataggtctaaaatttctcttgacattattaagttcttatgctcgtcaaatagtgcccataagccctgatcattttgaagatgtttagggttggggatgctctccttagtattatgcccccgaatgtcttaacccgcacccctctaaaccacttacccaacctccagtgtgacatagcctttaaattattttcccagtggtagtcctagcaatatttacttgcttactcattttcccttaaagtgaaagtttacttttgtggacctacgaggttaccaatctaatttctaccaaaagatagagcaaatataacattctttcgtggggttcaaacccaacattaaaattatcccccagccaagggtaaggaatggaaacagatgcattccttttcttgtagaataaaatccaagacatgcatttaaaattacagcctagctgcacagcatagagagagaaggcagcaaataagaacacaagcctatcgtaaggcatacattttaatgttggattttctttgacgagtgttgggttttttgctgcatctaggctactggaggaaattatccgcaagggtttcacagagatggtggaatttcacaatttttttggagggtggcccacaagaggaagggagttatgcatagaaagtagctgaagaaatcaaaaaatcaggaaaaggacatagatttgtctggatagactggagaagagagagagtgagagtaagaaaggagagagagagagagagagagagagagagagagagaacaagcaagcaggaggaataggagaaacagagttgctaatcaaaggttcttaaagtagagggtacagccacaggaagatggctatcatggtcagagcagacactgggagaggtccctcttaaggactacagtgaaaggtgagaaatcacaaatttataaaaatgcaaacaactgtcctcattttctagaatgggaatgccacaacttggtaaatggatgtaaagcaatcctcacactcaagcagtgttgcctatgtgtttaaaatgaggtgatatggggtaatatgtgccagggagactgacagcagctgatggctcacctccacggtgctctgcacacacttgatgttgatatggggtcatcttctttgctttccttgttactagcagatcacacattttctttaatccattatcaagtggtccttttggtaacaattcaagatggtcctttgctttccctcaaatcaattaactaactctgaccccatacttactaataacaaacagctgccttgcttgcaagtcacatagtgcagtggatagcctgtatccattgagactgaagtcaaaggtaaggcagctttaataaccaatgacatacataagcaggggattgcagatgggtatgctgggaagggagggggagctttagcccaccgattgttattagctctcttccaccagtttcaatccagaacattaatgtagcttcacgacaaatcccctagcaaccctcatctcctaaactccctaagccccttctacatagaatcctgaacccaaagttgccactgcttataggtgagaaccatattgccaaagagacagatcttcaatttaactttcacatttctttcaggaataacattgccaaacgtcacgatgaatttgagagacatgctgaagggacctttaccagtgatgtaagttcttatttggaaggccaagctgccaaggaattcattgcttggctggtgaaaggccgaggaaggcgagagtaagtctgtacattcttatttgacattttttgccttgatgcagaaaatttaagactacagttatctatatatggatctggattacagaagcaattagtagtcttgcaaagtaaggaaataattcctattgatgaaaaacagtatataaaagttaaacccattttgtttttggtactaagtattaataatagagccaaacaggttacatttgtatccccttatagttgcattataattaggtattaaatctttggccaaaccaggccacctctgagagtaaataggatgtttttaataactacgctgagacaaatttaaactaggactgttctaggggagctagagataaggaaaaagaagaaacagtgctgaaaacttcaaatatgtaaagaaaacatataatatttaaagcttaactttaaacatttacatatgtgatcaacatatatttatatattaataaatattcagataaaaatgtgatgaagactgaaagtgaccaaacctaagatgttgataaaatgatattcaaagtacaaataggtaaaaacatccatatatttaactacatatccaattttgtatggggctgtcatatagatatctactaaataatctaagttgaaaaacaaccaagaccatcaattacttgcttagatcttaacacagccaaacagacccctgaaccatctcattttcttccgattttttttggagagatgaaatatgagagacggagaatttatgttcaactctgatttttaaattagatttaaaacaagcttactgaaatttaaagagatctcaagatgaaagagaactagaataatggttggtttttaaaacattaataattaaacttataaaaccaatggtaaaatagtttctcactcttgacgatattttgcagtgttttaaagggataccaaaaattctgcaatagtaaaccagtgaaagagaaaaatctaatatagatgaagctttaacctcttaatactgcattttgcaaggctgttcctgcaagctctggttttataggatatgatatatttagttgaattacagactaataatctcaacaatagtttctgtattgtcaatatactaaaatcttcaaaacagcctagaagattgaaaagggcatgaaattatgcaggcttggtattagatcccagctctgctactttctctttccagtagtcactggtccacatgggtttttatcaggtatttcacagtacaccctttaaaaacagaatcctttactgtttcctcaagacacttgtgcatgttaccagtggtagacaatctgtgatcatttattgaaaatatctaatcaaacgctaattttaacacttattttcttagtttcccagaagaggtcgccattgttgaagaacttggccgcagacatgctgatggttctttctctgatgagatgaacaccattcttgataatcttgccgccagggactttataaactggttgattcagaccaaaatcactgacaggtgactgctttttagttaattctgaaaaccatcaaattctcataagtactgattgtcatactgctgcaagctgttccccatgtagggggaaagtctataatctcttattatataggaaataattatgcatgtttaagtcatataagagtacatcattatgtttgttttgtatcattacagtttgtatctatttattcatttattccagaaacatttactgagtgtctattagagtcaagaagctagaaacacagatagaaatgaaacatgggaaatgttacatcattcacatattgtcacattaaaaattgctatgttgaaatttcagcacaaaggtgaaatgcagcatatacaatattacatacttaatttaataagaagagtagtgagaactggacaccgaaaaatacttatcttgatgaattttgattttttaataattattcataattgtttgatagcattgatgagcagactttaggataaataatctttaaatgaaaatattttaagagtccaaaggatggagggatttatggacaaagggattaataaacaacttttatcaaaataaatcattgaaatattttctggataagttaatgatatcatcttattataattatgttaaatcattttctttttttaatctctaggaaataactatatcactattcaagatcatcttcacaacatcacctgctagccacgtgggatgtttgaaatgttaagtcctgtaaatttaagaggtgtattctgaggccacattgctttgcatgccaataaataaattttcttttagtgttgtgtagccaaaaattacaaatggaataaagttttatcaaaatattgctaaaatatcagctttaaaatatgaaagtgctagattctgttattttcttcttattttggatgaagtaccccaacctgtttacatttagcgataaaattatttttctatgatataatttgtaaatgtaaattattccgatctgacatatctgcattataataataggagaatagaagaactggtagccacagtggtgaaattggaaagagaactttcttcctgaaacctttgtcttaaaaatactcagctttcaatgtatcaaagatacaattaaataaaattttcaagcttc

SEQ ID NO: 644 - DNA, 5457 bp, Homo sapiens
accacactagcgcgctagaagagtggggcggaaagacatctcccgcgcatgtgtggaactggggggactgattccaagacaaggcgcccaccccacagagcaagttttctgaaacgtgtgagtcgtttaagtccagttaaagccgaggtggggcgtatcctgagacgcatgcgttctagacgagacaagtgatctagcggcgtggtcttttcaacgcctggcgtactgacggcgtctgaggtggaaggggttgtttaggattccgaacacgcatgcgttctgagacccaggcgtttcctttagagggtgtggagtgcagggctccttattgcgcaggcgcaaggactgcccggtaggacgagcggtctatcaaggggagggaagatgaggttgaagagattaaaaaaccgggtgcgcctgcgcgttgcagattagttgaaaacgctcagggtttgtgaggggcggggtcacgtatgcgcgtcattggacgggtcggtgggagggagggtggagatgggtagggtgtgtgcgcttgcgcagtgcgggggtggagggcggaggagatagatagcacgcttgcgcggctgtcatagggctgcttggttggtcagtggggagtcggcgcctgcgtactaagacccgtgtgcagcagcggcggcggcggtagaggcggcggcggcggcggcagcgggctcggaggcagcggttgggctcgcggcgagcggacggggtcgagtcagtgcgttcgcgcgaggtgagagcgggcagggcgcgtgtgcgcggtaccttggcttgggcccgggagaagatggaactgcgcgggggtcggggagggggcagaggggagcggcggccgccgccgcacgggttcggccagagagcggcgcgaggtgaggagaggcgcgggcgcgcgccccggttggcgcgcggggtgacggttggggttggcccggtgacgttggagcgacgcagggcgggggacggcgagccgcgaggcagccacgcgggagaggccgccaggcggccacgccggggcgagggccaggggccagatcggcccaccggggcaagggtacctgggccgttgaggacccggctcagcgcggccacgtgaggtgggggagggggctattcggtgagagggcatgatggggggggttggcggacggccggggggaggggaggcggcgtggctccggcctggcgcagtctctgaggagggggcggccgcggcaccggaagtgccccccacgggaggctgccctcggggtcgcaggccgcatggccaagcgtggaccggggccgcatggcagcgcggggacccctccccccaggtcccggccaccggaagcccggaacggccacatggtcggcaggagccggcagcccctagcgcggggagctagtcctcgcgggggttccgagggggcctgagattttgaggagtggaagccggaggctcgggtcctaatcaccccggagggcctgctgcaggcatatgttagcgcttcccaacctcaagggccccaggagctttcctgaaaaaccctcctgtgaagtgtggcggtcagccaggtgtaagtggcaccccttcgagctgggaggccggagaaatggggaaacagggcgtttggacaggagcccaacttttctgtcggcctgggtggacagcgcctaaaagcctcaggcagatgagtttcccaccgtgataggcgttcttcaccttgtcactgtcttcctgttgtaactggtttgggagttccacggtttcgaagtccttaactctactagcctagtatgattttctactactcactactaccaaccttttgctttcattttattgtcattcaccaccccccacctctcccactttctactgactgtactggcccggcctgaaaagccgacaggacagatgcatcctgggaaaagtgggagggccttccaggagaggctgggttcctgggttctctttgggaaccaagatcgaggtgtttggcagggggatcatttcggaaacaactttgctttctcccccttggcttgttgcaagtgcatgttggcgaggcgggaatcccccaaagaggccttgtggtttcctgtagcagtgactggtttgtgtgtggatgggggggggcagtgtaacagatgggtggggccttgtcctccggtctccaccctccccccccccaattagccctgcccttttgctggatcatagctgctcacctaattatagccctggctatatgtggggaagaggggtggttggtttcagtggcaagtaacacctgagtcctccccactcccaggaagtaggccttttctcatctctgagatttgacattccagctccctagagccttcctttcccaagccaccactttagctttgatttatgggggagaaaccagctattccaccctcccatacacacaccagttcttgagtatatttgagcccagtcagtattttaagttcaggaactttgactttattttaggtgggtaatggaataaagagttgggaaaatgtttctggagagaaatgggatagattggaggtcctgttgacctccatgcttattcacttcagttctcttcttggctctagttggaatcgaagcctcttaaaatggcagatgacttggacttcgagacaggagatgcaggggcctcagccaccttcccaatgcagtgctcagcattacgtaagaatggctttgtggtgctcaaaggccggccatgtaagatcgtcgagatgtctacttcgaagactggcaagcacggccacgccaaggttagaatttcacctccgcatcttgccttccccatgcctccagtatctttggcgctcccagcagcaagctgccaacagtgctgactttcctttaactctgcttttactgtctgattgtttttgtttagcgctcagccttcatacccattcagacaactacacctgctccccagtcttcagcctcttctgtggttacccttctgtccccgcatcattctctggcagtccctccgtttctccagctttgtgccaatctcttcaattcataggcctttatgctctagctattcagttgctccttccttattcttggttttcactttttctttcttcccttgagccgttgttaagtggttgcttccatcacgttgcccagggtttctccaattctacgccttcccctggagggactcctgcgtcaattctgagctttcaggtcaccttgctgcttcgttccccagttctagctttccctttggaactctgacgcaggatcaaactgcccctacctgccccatcccactctccttgggttccttgagcctccatgctttcatgggttttaacattcttgctagcacttccctcatcacctcagacttttcctgtctctttagaatttcaacctgattcgttcttgttgaatttcttgtggtgtttttccttaatcagtttttccatcttttgacttgacattgatcttggattattctctagtgtctggatccctctctgtgctcttctggcttccttattttctagctacatagttatttctgatctccctgcaagtccttttcttcagctctttcacatttcttagtttcttatcctttcccttctaccttccttattccccagtttctcagctccttctcctggtgtccggaaaactcttcgaaacttttactcagactcctcccactcccctagactcttagcatcttatcttttatcaaggtaactgtcttctccaagcctgccatgcagttttctattgtgctgtcaaccccaatctcaacggtggttttttagcctctgttttttttctttaagaggctttactgtttcttgagttgactggttcaattccaacactccagtctttgccccaacaatgtaattctgacttccctcatcaggcaaggtcaatttgagcctttatttcctccgttttagagtttggttgggtttctctttgtgatgcatacatacaggtccatctggttggtattgacatctttactgggaagaaatatgaagatatctgcccgtcaactcataatatggatgtccccaacatcaaaaggaatgacttccaggtatgtagatggtctggatgaggatgggttagcggtttatggtggagggaggggttgggggatagggactgaccaggagagcttgtgctgggagagaggagggaaatggcaggagagggtgtttggtattagtttgctatcagtccagtttgtctatcagagcctttactgtcatgtcagcctccctgggcctactaccttcagcctccttccctatctgcccccagctgattggcatccaggatgggtacctatcactgctccaggacagcggggaggtacgagaggaccttcgtctccctgagggagaccttggcaaggagattgagcagaagtacgactgtggagaagagatcctggtatggtgcctccctccctgcttctgtgctcagctttgttctgtacgtttcttcctgagctcagacatctcttggctatccctcttgcttctccagatcacggtgctgtctgccatgacagaggaggcagctgttgcaatcaaggccatggcaaaataactggctcccaggtgagtgtgacaaatccctcactgtccccttcacattttgttgtcctcagcagagctgctgtagtcttaattgtttcaggcttactttctgcccctagcctggctctgtcctccctatccttcctgttgaaggtattatcctgtcttactaatttctctctcctacctagggtggcggtggtggcagcagtgatcctctgaacctgcagaggccccctccccgagcctggcctggctctggcccggtcctaagctggactcctcctacacaatttatttgacgttttattttggttttccccaccccctcaatctgtcggggagcccctgcccttcacctagctcccttggccaggagcgagcgaagctgtggccttggtgaagctgccctcctcttctcccctcacactacagccctggtgggggagaagggggtgggtgctgcttgtggtttagtcttttttttttttttttttttaattcaatctggaatcagaaagcggtggattctggcaaatggtccttgtgccctccccactcatccctggtctggtcccctgttgcctatagccctttaccctgagcaccaccccaacagactggggaccagccccctcgcctgcctgtgtctctccccaaacccctttagatggggagggaagaggaggagaggggaggggacctgccccctcctcaggcatctgggagggccctgcccccatgggctttacccttccctgcgggctctctccccgacacatttgttaaaatcaaacctgaataaaactacaagtttaatatgaa

SEQ ID NO: 645 - DNA, 78253 bp, Homo sapiens
ggtttgtaatgatagggcggcagcagcagcagcagcagcagtggtggaacgaggaggtggagaattgagagcacgatgcatacacaggtgtttctgagtagtaattagatcgctgtgaaggaaaaagcacacctttgagttttcacctgtgaacactatagcgctgagagagacagtctgaaagcagaggaagacatcgatcagtaacaccaagagacaccaaagttgaaagttttgttttctttccctctgttttatttttcccccgtgtgtccctactatggtcagaaagcctgttgtgtccaccatctccaaaggaggttacctgcagggaaatgttaacgggaggctgccttccctgggcaacaaggagccacctgggcaggagaaagtgcagctgaagaggaaagtcactttactgaggggagtctccattatcattggcaccatcattggagcaggaatcttcatctctcctaagggcgtgctccagaacacgggcagcgtgggcatgtctctgaccatctggacggtgtgtggggtcctgtcactatttggtgagtgcgactttttctctcgtgggggcgtggctgtggggctggaaagcttgctttctgggaaagcaaatggtagtttttgaggagtgaatggatggcaaaggccacaccaaatttttaaaatttttgttcgggtacgtgaactacccagatgcagcatccgctgttggtgtgatctggaacaccctcaaattgcttcctacaggctgtactttcttttcctgactaagacaggctatcttctgacttttctctgtggtgatgagagcaaaggctaactttcatgacccagtaaaaaacatgcacactttctgtgccgggcagttgtacacttagcttgggcattctggcagctggcatgctgaatgagacacctgtgaagtggaacctggcatgggctatttagacatagaacggagtgttcagcagaagtcttactgactttttattagccaaacaaatgggtggcagtctttataaaaatattttttaagttcatgtgcttgtcacctcttaatatcctttcaaaagtccttgacatgggagagatgtatgatggcgcataactcaatccctatcataatggggtatattgcaatggcctgagcatatttcaaattacttttcaacctttcatctcttctcaatacccatacacttttgcaatataagttttaaaacttcagttgggcgttagttttctgtacttgcccagatctgtttttttcattatatttcacttgttctccagggacacagagaatttgtccacctgttcactaaattaatctgaagggaactggcagaagtataattatgaatttttcttcaaagtttatgtctcttctattgatctgagaattaatagtaaagaggtaaataaatgcccccttatggagtaggcaaattactagagagctacctgagtttgttgtaaagatgataaaaactggtgaactgtcaaacattaaatttgatttatgctatgaggatttatttactcttcttgggaaagattctgtactttaaagttgctctttgtcttaactctgggactaacactaactaacaagtactaacgctaactctaggactaattaacaagtactaactcctgttcccatgtgtaccaatcaattcattctttctactcaggccttgtgatgttttaaatcattggtttgacactcatctagagaactcaaattccattttttttttttttttgagacagagactcgctctttgcccaggctggagtgcagtggtgtgatctcggctcactgcaacctccgcctcccaagttcaagcaattctcctgcctaagcctcccgagtagctgggactacaggtgtgtgccaccacgttgggcttatttttcgtattttttagtagagatggggtttcaccatgttagccaggatggtctcgatctcctgacctcgtgatccacccacctcagtctcccaaagtgctgggattacagatatgagccaccgcgcccggtcctcaaattccatttttaggaagaagttattttaaatagaacttgttaaaacaagtagtatagaaagatttatagaggaattatttggggtttttagagagagtttgtggtattatttataactaacttgtgctttattaaatattcagtaacaattgtgtatcattatttcccagtattacttcccatctttataaaataatttggagtaatatcattatgaaaaactctaatagtacccttagccactattaatattaaaatagctctggtatatgcacttatagaaaaagagaaacctaattgttgatcatcttaaatgattttgtgcaccctcagcctttaaatcttcctacagcactttatatattcagaataaatcaatatctaatcagaaaaaccacaaccagtttactggactttgcgtacttatgtgcatgcagcttccactatgtgattcaatttttgcacataataaaagattattcagatgtaataaaatagatcagtatgagtattgaactagttaaagtgtgttgacttgcactatgaaaatatgcttatgcataagtattacatatcatctgaagcaaaagctcaaaaaaaaataaaaagagagaaacagctaaggagactagctaacattacacttgagttggtattctttgattagtaattgcagggagtgtgctcttgtattaatctacttatctttatttgcattgcatttgtcacttaagttaccagaagcttttggacaggagtgcctctgtaacagcaagcaaagcaaaatctgaagaaaaaataatccttctttttaaaaagactctagaactttgggaccaactgtaaagaatctgtacatttggtttaatacatatatatactttttttttaagtgaagggtcaatacatggatttttacatcttgttttgaacttttttcatctgggcaaaatggttatgaagcttgagacctttaaatgaaaatcattcccccagaactcagtttaaacctagggcaaccatcctggagtttcagtaaagcatatagaggtctaggtattgattctctgacaataaattctgaggtacttaagactcttcccaataacattttatattggatccttttctggacagcctaccaacatggcgaatgtttccccatggagagtgagttgcaactagttaaaattagttataggtagatgaaatacatcagtgttccccaaatattagtctgcagactcgttactttagaattatttgtacaaattttaaaatgatagagattcttgaatttctcttgtggacaatctatactctcttgattagagtctgtttttggtttgagtgttttcgaattaaaaattattcccagactgagcatggtggctcatgcctataatctcagcacattgggaggctgaggcagacagaccccttgagcccaggagttccagaccagcctgggcaacatggcaaaaccctgcctctacaaaaaatacacaaaaatttagctgggcatggtggtgtgtacctgtggtcccagctacttgggaggctgacgtggaaggatcacttgagctcaggaggcagaggctgcagtgaggcaagattgtgccactgcactccagcctaggtgccagagtgataccctatctcaaaaattaaaaaaaaaaaaaaattattcctaggtgactttgatgtcatgataagtttagaaatcagatataaaatatgtaacactaagatttcactgaatatccaaattatatttatattgagcagttctgtctaaattattactaatcagtagtacttttctacacttttattctcagaagtagattggaaaaaaattgtgttcttacatttgagcacttggcagtacagatagaacttttcacataatgacaggatttttttaaattttcttgttaattactcaaattaataagtatagctatatttcatgtggtgcttgccatgtgtcaggccatgtactgtactaggtacccgctgccacatttatacacacaactcctttatgaggtagaagctgagatctccatttcacagagagtgaaactgaggttttggggagttgcatatttgtccaattttatgtgaattgtatcgttaaatgttaaaaatttagcttatagttaatttgatctaaagtacacaaatataaattatagcacctcattttaaaaagtatattctgggccgggcgcagtggctcacgcctgtaatcccaacactttgggaggccaaggcaagcagatcacctgaggtcgggagtttgagaccagcccgaccaaaattgagaaaccctgtctctactaaaaatacaaaaaattagccaggcgtgctggcaggcacctctaatcccaactacttgagaggctgaggcaggagaatcacttgaaccctggagacagaggttgcagtgagcagagatcgtgccactgcactgcagcctggggggacagagtgagactccatctcaaaaaaaaaaaaaaaaaaaaaaaaaaaaaaatatatatatatatatatatatatatatatatatatattctggctaggcgcagtggctcacacttgtaatcccagcactttgggaggccgaggtggatggatcttctgaggtctggagttcaagaccagcttggccaacatggtgaaaccctgtctctactaaaaatatgaaaattagccagatgtggtggcagccacctgtaatcccagctattcgggaccctgaggcaggagaattgcttgaacctaggaggcagaggttgcaatgagctgacagcgccattgcactccagcctgggtgaccaaaaattccatctcaaaaaaacaaaaaacaaacaaaaaaaaacacccagagagtacacttcaaaaaacatccaagatagccttttatagaaacagagtcagaattcattttgttgacaaaatatatcctacaaattaaatgaaatcttggccgtgcacagtggctcacacctgtaatcccagaactttgggagaccaaggcgggcagatcatgaggtcaggagattgagaccatcctggctaacaccatgaaaccccgtctctactaaaaatacaaaaaaaattagccaggcgtggtggcgggcgcctgtagtcccagcttctcgggaggctgaggcaggagaatggtgtgaacccaggaggcagagcttgcagtgagccgagatcgcgccactgcactccagcttgggcgacagagtgagactccgtctcaaaaaaaaaaaaaaaaaaaagaaatcttgcaagtcagagagtccatggttttctaaagagtggatacagcttgttcattttgattttccacagaaacataatttattaaaagggttctcaaaaaataactcaaaaaacttaaaagctaactcaaacatttggactaatgccttgtcttggtgtgaggttgtgttcttctaaaaataggtcaatattattgacatctctctcctctttttcccctatttccaggttttcagctcaaaattctggaacacatgatattgttgcagacatgtatctttgtcatttcaagtaaaattatagtgttcaaatagaatacactaaatctcaactgtgaggatgttagaaaaggaacttggcgggtcttagcaattagatgatggttatttgtcttgagtaaggatgccattcagaccaaaggaggcagttacatctcaggcaacatataaacattattgtatctattctaatgctgggtgtcttgaaaatgtattaaattggtaccattttgtgacaaatatttcacaggagctttgtcttatgctgaattgggaacaactataaagaaatctggaggtcattacacatatattttggaagtctttggtccattaccagcttttgtacgagtctgggtggaactcctcataatacggtaagagcatagtagaaagaattaagaaaaaataaaccaattcattcttatgaatcaccttgattatttttaactggttagacacatgcatgtcatgtgactacatgataaacatgtctacctcaggatataaagcctgtgataaagtacctttctgaattaagatatttttaatgcaattttatcactgacaagcagttcaccagcaatgccaaacttttagaaatatctacctttctttgaccctcagctattctctttgacacttccaggagaaagatgcttacttgaaagaatatgaacatgaaaattcacctggataccttttgaccaactagaccaaattaaatattgaagttttctcttattgtagattatatcattaaggcatttaactttacttagtcattgtgaccaagacacttctgtgcctcacaacttagttggtcaccaagtcttatacttcataaaaaacagagtttgcatgacagagtcaaatgactcatttccttatattaaacagattaggaactacagttccaaaagtcttttttgattttattgttgtaacaatgtgtttacattcctgcttgtcttggtttaaaatcacactgaatagtgctaagtcactctgaatagcaaatttccttcgactttgtgggaagcttatgatgtcatatgagcatttcagagtatcacagttccttaaggctaactactttgataaaatgtgatgtgcacagtctgattacagaatttaatggatattactagggaaacttgctcttatcaaacttatcaaacatatgtgattgagagttcatgtgagcttttatggctaagtgccaaatacagtgctagtaagtattgacaacactaatcatgagttttacagtgttagaagtctttttttttttaaccaaaaaaagatcttcaaagtagtatatgcttcatgaaggctttttcattttaaacactctgcattatttaaaattgttataatgaaataataataagtatttttttcctttcctgaaattcctctatcaggaatgcacttctattccttttggttatctcaatcttatctgctcttcaaaggtcatcttaaatcctttctttcccacaattaatttcctgtttattctaatttatgttatttctttcatctctaaattcttctgaaaattctatctctgcttcacatttggcattgagcatgataccttctattcttccttaatattttaggtgtctatattttgtttcccttttaaaactgccaacatttcaagcatacaaagataagatctttttgtaacccatatactacttaggtcagtgccctttttttggcatatattaaattatttttgaataagtaattgaaagtttaaagttacaatatattgtgtacaacatactcagcattcaaatgcatgtactacttattgactgctggcctgtcaggctggcgggctttggagcttaatacagttggacttgactccgtcttcagccatgtattagttgtgtaactttggctcattgcttagcattatgatgaacatgatcattccatataaatatagcttatatcttacagtagcacagataaaatattcatatattaatttatttattccacaaactgctactgaatggtaaatggcaataaaaagagatctaaaatgaaatcagccacaatttctgctcccaggtagcggataatcaaatgttactttaatttaaaaaaaaaaactacttttctctgtgtgtgtgtgtctgttgacagaggaaagtacctttgtattctagaagcttttaaaatatgttcatatatctctttgtcataacatactcatattgctgagttggccttttaaataggcagaataacaaatgacatgaggagggacaaaatatctaagtatgtaaatatttctcttcttttactaatacccatagttcctaagtacttcccattaaaattatacctttagattaagttagtattgccagaaataatctgtaaaacacagatttcaaggacagaaatattatctatctgtacacagcaggggtcattaaaccgaatttgcgtgtgcactatatattcaatatatattgggtttccactatatgatagacactgttctaaacactggaggtaaaactgtgattaagatagatatgattttgtacccttagagctcagagtcaagtgggaggaaatcattatcaatcgagaaatcacataggtaaatataaaattgctattgtgataagcactgtggaagacaggccaagggcttcagtatgaatatactccaagagatctggcccagtcataggttggagaagttttcccctgggaaaggaaaattgaactaagatctgaagtataaaacatagtcaattagttgcagaggctgcaggcagagaagattcatatccttctagtgggaagaagctaactgaagaagtagggagagcttagaccagatggagccttgaatgcaatgtgaaggctttttgcatatcctgaacatattttgaaagcactaaaatgacataatcagattttaaattatacataaaaaattgtataaatgatggagaataggataaacagttttgtttggggaagatgggagggtgtctaggaaaagaagaaaatgaaaaaccttatgccgctctccagtatcagccggccaaagttgggaacatgtaatgctggttggttttctgataatctatggatcgggcatgaatgttgggtaaccacgagaagaaagagaagctaaaaaggaagtttggcataagaaattagataattgctgccgggcacggtggctcacgcctgtaatcccagcagtttgggaggccgaggcaggtggatcatcaggtcagaagttcgagaccagcctgaccaatatggtgagaccctgtctctattaaaaatacaaaaaattagccaggcatggtggcatgcacctgtaatcccagctactcaggaggctgaggcaggagaattgcttgaacacgggaggcggaggttgcagtgagctgagatcgtgccactacactccagcctgggggacagagtgagactccatttcaaaaaaaaaaaaaagaaattagataattgcacagacttgcatgtttatggaaaaaatatgcattcatatatacatacatctaaaatgaaaaggtctgtgcaattttctcataaaaatatttgaagaattaaaatagaaagatgtattacctatatttctatatacctgaatttatttcatattcttgtctcatttatattttcttaattgtatcagattataataaatctattatttttaaatttatattttatatctgaatgttactataggattaagaataatcacttgactttgagtttttgtctgtacagaaaaaataaaacaatgtcaaatatttaggcatgtatttgcagggaacacttaatactaattttttaggttgagtgttgtgttcattcttttgactatgccctgacacattagatctgtatggcattaattaattcataatatggctgaagtttacttactgactttttgagaaagaagatggcttcctgtaagcctagctctgtcaagatctcatgtaataaaccagatttttaaggaaaagtcaaatatgggagagcaggggaaaagttgatagtacttacccttgttcccaagaatatgtgaagtttaaaatctagccaccagtgttacaggaagtacttcatttggaatgtctatggcaacctaatcaagtacggaattctgaaaactatggactttcatatttaacatgttccatatgctaaatacactcaaggtagaaaaaattaatgaaaatgcagttttttcccctgtggttaacctaaatatatacatttttttttagccctgcagctactgctgtgatatccctggcatttggacgctacattctggaaccattttttattcaatgtgaaatccctgaacttgcgatcaagctcattacagctgtgggcataagtgagtattatagctatatatgtgaaaaaggaaaaacaacacaaaaatgattgaagacaaagtgtctttagactttttgcattgcgggattgcctctcacatcatgttctttttgcttacagttccaaatttctactggaaggatttggagtgggatccaatactgtattccatgccagttttgtatttggtcaatagatatgatggctaatctttttaaatagtaaaaatcaccttactagtaaaatattaagtctattatacatgaacaagacttttaaagagaaaaccccaattattttagagactacttgaattggaaattagctatatattgaattatatctcatgtgtaatcatggagttacctttatgtagtgggtgtttaagttgtacttatacattttgtagtgttagcagctgtcactcccagtgttataatgtcagctgcctgttgttggtcatgaaaagaattttcttttaagattgattattagtagtattttctaactagatttctttatggtctccaaattaagaagttgttcatcttttatcaatgggcacaaatattcattgattaaaaaaagaaacaaaaagaagaacatgtacaaaattgcatgagtgatatgaagccatatatgactctaattccccaaaagatgccaggtaccaaatccttaaatatgggaaaggataacttaattctaggtgccatttgaatcactgtcttaagaatcaatatgatcacatttaaccgagttttagctactcataaagagaaagctacacaggaataactcaactgcataatcgtggaagaatttttagtttgtatggctaaggtgtttcaatgggacaatgcctggggtattgcctgtaatttacttattgcctgtaattcatttatttatttttaattaaaatttaaaaaatagatttagggggtacagtgcagttgtgttacgtggatatattgcgtagtggtggagtctgggcttttagtgtaaccatcacccaaatagtgtacatcgtagatattaagtaattttcatcccttatcctcctcctaccctctcatctctctgagtctccgatgtctattatttcacactctacgtctatgtgtatacattatttagctcccacttataagtgagaacctatggtatttgactttctttttctttaattccacttaaaatagtgacttccagttccatccatgttactggcagcaaagacattattttattcaatttattaagaagacaataaaaaatggtaactatttatacttttggaaaaacatcatttgatgttccaggagactagagacctattcattgctgtatttccagcccctcacttagctcctagcatgttgttggtggtgctcagtaagtatttgttgacttgattttctgagaagtctaagaattttttctccggcagaaaagtctatagtctgtttacttgttaaacttggaggattagatatcttcagtatatttccaggcagtgggaaaatgataaaaatgaaatagagtttgcttcatattatgttcagatctagcagtctaagtttttgagggttgaaccatttgagcatagtggttacagtttaggctttggagggaaacaacctggaattgaagcttggtgttacaattcttagttttgtgatcttgtgctaatttttaaacctatttaagccccagttttatatattaggaaaatgcctatgaaaagataatctattaatatcttgaatagctgaaggaagatgaagttaagccaaattttttgtttgggtcacattctttttcattattttttctttttttttttttagctttcattttgagttcaggggtacatgtgcagtttgttacataggtaaactcgtgtcatgggggtttggtgtacagattgtctcatcacccaggtactaaacctggtacccaagctatttttttctgattctctccctccttccaaacaccctcaagcaggcccagtgtctgtagttcccctttgtgttaatgagttgtcatcatttagctcccacttatacgtgaaaacatgcagtatttggttttctgttcctgtgttagtttgctaaggataatggcctctagctctatccatgttcccgcagaagacatgatcacagtcagatttttaagacctttaacagagtgccttgcctatagaaagttcttgataagtccactgttccactaagggactgaactaacagccattgttatattcaccattttcttgtcccttgaatgactgaggcagaatcatatcacaattattatatttaaaaaagagaagagcaggggtggcatttttgagagctctgtaaattaacaatgatagttattaattaaaagccataaccagaagactaagtagattgcatgtaaacatttataaatccacaaattttactcactttggagttaaacttatatgaatactaatgctatatttatgtttttataagtctagataactcttttcttgtttatcccaattcaattaaacattttaaagggaaaattcgtatctctgaggattaaatgaaaactgctcaaactaaactttaaaacagttctaggaaaggataaccatattggggtttacaaaacctctgtagtagacattggtgacggaatagttaacaaggagcctgaggaaatcttagatgaacccagacatttccttctatttttgccataagttattacattcatttttaaattttgatgttccttttgcaagcttgaaattcggagaaagaaatgtgtacccataatcagcaacagttaaaaagcaaactggatatccttatgactcagtggtaggtaatgtaaatcagtgccctaattgggaaagtcaaactgtctgtaagaaaaatttagctttaatggtgcaacagcgggtggagatggagatagagaaggagaaatttatctaggggcaaatctctcacaccctgctttcttcaaagtgagtctaggtgattttctacctgttaggggtggaaggttaaccaagatgtagaaaacagagttgaattgcatgaattgcttccctgtgatccctggggaaggaaacagttcgtggtcatttgaaatctctagttaagcatagaaaaagggcaaacctgaagggtcttgctacatcatagaaaaaaagaatttcaaattttgtgaaatgttagccaaccatttgagagatgataatgggataagggtggggggttaagtaaatactaattcacccccatttttttaagtactgtatttcatttctgtcaaatttaatgaagataaaaaagtttttgcttatacaaatttcatccattccagtaaacatgtcaggtgcgtggaagttaagatggaaaatcttatagatttgcatttggctgctctcttatagctcaatatttaattactttcgtttgttcttttttttttttttttttttttttgagacggagtcttgctctgtcgcccaggctggagtgcagtggcatgatcttggctcactgcaaggtctgcctcctggtttcacgccattctcctgcctcagcctccagagtagctgggactacaggcgcccaccatcacgccctgctaatttttttgtatttttagtagagacggagtttcaccatgttagccaggatggtctcgatctcctgacctcatgagccgcccgcctcggcctcgcaaagtgctgggattacaggcatgagccatcgcgcccgacctgtaattactttcttcaccttctgtagaagttcatgaattttcactgcttttatagattcaataagcattgaagtatgctcaatatttaaaatatttatctgttctgtattcctgaaattggaccctatataattatacacttgaatgtcagaatattataataaaaatattctccttaagatacgagatctagtcccagatccatccctaacaccatcaattgttggatgtcaatttccttgctagtttattttatctatataaaataaagatgagttaagaaccccatcctaattctcaaacttttgaaagtaattgggaggaacaagcaaaaataacatttgtgattgtattgtgaaaaaaattacccagttctgcaaacgtattactttatattctttttgaaatctatattttcctggcaccattaaattacataaaagaaaatctaggactatttctgtgttaacacttcaaatacagcatatgaagtggctctgtttaaatctttgaaatctggctatacctacttcttttctaccataagtaacttagcaacacaaccaattcttaggtaaataaacatagtattaaaatatacaagtactgcagaacaactatcacatactttaggaggatgacatgcaaaatgtggaaacaaagggtcctgtagctaacataaatgtgaacttttgcagagagaaagagccatcaagagtttaaaagaactaggtacaccaaggggatcatgtatgtcttttgaactacttcctcattgttgcctgggaactaatggtaaaagtgtgggctccagagttagattacctgggctccagacccatcttcactgttactacctatgcaaacatgcgcaagttaaacaatatcttgagtctcagctgctcatctgaaaaataaagccaataaaatgactatgtcatagagatatgaggattaaataacattattcatgtaaagtctttgtacaatgtctgccataaaataagtttatatttatatatcacttaacatttttattcccaatagtgagatcctagatacaaactgtcactctgctttttaaagggtttgttgctacctgtcttctctaaaattaatgcatccaggagatgaattctaataaaaagataaaaggaatccaggcagtcattacaaaacagcagtgaaacaacccactttatctcaacatgtaacatacatacacaatatccatatattttatcagttaagcacaaagtactcagaattcagaagccaagaagaacctgaccctgggagaaaacccaatatatctagactctgtaatctcactcttcaaaacccaaagacagacttgaattacatagtgcagaaagaaatacttgccagtccttaaatcacagcttcagtccttaacattcccctaaacatcctcttcaaatatagcttccttcaaatatgtatttcttatctccaggatttatagatatcacttccattgccacatttcagttcttaggaaactgcatcataaataagtaaataaaaactatatgtccctgtatttttattttggtaaaatttaaggggagcatacaaaagaatgcccagactgatataattatttcctcatgtgtgaaattagcaaattgttattcaaaggaagtaaaactaggaccagagagctggcccagatttctttcattattgcaatgtgggtaaggtagtattttttaaaagtatatattatttgtttcagaaacttagaaagctcttgcatttagtgaatcccaagtcccttttcaatattgttggagaagcaacatacatagacataaatttcactgtaaagacacgtgatgaaacagcagttatagccaccggagaagcttcactgtacctctcgctggctgccttgttacttgttaaactgtgccttcagggtaattcaggggcatctcagctggaatttagtgtaccaaataatgagtacaatgtctggatgctcagataaagcagggttttaagaaccctttgaaaaaaattcatctttttttttcttaaaaagtttcattgaggtgtaattgacatacaataaaccacacatgctttaaatgtacagtttgataaagtgtgatgtatgtattcacctgtgaaactatcaccacaatcaagtacccagcaatgggattgctggatcatatgatagatttatttttagttttttgagacacttccatactgttttctatagtggctatactaatttacattcccaccagcagtgtactagcatcttaatgagaatttttgttaagctatctgagaggaaagcagggtgagatgatcaattcataatatctgtttaattttgtcttccatttgcctaagaaaactttacaaagtattttttaaaatcccaaatacccagtttttttaatatttcaatagacattaggtacttatactctttatgaaagtaacaaaacctctttcttattttcaaacatatagttagttgttccaaaaataagaatgcctctctctctctccttccttcctccctgcctgcctcttttcgtttttatccttctcctttcctctcctttctttttctctctttctctctatataacagttcttttctactgtggaaagaactttcataaatacagagtgctttgggttttaggagccctatttgaaagaaaacactgcccttttgttgctggtggccacatgagacaattttttcacttttacaccaacgttgaacctccttaattaaaacaataatcattattgtgtaatgactcatcacacagtcatttgcatagaaaaggaaaggaatcactggatgatggagcagggagcagagttacactaacttattttccatatataagtgccttatattggggagagataaataattttatttttgtgattcctctgataaaataatgcactttgtcattgacaacagacctgtctatcccttcatgttttcagcttccaacacagatgaaataaccccccttagatgcccctgtagcttattcaggggtttggcctttttgatcattctcataattactcctttgaaatatttcttcgttagtaaccctgtatttcactttgtatgagatcttctgatcccttatttttcccatcttggagttttttccaaaaacaaaatgtattttattgcttcatttacttttgaaaattttttcatctttattgaggtatatacaacaaataaaattgtaattttagggtgtacaatgtaatgattttatttatatatatatatatatatatatatatatatatagtgaaattattgtctcaatcaagtgagttaacacctctgtcacatcatttagttacccctcttttttttgttttgttctgtggtgagaacatttaagtatatttcaagtatacaattcagtatttgaaactatagccaccaaaatgctatatgttcatcataaaatttattaaactattcctaaaaataaatttaaaaaattgaaaattatttagtgttctatcacttataaacacctgctgttgatgttttggtaaatatgtttccagatctatttctccttccttccttccttccttccttccttccttccttccttcctttcatccttccttccttcttttccttcttccttccttccttctttccatccattcctctaacttgctgtattgatcagtaatatatcatgaatatcctttcttgtaataaatatttaactgcctcataattttaagtggctgcatataaactattaaaatgatataccttaattagccttcctttaggaggtttaggctatttccatttttttgcctttaaagattatgtgttgctgacatttgcattgattgttaaattctgaagtgagctagtaactatatcaggcagtgaaaactgtgaggcggactcattactatatataaggaaaacttccaatttcaatttgaataataagaattctgtaggagttttgtttcattctttgagaaatatctttacattttaaatatttgtttagggagaatatacctttataaatataaaggttatagttaataactgtaaatgtcaggaataaagtagtgttttgggttgttccaagcataaggttgtggaaagagtataaagttgaaaaccactgtctagaataacctcagtcatcccagcagagtaggggagaaaggtcttagagcatcaccatttcccttgtgccttagattttctaactgaggatccagttcattcattcaacaaaaatgtattaagttacctgggccaggcatggagctggataccagcgatacagcgatgaataacccttgctctatccttgaggttttcatggtccacaaggtgtcgaaggtggatagttattgctgcttgggaaattgtagacagcatcagtaagaatgaaaaattcttctggctttgaacccaatgtgcattctagcctggttagtcttttgcactcatcacttagaatattgtgctgaagccctgaaacatatcttgaaaaactatacttgtacggtgggttgaaagtcgccccttgacatgctaattagaaagaagacaaccaaaagaaaagtgctgcctgaggctagtcctgagagtgaaaaataagatctgagccaacttctacacttcttgctccttcttgagtgtgatccacattggcaggcataccatcatagagacaggaaagagttgtcacatcaagctagacagtgaaattcagccatctgattggatgctgggtttggttagaagacatttttatgtgattgttagagtactacaatatatgtccactcttacatacaaagaacaagagaagaattcttattgtccagaggctttatccatgtttctcaaacttcaatgtgcataaaaaccagctggagaacctgttgaaatgtagatttgtattcattaggcctggggcagagcctgagattctgcatttctaaaacacttctaagtaatgtcaacactgctgcctcacagattgccctttgagtaacaaggacctaaaatgtctttgtgccagtgagaattcaccttttgtaacttcctctatttgtttgcagctgtagtgatggtcctaaatagcatgagtgtcagctggagcgcccggatccagattttcttaaccttttgcaagctcacagcaattctgataattatagtccctggagttatgcagctaattaaaggtatggactgaaaagcaaatgctttttaaaatacgtatctgcttttggtcttttttaacactaacttttgcttgtactaacagaatccttaattagtctctgcctgtggaacttaaactctatattgtcatctaattgatttgaaaggctgctacattgtgagtgagttggtttttacagttgaatggcagaaagaggattaagaatgggccatgcaacaaaataaggcatcagtgaattttctaggtttaatggtttggagtgaaaactcgaagtggaaaaaaaaaaaacctgccacttagttttaattaaagataaatatgtcttttttttactttaaaattgtccaataatagtaataaaaattaaagagaaaaaggtatctggaaagtgataaaagatgatcaataattctttgactttctggttattattccttttaaattgagagtggtatcctcaacagaggagtcaatacgggaacagcattcctaaacaccaaaattatatcacaataaaatagttgtaaaaacttaatttttattgttacattatttttaatataaaattcgcatttctgcgattacttgctttatagagtttaacatttaatttaaaaaaagaaattgagaggtgacatttagagtttttgttttaggaaagaaggcacatgcagttgcttggattcagtggaaattgttggaggacagagattcacatgtggtatttaattagcaacaggaatatagcaggaaataaagtgagaagaaattgtaaaggaatgacataacttgggcatgttaagtatttaatgtttacattgatattgtctgttccaagaaagggaatctagagaaatttaatgacgttgcagaagaattacacaaggcaaaaggaaatgccagcgtttggtaaaatcatcactgttggtagaagcattaaataatgacaaacactgaaggatcagccactctggagctgggaaagggagctgctgttgcccatttaataagcctagtgggagattttagagccctgctggcggaaatgcttttatgaaatccagcaacagcagccaatgcagaataaacacaatgaagattttgaccgttagagcttgcactgaagagaagacaggagcttgctcttctaatacaccttggcctccacagagctagcctgctcatttctatcttattcgttaggaatgtaggcacaataatctgttttgttagtgctttatttttctgagctaactcttcagtcttctgtaaggagtttcttcagtatttgaaaagtgcagaatctctgggtcattggctgttctttaatactagtttagattccaaaagattatatgctatcccttgaaactaagatttattttcttcttctttttggtgtaatgtaagatactataggtagcattatagactttattcaatttttaccaggtatttatatatgtatatgaggaagggtttggttgcccaaatgttgctctattgcaaattccttgagagcagaggtcatgatatatcttgaggtttttttagtggctaaaatacagagacactttaatcaataatcatgatatcaatgcttaatgtgacaggcttattcagagatctcacacaacagagaaattccctgagaatattaccgcatttaatgtaaatttaacattttagagaccattattagcaggtatatttgctcgattgctgtaaaattgtgattttcttcatctctaacatgatcacacatttttcacattaatctgaaactctagtaggagactttgttaatacagattgtgcttttatttctattctaatcatatcctgaaagtagttgtatgttatgtattcacttatgagagtttgttgaactttcctttgaatattgcctttaatcttcatgagacctctgttatatagccaaaatattcctgaattctagaaacaaaatgcctctcttttgtaatattctcaaaatggcacttttgaagatctttgcttgtgacccagtctttatagaatttggtttttcttatggattatttggtgctgcactctaagaaatattgtgcctttatgccaaagagaccacagattatgataaaagaatattcaacagatgcttttatctgaattccactatttatatttttctcctggaaggacacaatgatgttttagtaaaatgggcatttctgaatttatcatgtcatttaaaaagtgagctatgtttgggaatcatttgagagaaaaattgtttagtatataattcaacattctccatttttggtcttcatactcacacatattatatttatatataagttatgcctgggcaatgaatgcaggaaaaactgagatttgacttggaagagagagtgtctcatacacatcatccaccccctgtcccccttctgtttatttacatgaagttttattttaaaacaaagtctcacttcccatttgggtaatctcatttgctattttctttgggtaatagaaacattttttctgcttaagcttgaatattgactgactaaagtaaatctgaatttctaacttttaaaactattcaaaagatataaaagaaaaagctccaatgtgattcataaaatagagaaaaaggtgaagtgttcaattcacatgctgctgcaaaatttgttgaaacctatttattttagagttcattataatatcttttcaatatttctaggaaaaaaaacatgtcattctctaggacagggtcacagagtgagtggactttctctgtaaaggacaagagagtaaatattttcaatttttcaagctagctgtatggtctcaactctgctattataggttgaaatcagccataggcaatacttcatgaatgggtaatacttcatgaatgggcatttttaacttatagataaagaaaactttatctataagaaaggcttgcagccagacgcagtggctcacacctgtaatcctaacactttgggaggccgaggcgggcggatcacaagatcaggagttcaagaccagcctggccaacatggtgaaaccccatctctactaaaaatatgaaaattagttgggcatgatggcgcgctcctgtaatcccagctactcaggaggctgaggctggagaatcacttgaacccaggaggcggaggttgcagtgagccaagattgtgccactgcactccagcctgggccacagagtgagactccatcttgaaaaaaataaaaaaagaaaggcttgcagtttgggttgacacacatggtcttcaggattttccaacttctcttctaggaggtaggcatctaatgaacaacatgggataaacagaaagcagaaaggtaaattgtgtaggaaaggagtcctgggatttatttccatctcctcattaagggtagaaccttggatacctctccgcattttcttgccaagcaaaacattatctttttaagaattctatcttttaagaattctatcatattcataaagattataatttacagaaaaccctttagtcttcttttatggtcacaatagaggcatactcaaacagaggattatttttcaatgccattttcatctttgttataaatttattaaaagagaaatatgaaatagtgttaatgatcaatatacttttgggaccccttctatagaatgggtacagtattgataaagatggtaatcaacagagagtaagaaatctagacttacaacagtatgtttctccgcacccccatgtttctggttaagagtgaataagaaccaattctttgaaaaatcctaaaatcagtctattctaattacaggtcaaacgcagaactttaaagacgccttttcaggaagagattcaagtattacgcggttgccactggctttttattatggaatgtatgcatatgctggctggtaagttgatagctccagatctggtggtttgcgtagttcattaatcccattatgcactcagattaagtgccaagcaaggtgccaggcaaatgtgaatagccataatccagtgtgataggctttacttgaaatgagaaataaggtattatcccctccaccaggccaattactttgcacatgacaactaaacataacaggtttccagtcaaggtgactgctagatttagcctgatgtcataaaaaacaaacaaatgctgggtcttaagatccaataaaaattacttataagtatgtaccagtaaggacataatagtgccgtaaggtactaaagaataatacttcgcttgtcaaaaggcctttcagctaaagctccaagggtgtttacaaatagtgattaattgatttttttttccagcttctcgtgagagaagtaactcagatgtagaaataagtatgacattcccagaaggtaaatggtaatctaaaggcagagaaagagaaaccaagataatgcagtcaactcttctagacagtctattacatttaaaaggaccttacatgttccttaaaatgtccccaacatctgaaaatttaaaaaagtgaagatgattaaaatcatgatgccacagatatatttcctttgatgtatgtccacctgtgatacctacctttctagttaaggcattaaaactttgtatttgtaccttatttgttcagatacttgaaaaacagtaatcatgtaatcatggataagagtgggactttctcttcagtaaattttattgaccttgtaagatttagttgagatgatggttgcaagaaagcctacaaggtattatttaattatcaaaatcattgtagtaagattaaatttcattgttttgggataaatcatggcaatgtttattttttaattatctataaatctcattgttatacagctttagctgtgagaatgatctatgagcctggaagtaatattaggaaaccacactagctaaaaaattatatgaatgcatttccaacacaaatataattccttttgtttttttagtttttaagatcttaccttctagccgatgcatggaatatggatatatttcaaaatgaatggagcgtttaccctattaatctcattgaattatgaaaatatggtattagaggataattagggggtatgggaacttaaaatcttaacatggcctttgaggcaaaatatgcttgaagattgttagaagattatagctctaaggaaatcagtgtaaaatatttgtatattcccagaatatttttataaccattatatgtaagcattagttttgaatcactcagtatttttgaagtctttttgcttttgtctgaagcacaatgtggtgctagacatcaaaagaactgagcgtgatcacagggttaaagcagaatcaactgttctatggctattcagcctggatcagagctctgtgccctggggctgaagccaagctactgggagggtcactgggagacaccagagcaaagcggggaggtagagaaagctttcagctacagccaagtgttgggagccgggcaatatgcaaccacgagtgtggaatgtgaagatagtcacaagggaggtttgattaattctgttgaatgaaatttcttttgcctgagagtacgatagatctgttcccatgccatcttaaaatattcttttaccctcctcacttttctaatacccagaactaaaaattcaggtcacttgctttatgtagagcaaaatttctccgcttatgtaggcttttgagggctgatgaatttctccatggatgaagacccttttcattttgaattattgtactaatatttaactttattgatgctgaccccaaaatgtttctctgattacaaggtaaaaggggtttacatgaatcttttttaatacttttacccatataatcctcatgtctactccctatttgaaagaccaaaaaccattgatttctttatatccttgagggttcaatcacagtattggaaaataagtccaggatttaaaatggaatgttatctgatacaagtggcttatgtaggggacagataagtaaccgtgtttctataacaggttgttgtgctacctgaatgctgctttgtgaagacgcagaaataatctggctgttaatctatggtcatcagtcttagaaaaaggaagctgtgtttagaaaaaatatagtctgttggtgtggggttctagaggaaaagttattatctggatgtaaatgaaacaagatggaggctaaaagaattccaaagagaggggcatttattcacttgccaaatgtgatctcgcctttctgacctttctctcgctttcaagatataattacaagactgggttgtagaattatcagtgggtaagtgtaaatgattctccactccctatgctgctgctatgacaatgtttgatacccccctaataaaagggcattgaaaatgagtaagtcagaagcaaaacagctattgtcatcagagcttaccgcccagcctgttagcctgtaagtaaaagctgcaagaccattgttgtcctggagaccttgctctgctagcaaggaaaaagataccaccaagcccagggtggggatatgaatagtggaggtttttgtctctgaggaatgctgaaactttctagaatgataaagctacttcacagaaacttgagtaggggaaaagaaatcattaacccagtcaggtcacacagttgggtcggaacaatgttaataacattgccaatgtctgcgttcagagaaatacatctgccagtcccccttgtggccctggggaactcagtcccatatcctgatccaaagctaaacattgcttggtagggttttcttttttttcaattgtgtgatagaaaatcgtttttagtgtctttttctcttccttttaaatcctatccccctctatggatttagtctttctaaagcacttgctgggattattttgtactgttgtgtcaaatctaatctaaagaataagcttcttttaaaaataattcacatagttgggtattggaatgcattgctagcattgcagtaccttttatgcacaatcatggaaaagctggaacaatagatcttatgagcattcgctagagtccttgaagtgttgtaaaccaaagagaatatcatggtcattcctggagactagaacgtaaaggtggatttcccacaggatgtgtgaatgtttggactaaaacaagaagctttctccttcctactcaccatcctgctccaagccctttccttttctctactccctggagctgtggcaaatatttgaaattgtgttctatttttcataaatattttctttcttgctttaacattgtgggaaaagactactttctaaaacaactgttaggaaggaactggctatttttgacatgagaagcctaaaaatatttcttggggtgtgtgatttttcattggtggtggtgtttgttttttagtgtgcatgtgtttttttttcttttttctttccctacttcccattgcctcaggcttatagcaaacacatcaaacccctcttggagtgcatattgcagatataagtactgattgttgcttgctttcatggtgtaactacaatctctatttatagaaacttattttctagtcattagaaaaatctttggttgctgactttttagatcaccgttactgctactgttctgtcagctcctcaattatttctacttaaaacagtccttaaaattgtagacactttaaccttgaacatcaactgactacttgtgaatttaggtggttttataaagatggagcaagacaggtttcttcatctttgttttagctggtgagatacttaaagtatattaagagctgatggacttatattccagccacttgattttcgattttagagaatttgtacctatgaatctgtgctcctgcatacctatgtaaaaggttacttttaataataataagataatggaagattatattgaatatatgattttttttatttcacaaaaattttctaagcatagaaaaggaaaaggtagaaaagtctttgccttcatatgtttggctctttctatagtaatccctctgtcacacttgtactgcagtgtacgggtgctcattttcctgtgcctaacccctctgccacacttttgtgctcgtgtgctattctcagtctggaatggcctcacaccacctcaccagggtaagataaagcagttcttaaaggttcaagttgggtgatgcctcctctagaaaaccccctttgacctaccaggttgggctagacctgccctctggctcccacgtgcttgctccagtattggacctgcactgtatcacactattctgtgggacattctatgagctatgagctccttaagactatgggcttaccacttgtatatttctgacacatgataaaaactccacaaatatggcttaatagaaaaatgacttatgggagtatttagttgttagatattttcatcttactataagtattgttatagttttcataattctgggttcaatgttaaatatttaaaatttgagactttggataatggtaaaatatattaatagtttataatttatttatctatttttaggttttacctcaactttgttactgaagaagtagaaaaccctgaaaagtaagtagccagatgtaccctgaaatttttatgaagaataaaatttaagattacatagtttaaaaagcagacttgaagaaggaattcagtgtgggctagtcaaccttaacatcgtcatcatcatcactataattctcttagataagatttatttgactttatcataaattatatacataattatatttataattatatacaaatagcttaattatatagtctacattcaatactaagttgtcttttaacctgaaaataggaaataataaagttatattttaggtagcctatcccatataaacacatacatataacttaatacggactctaaactacccacgggatagcttgaactcaaaaagttaattatttctaacaattcatgtaatcttttttcataactatcgaattaaagtgagtaatgtaattaatagacgactagttacaaaagcctagaaatacctgcagaatgttataggaccttataaatttggggagctggataagttttactctttctttctaggtaacaacttgataagtagatgatttgatgatgatttatgtaatattttcaaaatgaactaacttagggaaaaatgaattattcttataatttgttcataaacattggatttgctacaggaaaaaataattcatgggcaaaagagggaaaatgtaggaactgtagtatagtataaaatgtagactaaattataaagttatttaattcattttactttattgaacatctgctatgttccaatcattgtgctgggaacagctttcatgatgcataagacttgtcttgaagtattttattgactagtcaatgagtcaaatgtgtaaacaaatagatgtaacagtgtgattggtaccaaaatagattatttatccagtttggcaaaaaggaaagaaggaaatacttgtgtatctagggagatgttgtttataatagtgtctcaaatgatgagtaggtgttccttaggtaaatataaatgagagagaagaggggtatgggaggagagagagagagagatagagagagagaggagaaacacaaacacaaacaaacacacactgatttctaggaaaaagaacaagtacaaaggtgcatcagtatgaaatagcctggacatcaaagaatatacctaagggttgacaattcacactaagatagactaggaaattctggcacctggtatcttgggaaatggtaaactgatgagatctggccaagtaccaggaatgtcggagtttagaacacataagccagcaattggtatctgattcaactgctatgcaaatcaatatgtaatttaaacatgtgaaaggccattttattaagaaatatgaccaatttatgccaatattgtcatatctataactggaattgtaggtcgagaacacatatttaccaagagctagttctttctaagcgttacttggaaatgacaagctaccttacgactgtaaacccattgattacagagataaataggttggcctgcctttttagtttttgagaataacttgtatgtaagcaccagcatagagaaaagacagttagtactggatataatataaaatatgtattgaatttctattacgggaaataaattactatggttcgtaactatgtatgttaagtctaaagacattttaaagacatcaattactagaatttaacatgagaatatttttataagcaaatggcaaattgtagggttgcagacaagacctataacataacatttattatatgattcatcagtggtgtagatataattcatattatctttaatattatttaacagtttaagtgtgatttttgtttgacacatatatagtaatactattgtgtatattaagcatatcttgaagctagttatgccgttattacctcaacccaaatttctgatgtattctactaaactgtgttccaattaaggattgtctccttctcttcttaaattaaagggccttagttgcacactactgataatgtccatgatttagtgcacacagatactaaggaacagtgatggtgatgtattgattcagtgttttttttttttctgttgcaaagaaattcccttatctaaaaaatggaaataataataacacatacttcactgggttgtgttgatgaattaatatgcataaagtgctttagattagtgactgtcactttttaatttctacataattgtttggttgtcattactactattactgttatatactttattagagcaaggtaaatgttattcacagaatagtgttttctagaattcaatattccaagcaattatttttcttcagagcttttgaaagaaatgtgaaaaattacaccattttgaagcttactttctaaacttttagtgtcaaacctcatatgcatttttgatctctattatgcattcttgatccataaaatatctttatgggatatctatgctatctcgatgcatgcatacgatgtgtaatgatcaaatcaggataattgggtactcatcacctcaaacatgtatctttttttgtgttgagaatattgcaaatttctcttttagctaatttaaaatatactatgtttttgataactacggttactttactatgccactgaacactagaacatgttttatctaactgcatttttgttttcaataaccaacttatcttcattactttctccttatactttataacctaggtaaccatcattttactctacctccatagggtcaacttttttttagctcacacgtgagtgaaaacatacaatatttgtctttctgtgcatggcttacttcacttaatataatgtcctccaggttaatctatgttgcttcaaataactgaggatttcattcttttattgaatgaatagtattctagtgtgtgtttatatatattttctgtatccacttatccatggatggactcttagattgattccatattttggctattttgaatagtgctgcaataaacatgagaaagcaggtatctcttcagtataccgatttcctttcttctggatatatacccagcagtaggattgctggatcatatggaagttctatttttagtggtttgagagcctccatattgttctccatattgtctgtactaatttacattcccactaacagtgaattttagattcagggggtacatgtgtggcccctgaatttaaaataaaagtttttttatttgttatatggatatattgcatgatgctgaggtttggggtatgaattatcctgttactgttgggtatggggcatagtacccagtaggtagtttttcagcttttgccccactcttgccgtccttactctagtagtccccagtatttattgttcccgtctatgtgttcatgagtacccaatgtttacctcccaattataagtgagaacatgcagtatttggttttctgtttctctgttaatttgcataggataatggccaccagctgcatccatgttgctgtaaaggacatgatatcattcttttttatggctgcatagtacatgtatatgtaccacattttctttatccaacccacttttgatgggaactaaagttgattccatgtctttgctattgtgaatagtgctgcaataaacttatgagtgcatgtgtctttttcatagaattacttattttcctctggatatataaccaataatggaattgctgagtcaaatagtagttctgctataagttctttgagaaatctcgcaacttctttccacagaggctgaactaatttacattcccaccaacagtgtataagcattcccttttctccacagccttgccaacatctgttattttttgactttctaataatagcccttctgactgatgcgagatgctatctcattgtagttttgatttgcatttttctgatgattagtgatgttgaacattttttcatatgtttgctggccatttgtatgtcttcttttgagaagtgtctcttcatgtctttcatccactttttaataggattatttggtttttgcttgttgaattgtttaagttctttatagattttggatattaaacttttgtcagatacatagtttgtgagtaatgtctttaattctgtaggttgtctgtttactctgttgatagtttcttttcctgtgcagaagctctttagtttaatgaggtcccacttgtcaatttttgtttttgttgcaattgcttctgagaacttagtcataaattctctcccaaggccaatgtctgtagtggtacttcctaggttttcttcttgggtttttagagtttgaggttttacattgaaatatttaattcatcttgttaagttttgtatgtgatcaaagataggggtccagtttcatccttctgcatgaggctggctggttatccaggtataccatttattgaatagggaatcctttccctgttgcttattgttgttgactttgttggagatcatatggttgtaggtgtgtgactttatttctgggttctttaacctgttccattagtttatttgtctgcttttgtacctgtatcattctgtttgggttactgtaaccctatagtatggtttgaggtcaagtaatgtgatgcctctgggtttgttctttttgtttggggttgctttgcctatttaggctcttttttggtttcatatgcattttagaatagttttatctaattatgtgaacaatggtgttggtagtttgataggaatagcattgaacctgtatattgctttgggcagtactgccattttaatgagattgagtcttttaatccataagcatgaaatattttttcgtttgtttgtgttatctatgttttctttcaacaatgttttatagctctccttgcagagatctttcacttccttggttagatgtatttctaggtattttttgttgtcatttgtgtggctgttgtaaatgggattgcattcttgatttggccctcagcttgaatgttatcagtgtatagatatgctactgatttttgtacattggtttttgtatcttgaaactttactgaagttgttttaaacacagaaaatgcttccagaaatattgatgggtgaatatcaaacacagatggtaaaattatgtggacttagcccagatgtgtaatttgcattattttttaggtagatacagcttcaaaatacctttagttacaagggagaataattatgattccatcttctttgtgatgtgccaagataaatgtgtttcccaatcagtcatggatacatgtgtccaggtgtgcggcaacatgcaactttctggcagctggtgaaatgaatcatctgctgaaaatacaacaccctttatggtcttcctccacctagacaataaaattttcctaaatttgtgacctaatagaaagatgataattaatttagattagtgaaaataccaatgtgtattaaaatatatagaattcagagtaagtttccatgatctcaattgactacactttaggtgtaatttcattttgagacatctttcaaattatctaccattactccaagaaataacttttgagctgctattataagtaggtggtataggacagttccttaagtgttgtatcgaatgagagacaaaggtgggcaaaatttctgtttgtgtgattacatttataatgttaagaaattttgccatgatctttcttacaatgttttcttctccaagaatagctttgaatttatggaagtagcaatctttcaaatacaacaattgctattgaacttttataataagagtattgcctttaccaattatctataacattatggctgactccacaaattaatatattggagtaaggattgtattttgagggacatgaatgtccaaagtttggaccatgaagatgatagaatcccaaggaataactgaattttaaaaggctttccccccaaaaatggcatatatatagtagtaataattgctactgtgtacatttgttttaaaaaatcctagtgcttgtgcaagtgtaatgaattttgccttatgacatgacttttgtggtgactatgcaatctgtcattgttcaaaaagttacacagtgcaaagaacatatcattgagatgtataatgtttgtaatcctgctcttagattgataaatcatatcttgtgttgatgaaagccaagaaatgaattgcttttctttgaccttgggggtctgagattagccactttgtctattagccttattccagtgttcttctcacttcatttattccttctgttttgaagagctggaaatagtagacttagaggaagtcagtaaaccttgatatcatcagtcatttttgaaaaacaggctatcaacacgctctgaataatcaactttaatagaaggtttaaataatcagagtgtcatgtttaattaatactttgcctacttccagtttatattaattgatgcctcaaagtcatcacaccttgtaccaatgaaaacctcgaagaagtgaaacttggtttgggaaaaatgcccaaagacctttaaggcagtgtgatcaaccagattggtctacaaatggtccacaatcatgttatttgcattcagttcagatgctgccgtcttaaaatcttagtgtatctgtattaattccttattgactgtgtaattctttacaatactgttttataaggcctattgcttgtaggacagttttataaccgttacctgagtaaaaaacataagaaaacaaaataggcaaaatatcttgcccaaatgtgttgtagcaaagttacatgactaaagaataaaggttaattgaagccttttatcttgcattttgacaacttgggaatgcggcttgctttctttctccttttattttttgagacggagtctcacttactgtgctgcccaggctggagtgcagtgatgtgatcttggctcactgcaactccacctcccaggttcaagtgattctcatgcctcagcctcccaagtagctggaattacaagcatgtgccactatgcccagctaatttttgtatttttagtagaaatggggtttcaccatgttgatcaggctgttcttgaactcctgatctcaagtgatccacctgcctcagcctcccaaagtgctgggattacaggtgtgagccaccacacctagccaagaatgcatctttccatgagagacaaatattcctctttatatgcatttagttttctaacttaatagtcgctagaaaataacatataatattgtaactgtatatgtgcagattacagcaatattgtattttgtaatctttttattacaagtcaatgttatctacattcttagacaacattaaatattactttaaagaatatttccaaagtttctactacaaatactcaagttatatgtttttaagatatgtattaatttatttacaagtttataaagatattccctgtggcaaaatgaggcatctttttactaatgacaatatgacatcattagaattatcttaaaatgtgacactgcttttcttcaattgttgaaataattgatacctaaattagaatccctctgggggttttttttttttttttgcttttctttagaaaatatacataaagcttgattaatccatttttaaatatgtttcacagtagaaatagaattgtgctagttgagccactgaggcagacaaaagatcggtatttggccagatgtcacagagaagagatgattctgtgttcaaagaacaaggtcaccaaattgctcttccttgcttttgttcactctaaaaatttcgcactaatagaacatgtggttgatgtaccttgggatcaaaattcttgcatttctcggcatcacatatgcataaaaaatacattttgcccaaagatagtttgttcatataaggctgaagtgtcaaataagtggtgcagaaattataggattatattataatattttatcatggggtaatcaaagaagacagatattaatccttcaagtgctttgtggaagctatttagcttttctttctttctttttttaattgtaaggattccaattccactatgaggcaaaatttgaagggcgatgctttactttctttcataatagttgtttgaaagttctaattttaatctcattgagttttatattttgaggcaatatatataaatcttttgaggctatatatatatatatatataaatctcattgagttttatattttgagaacaataaactcttgttttaggagcaacaacagtggctggtttaattttatcctatctttttgttccctttagctgagagagagggagggagggagagagagggagagggagagagagagacagagagagagagaatacaagtggtgtgatgagtagaataatagaatcacagaatttcaaaattagaggggaccttgaagaccatctaatcctttttaaccagatgcagagatcttctctataatacctttacacagcaataattcatgtatgataaattgagaaactcactgttaatataacttccttgaactgggctatcagccttttttacttccttatgctggttagcaacctgctaattgctatgactatttcaagcctagataaatttttggttagctggcataaaagatgggtcaaatattttgactgcaatagataacaaccaaaatgagagttaaataaagtacaccagagattccagagttggaaccctgttatctgaaaagaaataccttccataatcagaagcattaagtcagccattatattgtctccagcttttcagtccacacttacatagcacccctcattcatattcttatttatgcacgtaagctacctttgttcttttctatatgtctggatttgaaagttaggtgattgtgaccaaaatgaggttcacaaataaagcttacattctgtgtcatacttggtgaaaaacttcttagacaactaaaatctagtccaaggcctggtgctgtctgggcattcatgcagatgcaatgttgtttaagattctcactgaaatagcataatgtcacatgtagttcactaagggtagagacaagatgcattcaggttattatatttacacacaccatgcactgaaatcattttgataactttattctagtcacattcaaacactgacttagattattgatctactcaggaaaatgagcaacttttgaatttggatagacacaagctaaaactgtattaccaatgtaaacatctaaaatgaaccaaatgaagttgagactttccagtgaaaaaaatattttctttacttatatgaactatagaaacatctacttgctgagtctttgaaaatagcactggttcaggaaatcaaaattctaatcctgtctctttttaactagctgtttgaccttggagagacctctaaattgcttccgaatctttgtttaccagttttaaatggaagatgataatccctatattatagttctcatggggttgtgaggataaaatatgtgaaattcaaaaatgttaatgagctctgcaagtaatatacaaacaccatctgcaaccaaaacctatattcttcaaagattagaatattttataatctttgaaaaaattagaggattagcataattgttttatgaatagggagtgccttttcacatacatgacctattaatcagcttgaaaggttgttctgcatcatcagcaaagtgcccaattattagtagttaaaaggttcagaagatgatgggaatcgctatttattttatagtctactaacctccctcaggtgacaatatgctcacacatcgtaatcagaatgacttcctggcagatttttttttttcttcttaaccaaatatttgtatgctcacacccctattgtcatcgtcactgttggctggttgtgctgatataatggatggactgtttgcgtttctactgaagtcacctatttttaggtttactgtcttaccaagaaactcctttacgaaatctgacaaacaagatcttgatctgagtggctggcatcatgtattttaatattttatttttactttttctagaaaaggagctattctgttgatacaaaacagaagaatacaaatacaagtccactcccagataatttttatgcatttttgcttaatttaaaaatataagcccattattaaaaatacaaacagtatctgctttctgacaagtagattgattgcagcgtaaaagtagcacctcagattacttttaataacatgatgtatattatcttcattctgcgctgtagaaagctgaagttcagagtagtgaagtaatttctcatgcccatgtagttagccaatgagaagaccagaattgcaatccatgtttgcctggttctagagctcatactctttctaacgcgacagctggtttttgggaaaacaaagctgatccatgagggtacaaggtgaatggctaaggaagtaattttgctatggaaaagaaagttggaggaagagtagaacctagaagagtagaacagagaagtgaagatgtctcgggcagcgggtgagcatacatacagccatagaagaattcttggttttagggaatagtatgtagactgttttgactaaaggaaaggattgtgaagaggagtcaaaatcaagatagtagtaggatgtggataaggggatacagcaactcttagactctactataagaattttgcatcttatccagtagccaatggtgggatggagggtgggaaaactgttgcaagttttgaatctatgggaagcagtgcttggagacaattaactttatgacaattttagtggattttcctcttgtgacacatatgcagtttttaaaaatttatagtccatgaagatatgttttagttttattttgcatgtttattttgctttttaataaaagcaagtaactctgttaattgcctcatacacctgcatcattgctaaagtcagacaatatgataaatcatgtggcagaaattatggcaaacagcaccataatctccacactgtccaagtccaaagatatggattaaactgcttagaggaaaaggatgcatcagcatagtgtttacgtactatgcaaaaatatagagctatctttttttaatgaaaaagatactatcatttattttccctgacaatggaagaacaaatgggatttaattaaataagaatatagttcattttaaaattaaatttatatttcaaaagcattgaaatgagaatttggttaggcattggaattctcaaaatagagataaaaaggattattgtttagccacaatttaggggatattcaggttgaaaaaatgacacactaatgcctaaatatgtttctagttctaaaatattatagttatctttttagattactgaatatatgagaacaaatgtagggaagcatgccttacaccacaggcctattttattggggtggggagggaagaaggtgtcacgtacttttaaggtaaaggaagtccttagttagattttcctttttcttataagtgtggtaaggtcaaatagaaatcttaggtcagagtttctaaatattttaaataaggtgtattaaagatctgattttactcatttcgtattctaagtgaagggcaggtataaggaagagagtaaaatagcaatgccagtgcaggatatgagtcagcctggggacaactggcacttccaggcacagtgagcatcacactggtgttgtgaaggtagctctgcacttggagtcaggtggctacagttttagctcttgttttgtaaatatttgattttatgtccttagctacatcttttgtcctctctgagcctctgggttatcggctgcaaaaaagaaatggtggagtagcaaattctgagtctcccttcaactctagtatgttctatgattcttgtcgatgacacacgagtacctagtttgacaaggagagtacatgactatgggagcatggctgaagggtggaaatgtaaacagaatatctgtcttagggacactttagaaaaagtgtcaagaacatgaatcaagagaaagggatgctatggccattttccagatcccatgatggttaggagattaggcaggaccaaagtttcctcagttgtctcagaaaatgttaaaaagtttgaatgggtaaatggaggaaatgagtccaaactggcaccccttcaaaatggaaacttagttattacatctgaagatctaggatcatatccaacctatagaattgaattctacttaagggatcaccttaagtagagtgtcttgtgatataaggagtgtaccaggaaaaatatagattttaaaaatgcttgttaagggtgccattaatgtggtataatgatgaatccctaatcctatttactacttttattatatatgcccacagaagatataaaatggtctgtagcctctgtggtccagaaggtttatattagtcttttattatgtgattcattatttttctcaagagcatagacatatgggattgcccataagtatccatagatgcaattatatgagaggaatcttttctgatgggtctgctacatttcagtattagacattccccataatttagttaggattgcatttatatatttctaatatgctgcatacataaagaaagagagggagcgatccttgtcatgactttcaaaagtctgcattaattcattccttttcccacctaagtgggtattctaatgcttaccttaagatcgttgtgagaattagatataatttatggctgtgtctgacaatgctttgctcatagtagatacttatttaatggtatgctttttattggtattaaacatcatgtcattagttcatttgtcacccatagggactatcagatcaggatttgtggacatggggaagctgtttcttttcttctgtactgcttgactgttggctttgagaaaacccattctcacgagggaaaagacactcttacttgaaacacccggccatgggaaatgacaattatctcagtctcagagttgaagcatttctaatctccaatgctggaggttgtttttcaagaacatacaatatttttataattgtttttctaaggagacaggctcatagttttttaaatcacatggttttcctggctatttagtgctgtaccatattatctttctttccctttcttatatgctttctcttaaaattatagaagtggaagaaatacatcttgctgtgacaaaagcttaaacaataacccgtactgatacatattattgagaatgcagtgatcaaatacaaaggccactgttttatatatcaagctgtacaatactatatgaaaaatagttcatgatatcaagttcatggcatagcattaaaataggccaaaatatgtaaaaactagagcttataatacatagccatataacacaaaatgagatattaaagaatagaatgtatgattttatgagcaaagtcatttctaggtcctgggagactgccccttgcacaatgcttttcttggtatcccaagtcccacctcttccgaagaatctcttctattggcttttcatgatgctatttcttcttcctccctgatagtctatggtcatggccgttctctaagagatagatagcaaaggatttattatagtaatgtctctacatttcaaaatggtttcaattatcatattacccgtgtgtacaaagagttctctacttggttaccttcttctattcacacattgacttggcttagtgtattggactcattgtcataattaaaaccacaattaatttgaccttgagaaaataaattgtcaaagcctgtgatgttagagttaggaggggaggaaccatcaaaattcacaacccttttattgtgaagctaacgaaatagaagccacagagatggattaatttgtctatatttataagttaaaatcctgatccttttctagtactctttccaaatgcttagtgttgttgaatagaaatctaagaaagatggctatggcaagattttagccttgaaattagctgggggaaatgtaatcattagaagtgacctctatgtcatttgagaatagaacaaaactgcttttaaaaatgtgtcagagcattaaaatttgcctgcatttgactttctaaagctgttagtcaaatagataatgaaagagggtgctaggctagttgaagtaagttaatccatttcaggtcgtttactgaaggtcatttggttagaagattaaaatagaaagtttacaattaggaaatgctgaaatgttagaatattataaggaaatagctgctttttattgtctttaacatctttacagatacactggctcttaaaataggttaaatatcatttgtggaggcaatatttaatttttctgttattgatattgtcaaacaaagtctcactttctatattctggcctgaggcaagtaaaagagaaattgaaatagaaaagaagattaactttgttttcagccagaaaatgacaaaaagaaacgagggagatagacagcaagtggaggtcatgattttaaggtactattcgctagctgctctgggtcttgtggaaaaaggttaaatgtgttttaaatgtatgtaagtgtttagctatttattcctcacagtgcagtgtcctcttgccaaggagaagtgatcaagtggcaaatgttgggggaaagccactagaaattgaactcaatgatgtctttctctgagctgcggaattgtttgtctttatgccaagtcacaacgtggactctgaactgcagcaagggagaaatcttcagtttgaatacataggtgcttttcaaaccattgagtttatgatgcaagtctgtgactaggcagggcaggtatttcctgttctctaaaagatagtgctagttctgctctattgctgccatttctatagcaatacctgggtggaattccctccctgcttaaccctgcctcctccactccctgcctctgatctatgcgcacttagaaacacaggatatcctgattatcctgtttcagtatttctcataatggacacatattgtttattctatttttaaatgacgggaacacaaatctctacccagtagttgtggtcgatgatccatttagtcaaatgaagaaaggaaaatttatatgtattctgtaccttattggaagtcaaagtaaaactttatgattgtggtaagtattttcagtaacagtatatagcatttcctcctttcttttaataataatagataaacaaatttaaaatgccaaaaaaatatgatgaaattaaaaatcacctgtaatatcttaatcacatcaaataaaagtactcactgttattattttgatattttgtttcccccacagtttgtgcgtgcgtgtgcatatatgtagtgcattatattgcttgagataaatgtaaatgtgcatttttcttcctaactttggtgttatataatgtatttacttgtttgtttattgtctgattcccaaggccagggctttgtctgtatcattactgctgtatccctgacagctggaaggttcttccaagtgtgccctgccatttagatttgctgcatctcaagctcaactccagctctttctacttatgtgctatagatctgtctcaccgtcttcatttcatgtcattttattatattttcgtatatcacctagatgttagttaagaacatttttaatgctagtataatatttctttgtggggatgtgccaatattcttgtgctcattttcttgttggacattgaaaacattcctaatgtttcttaatgtattaggttggtgcaaaaataataataattctggattatacatttcatatataaatccttacatatccaattattctcttagaatagattgctagaagagaattgctgtgtcaaaggcaacaaactttaaaatggtctgtctattatcaagttgctttccaaagtggatatattaatttcctctcccaatagcaatagctaagaatacttatagtgttgggtgtcattattttaaaaaatcctggttaattgaaaggcaaaaattacacctcatggtttgaaaatgcattcatttgatcaccagtgaggctcaatacttccagcatttttagcagctacacgtggttaccattttggagcatgaatattggtgattcatcagaattctttgtatattatgggtattgattctttatctattatattatttgtaaaaagtttgtcccagtttttcacattactcaattttctttatgatcacagcttacaaaacttgtggttttgtttctataatttgtagttagatataataatcattttttatttctgtattgctattatgatctgcaaatttttacatccctagatcattttcatctcacccatattttctgtttgtttgttttttctggtttcttttttacagcccactctttaccttatctggaatggattttttttttaaacctgatataatataggctcttgactttcccccaattttctcaatatcccagtattagcaaatagtcatattactccttagtttatgatacttacattatattatattgatgatactttttatttattatattatatttatgatacttacaatatattacattgatacttgtcattataataataaaattaatgtatttttatgttatatactaagttgtatttcaaggcaatctattccacttgcctttttatagatatatcaaccaattactatataattttattaaaagtttgtaatactcttttttaatctgaagggaaaagtagcctcaattattattatttttctctgaataagtcaacattgagtataacttgtatttgcatagaggtcgtttttactcttagctgttcaagtggatgaagagaatctgtatagtgcttttaaatttaaagctcatggtgtttcaaattatcttggtagtgttatctctcataattaaatctgctctatataaagatatagtccatgtatatggctgagtcttttatagtccaaaatttatttttctgtgtactatggtttattaacttgacttatttttcttctttcagatttaaaaaatgttaactaattaaagtaacttcccaagtacctaccaatgacattaatcttcctctttttgtcttttgttctttttacccccaaatcctattaatacagcaactttttaatatgattttctacttttcagaatacttcttaacaacatagcaaatgccaaaatgttaatggaagtattaatgaaaacatgcaaaaaatatttctttatgattctgataattatcgaaattgccttagattaaacatgaataaatttaattattatatatgtattcaaatagttggatatataatcctgagaaagaatccttcactacatatgttataaaaatggtaatgaacacattacctaagaagtctgcactagaaataataagataccttttcattcttgacatctttcttctttttgaaccaagtatctgtagaaaaatatttgaatcaaattttaatgaaattcttattagaggtttgctacttttctcacaaaatggcaatattgccaggcacggtggctcacgcctgtaatcctagcactttgggaggccaaggtgggcgtatcaccagaggtcaagagcttgagaccagcctggccaacatggtgaaaccctgtctctactaaaaatacaaaaataagctgagtgtggtggcagttgcctgtaatcccagctactcgggaggctgaagcagaagaattgcctgaacccaggaggtgaaggttgcagtgagccgagattgtgccattgcactcccgcccgggtgacaagagtgaggctctgtctaaaaaataataataaaataaaataataaaaattaaattaaattaaattaaaaaaaggcaacatcaatgtaagcctatttcataacaagtctttttttccccatggtgcttcatcctcacttggtatattctaaatatgcatacacaaaacacaattgtgttgctctttcaacttcagtcgtcacggagggagctcagtattttgacaaggaatgtgaactggctgttgtatatttagaagtgagtcttccttgtgctcctttcccttccaagtgttgacattatttcagtctgttgctatttttcattggctggtttctctagattagtgaggcctgatcctttccatggcactcacaccctgtttgtacccaactccccactggtggctgctggctgatcacaccatgctgttttcgtgttttatggagaagtgttcaggtgtggctgctgtgtttgatattaaatctgagatgaacttcaggagatttcctgctttttattacaaataattttggctaggggcagtgttatcctgttcataaatcaggtgttctcagagatttaataatttagaattcacatgaggatttggtggaataaacatttcctttctctgttaagctgcctcttaactttctatcttcccctttctcttcactgcttccatttttttaagccttctttaagtctttgccaaaaataaaaataataaaaaataaataaaacaacaacaaaagaggccaaagaagccagaaaccctttctgcatgtggttacaagacacataaaaagcagagttatgcttgaggataacaaaccgtcctgacaacccttctcaaaaatgtttgcactagagatttagaggaaacacttcaagggcccttaataatgctcattgaatagtcttaatatttttatggaattggtgagtatgaatacataaataaagatgtttgaagagactataaggagtcagaagatgttttagtttatcttcatattaaaaacagtaggtaatggagagacccagggtgggagacctacttagaagaaggaggtaaggtttccctgaggagggagactttgatctgagaaaaatgggggcaaccatgtgaagatctagggggagcagcatgccagggagagggtcctccatgtcttgttctgtttgaattttagattccgtgagaggatgaatttttgtgtgtagctgatgtctttatccctttgcttattataatgtctagcatatagaagatatttaacaaacattgattaaatgaatgaacttgatataaagaatgttaataaatgcaatgggaaatatcctcctgaaattcagatggttttaaaaacatttcttgcaataaggttttgataaaagctaaggttgtaagatacagtgacttatgaagacattacgtgaaataatacagtcaatgtatgtgaccgtccagaggtctgacctgatcccacagacagcctttttagaatgcagaagagtgaacagatcacttatcctttaaatgatcttctgtaatgatcattatttttcagccaggctgacactttgaagttataatgatggaaggtactttgatgtgctgtactgctgcttgaggacagaatcacatcttcagaagacaggagaagagattgtaaagttggcatcctattctctcctgtgaatgacagagcaaaataaatgcagaaacttccttaggatgctctgttacatgagcaagtgggcttaactgagttttcaaagaattctattaaacaatctttagggattagctttatgtgctaaaattattaaataatgaactttcaagaaaacgaactttagatttcattaattcaacacccttgtcaactcatggggaagtgtaagtccagagagatttggtaatctgtgtttctgctagtgatggggacatgactagacccagacttttccataattctgtgaaatcaagtgaatacaaatatcagagacagaactccagagaaaagatgtcaccaaaagacaatttacatttgggatggtatatatagacatttttcttggttgtgggaatttagagtataaagctgagggaaatgatggaagcaaagagaaattaagagatggacaattgtatgaaccacttttgtttcccttgggcagagagtccctgagccattagatagtggcacttgacttgagaaaaatgttcctaaagagagggacatgaatctttgtagtctaagaaaaggcattagtaaatacaaaatgaatgcacaaaagcttatttttcaaaagttttaacttttgagctgaaagataaaagatcacaacatttccatttctgcggggaatatgaatctttataaatggacagcctgaggagaggagagggagggcttacaggaggttctgccattctgagagcctttgtgaccttttcaggaaactgtcaactgttccaaccaggagtcttcatcaccactttcttgacagtgacatattatctctctgaactggcagggtgcttagcccatcaactctgtttttttctctttcccacctttccctctgctccattcagctgctatgtcatgtcctctgtggccttggcatgtggatttaccactttaactaaagccaggccatttctattggcttccctatcaattttatacttttcctactaacattagcttcatttgctaaaattatttttcccttaattactctaagagtatgaatagagatttattgcagtgaaaaattattttcaattttagggtcaaatatgtgcatacatacctatataatcattcatatttaggcattttataaagccaactcatctatattttatttatttatttaagatgaagtctcactcttgttgcccaggctggagtgcagtggcacagtcttggctcactgcaacctccgcctcccgggttcaagcgattctcctgcctcagtttcccaagtagctgggattacaggtgcctgccaccatgcctggctaatttttctatttttagtagagatggggtttcaccatattggccaacctggtctcaaactcctgacctcaggtccacccgcctcagcctcccaaagtgctaggattacaggtgtgagccactgcaccaggcccaattcctatatattttaaactataggaagccagcattgggtccacaaagtgatgtaaagacatgactttgagcatctagaacagtgattttaaaacctacctcaactactggaacacatctttctttgatagaatgtcaatacataaaactagtaagagaggactcatctggttgaaatgagtgagaacaggatagtctataatcccattgcttatcttatattctaattcccagagcaccctacttgaaagccagttgtttagttgatcactagatatcaaagtgaaatgatcaatattagttgcacttgccttttttggtcagaaatgttggaggcaattttgggtggtagaagcagtagttcgtttggtgggattgaatgtctccatgtttacttgtttcatttcttattatgcagcagaaatgtgatggggcctggttgtgtgtgtatagtataagtgttgtcagttccttctaagacatgcgtttactgtctaagggaattttgaacctcattcccatttaccatgccaaaacatatatatctattttatgttgccttgtttttagcataagagtatatttacttaacgttgcttgtcttattatgagtccttgggcaaaacaagaggcaattgtactttgttctttgttggatgggtggcagttttcagaaatgcaacagatttttaaatttcaaaatagcaaacaatggggtctatctttcctctgttttggggaagtaagaataataattattttctctcctagcttttaaagatgaaaatcagtttttatttgatattgtaatttaggacatcattttaataattttatatcatatgcttgtctcataaataatatactatacaataaaatttaatgaggacccactttaagtcttgtatagactaattaaaagctacaaaaaagtcttgatataatgaggtccttcattcttttattagttagaataatgctagctgttacaacagacaacccacaaaatttcaatggctttaaacaatcaaaagtttatttttaaaaattatataacactccattattggtgtccctggccaccagtaggctttcacgtttattctgtgacccgtattcctttcatcatgtggctttgtcatgctataggtcctttgcaactagctcactcaggaaaagaatgtcacaaggtgacacacttaaccaccttggtcttcaatgacacatctactcacattctgtttgcaagaatgagtcacttgcccctcctagataaaagaggggctgggaaatgtggtgtctgttttggtagctgcttctcataaataacttatactttggaaagagaaaacagacttttggtgagtagttggttgtctgagctgtaaatctgaatcttagaaacactattataaaaatcgtttaccgaaatgttgcattatcttagtgttgtgtagaccaaatcctgaggaaaataataaatttttttaaaaaattaaaaacaacctaagagatacaagaattgaacatcagtgtaaaatttaatttattactattaaaatattttgtgttcttagttttttgttagtattttatttaaaaccaattttgcttttgtacactagaacttccctacaaatatgtttgtgtttatccatgataaatatggataactgtaatgtatctggaagacaaactctaagtctttagaaaatgagaaaaaatgagatgcagacaatgcaaattttttgtgtgtatgaaatgcaagcaaatgaaaatttactctcaagctacattttgctgaataattttatttagtcatgaatttattctaatagtagaataaaaataatgaatagataaaactgcttatatttatgtttctgattgcttattattccatattcctgagttgtgagttttcattttagttcatttctctgtgtggtggtggctaagagtgacccttctggccatttttctatgtggctttgctgcacttttctccttcctttatgcatctctgcacatttttccatgagcttccttcaaccctgcagtcttttaatctttgtctgttcatttcttacatctccctacaggtctctctgtcttctcttcttttatggagttcttcatctgtggacaatggagaatggtgagatttagattagacatcagtggtattgaaatttaaaatgtctcagtgaaaacacccatagccttgccgtggttcagtaagaagcagagggcaggtgtttgatgctggaaatcagtgagatcactgtgcacatttatgtaacaatatgctcggcccatcactttgttcagccttggcccagaatcatcattaagcatgaacatgaaccacagacctttaaaaaatgttcataaataggcttattgaatgttttctttctcttgctatatttttttcagtgaccacctatgccttccctgcaactatgtgctatgtctcttcaaatacatttcatttataatgtttttaatagccaaattcccactcagtagaaaactagagttactgccatagcactaaatgacagtgaggcaaaatcactgaaaacacacaaagaaatgtgtgttcttctacagatgctctcagtcatctgtagtccaatttttttcatgtctggaaaactatttgttttcttgaacgcttacttgtacttcaatccctgctagaaatgtcagaaatcagagaggcagataggactgttccatgtcaaggggtctctggagagtttagtgtgagcaagagtcagggaaagtatgtcaaaatgtatggaagaaaactcatgtgaatgaaaaatacggatagcttttctttgaaatgtactcatttactttttttgtctgcaacacatgactgaagtttgaagggtagaataaaattaacagctgtggtaataagatagagtacttctgcaaaaaagtaaattggtgggttgaaaagagagaagtgagagatgtttgcgtcatttctgggtcagacctacagaaaagctttcaaggtctttacagggtcactgtaaagaaaatgtgaaacaagtatgattcaaaaataaatgctttgaatcaaaaggtacttaatataattataagtactttatgttgagataaattacagctccatgtcaattgtatgtaaagaaatagtccccagtttccctttatgttttaaatcttacattttaaggtatttgccattttttgttcttcttaattttttctctttccctcctttctttttttctgaatgccaagtacatttgttaaaatatttagaatttttaaatagaaatgtgaagcatcaaccatttctctccagaacacacaaatgtaggttttgacagaactgcctatcctcatgcctagccccacagcacaaagacaagcttagatgccccgggatccatgagttctgtagtcaccattgtatgtgtccaacagaggggagtgtatatgatctatttggacttgcacaaatctcagaagactgtattcatgttataaaataatcttgaaatatcctaaattcagacgattagagaattactcatgtaattcagaccactcatgtgggctgaatgtcagaaatccttctaaccttcaggtctccttgacttctctggagaatcaagctaggtttactcatttcattttcatagcaaggatcacttttagcgaaaatgatgcactggaaacaatagtcatttctgatgctccatgatagagttgcaaagcatgctttaaaaaatgcaccttattctgcattatttgcaagtttacttgtggtgtgaatgttttttctactatttctactattagatgtgaagaaaagtatacttggcttaaaatgtgtcacaccatgacaattagtcttctaatatttgcctcatttatataaaatataatacatgtttgtcagcatgtaaaggtcctgggggccttgtacctagagttaaagcaggcacaaagcagccatgacattgtgacaagatataccatgcgtgtggaactcagggccagaagaggtgggttctggttccagccctcccgcttactacttttgtgaccttggttatgtcactcaacctctctgagccttggttttcttgtttaaaaattgcgggtattacttcctgtttccatgggttgttgtaaattttgtttgcccatgctccttctcattccacaaacgatttaaaatgacatgcatatatttaaagataaaataagatgtatttgccagtgctttgtagattatacaaacataagttgcctgccatcattatagggccattttcatttctggggaggcctatcactcggaacaaaaatgcttctaagcacatgttttagagatttccatttaacaatttcaaataaagcaagtatgtgtgacgtagactggttgtaagtgccaatttaaaataagcccataagaaaagaagactatccaagaccttttcgactgaagaccatttacaactaataaaaatagcagactctcacatacttaatgcctgttaattgaaaagagcatatatgacaaaaagctgttaggattaagtaactcttgtaaatggtatttcgttagtcataacaaacatgtactaacatttgagaaagaatagaacttaattttgttaagagtgagtcatttttactcagcttaaaaattatgcttttgttgcatttaggattggtggatacctcacaagaacacagaggctttgaaatatccgtggcctactggttccttcctctaattcccttcattatcaagtgccatttgccttaatcttgggttactagtaatgctatctgcgctgtgcgtctaaagcctccagaaagattgctcaggcatggcctaatagcttttatcagttcacccagtggctcttacactttgatacctgaaacctagagttaactgtgtaggaccaagctcttctgaaggagtcaactgctctcctctgtcaataatggctgtttatgccaaaacagccaagagaacctccccacccccttccctctgtcaaagtgaaatggaacctaagaatggaagctagtggctattttgccataccccaaccaacttgctattgcttaattccatctaattatcagctgggcgtcgtggctcatgcctgtaatcccatcactttggtaggccgaggcaggaggatcactagaggtcaggagtttgagaacagcctggccaacatggtgaaaccctgtctctaataaagataaaaaaattagctgggtatagtgatgggtgcctataatcccagctactgggaggctgaggcaggagagttgcttgaacttgggaggcagcagttgcagtgagctgagattgtgcccctgcactcaagtctgggcgacagagtgagactctatcttaaaaaaaaagaaaatttttttaaaaaagaataattatagagaaattactggatatgctgtgcattgcaacaagattagactctttctcctttgtttatattttaagctgttatttttctcactaatatctgtgtagtatatttggctgatagtaagattgttagtctgtttctgtttatctgaggcatggttaccttccctccttctctataaaaaaaagtttttttagggaaatttattgtgagcttctgttttcttttaaataatacataattttaaaattctatttcccaaacagtgaaacgatttgaaaacattcacttgacattacaattcatgttacacagaaaagtgataaaaatcatgaaatcagtttgcccccttctttatgatagataaaactgtagtgttaaagaatacatgagaaatactagtttgataaaagctctaataaactttatattaaacaaccatgattttccttaaaagtaatagagttgagggacccacatgcttgaaagtgaatacactttggtggtccaaatgcccgaatttcaaggtagggtgtgtatgcacctgaattctggggcttccacttactaattgtgtatccttaaatagttatttaagctctcgaagactttatttttctcatatataaaatgtgctgatgttcctaactcacagaattttctaaggacaaaaggagacacgtatgtaaagtgcctaataaaatgttgggcacatagcagcccaatggtagcagctgctcctgttatttttgttattaacaaacagaatgaagggaaaccaacctagaaggttagattttctaggttcccttctgcttagatcaatttaggaaacggccctcagagagactgtaatgtctaggcaggaaacaggcagggggctgacttggaggagctggactgggaaggtaaattctatgctgggagagccacaatcccaaatttcagacttacttctttctgctattttgcagcatcatgtgatgtgaccgtactctctgttttggataggttacttcactgcaattaataatgtcacttcattttttatcaatggaaactttatataccttaagcatatgcttgcaaggaacagagagtctttttctcttcttcttttcctctcttcctctctcctccatagaaagaatttactccccatatggggatcttataaaagctgaaaggattcaaggtcaaaataatacactgagtggttgaaaagctgtgtatacaccttcatgttctccttcttacccttttgcatttacaatagcccttcttacgaagaaacagaattcatctttaatttgctttatgccatttatccttttatatttgattggctcagtgattttctttacttaaatgtagcatttatcaaccacaactagcagtgcatgttatagtgttaacagaaaattccacaggaccctcttcacactagggaaggggaccatctgctactttcatattaggatgtcaggatttagaggtcaatgtgtttcctcatcaaggctgaaggctttgggaatccggggaagtgtcaggctccaagcagcataatgaatgacagttgctgactggctaggctagcatgttttcaacaggggatatcgctgttcggtataatgtgctgggacttagtgtgctaaaaacacccagcttgggtagtgaggcaggctgtgccttttcccccctgattctgaactgcattttcatcttggaagaaattatattgaggtcttcattagtggcacccagcagggtgaaggctccgtgagggctgataagcactatggctgaaaaacgatcagcctttgtgcaggcagttgaaggtttaagttgcctgaactggagagagtctgaagaggcgattatgttaagcaagtaatgtgtattggtaacgtggaatcaaattattagggtcagtaacttcctggctttcccagtgcattaaatgaagacataatattgcatttgtgtcgggtacttcttgatgccacataatgtcagcactgtccggtcgtccgtacttcacagcatgtcacctctaatttcatgggattatctgcgctgttgcattattagatactcacgatcttgagcttcctttgaactcacagcagggcagtgcaaagtcattattgtgaacacttctgtgctttcttgtcttatatacaaaattatggccacatttagaaaggtagatatatcccactatcatacttccaaaagtgtgcgtttatttggtgggaatgaaagctattgatggaaaaaacattgaatgtgaaaagtgttttaaaggactagtgttagaaaggtgtcaaggcagtgaattagtattagaaatgtttataggacagtggttctcaaagtgtggcctgatcagcagcctcagaatcacctaggaacatataaggaatgcagatcctactgaattggaaactgtggggtggagctcagcagtctgtgttttaacaagccctgcaggtgattctgatgcatctcaagtatgagaaacactgctgtagcatttacggagtacatgaatgacataaatccatatgttctggggtatagcaatagacaagacagacgaagtatctgcccccatggaccttattaagttacaaaggaatatgtggttttttgccctgatgaaatgtttatacatacccaacagagcctataattattgtagataccattatattcttcatttgaattagcctgttattttcttcggtatcagagaatggctaacaaaagataatgaataagtgattcctttgtgcatttcagaaccattccccttgcaatatgtatatccatggccattgtcaccattggctatgtgctgacaaatgtggcctactttacgaccattaatgctgaggagctgctgctttcaaatgcagtggcagtggtaagtccaagttgggaaaatgccaattggaatttaggttaatgagctgatgcaattttatagtagttccctctagcagaaagtgttttgaaattcagtaatcttttcttgacctgaataatagtgaatatttaaaaaatttagagcataccttagcatattccatttaactgatatatctaaattcctatatgatttcccattatttctaatttcttataaaacagtttcacacatacatgcttgaaaatctgccaaagcttattctcccagcatgtctttaaagataggtggacagttattgaatctaaataaatgcattttttctatgcaaattacaatttattctgtacactttcctgtttgtaaacttttcatatgcgaactcagaatcctttccccaagtgtcacttaagaattttgatgtggaccatataaatttggttttcctagtatatccttttgaatactagtcctgcgatattaataaatttaggaaatactgggttattcaaagttaaaccgatgttgttataatacttctcagaatattaaagataccaacatgcatttgaactccctaagaagtggatacacataattttatagcattttccaaaatttatttgacactaggaccatctttgtccccaaagatcatgttataagactgttattctgtgatacacttttattttgcataaaacttagctagtaagagaccattcactcttgacctcataacaatgaatggtgaaaagttaagttcccattacttgatgtcagttccttttaaaatagttagtattacctcatatcagcagcatctacagggaataaattatctcatttcatttgaacctgtgtatgagttcactacattgaaaaagacttcgaccactgctctaagtcccaccagacaatcaaatatacaaagcttattgaagtcaggtcagtcatctcatcttttgagacaaagggcagcacttattctttgggcataatgtggcccattaattgcatagcaccagctgcatcaaggacaactaatgaatccaacacattttctttttttggaaaatacatccttcatggaaatttgcaatatcgcacatatcatggcataaaagaacattttagaagttgtgtttatcttttaagtttctgtggcttatcggacttatatttgtgttctagcctttttataggaaaccacaaaagaaattgacacatacatgagggggagggagggactttataaacagagatttagctagtgtgattttctgggaaaaagattttcagagctactcatgtatatgctataaattattaagtcatcaattattttatttacctcctaagaatgggattggcatatgaaacacatatctgtaatacttctcagtgtatttcaatataaaatttggttttccaggctaaagagaacgtattatacagaaagatttctatctccagtagaacttctgatttgagcttttatcacttgtcagagtcagagacaatacacatcatagttgataaagattcgataaatggatcattgctttttgaaagtagagagaaggtgcttgtttagatctttgactatagttttgcaacaagcaatgccatggtccttgcttttgattattgtctacggagttagtctgaccctaaccaaagagagaaattataaaacatacaagtatcaccaggctaatagaaagtcatagagcaagtttggcctaaattgtttcattttattccactttctggcaaggcattaatttgcttcgttctttctttcactagaccttttctgagcggctactgggaaatttctcattagcagttccgatctttgttgccctctcctgctttggctccatgaacggtggtgtgtttgctgtctccaggtgagtgagttcatgtatttccagaaacacatttctgtttttgagattggatgtgataaggataactttaaaaagaaaagaaatagtgcctccaaacctgttgtttttaaagggacatgcaagattgaaatattggtccaagtatcaacagcacgttttattctgtccattagagggcactgcttgcctattaatagcttatttggaagacggacatgtggcttttttaaaaatagtatttccacagtctaacaatggcattttatttctggtgatataattttctgtttctctgaagatgccaagaaaaaagtaaagtaagagacatcagaaatcaccacccctaccatcagtatttcctttgtttagtttgatgcaatagtctttttgttttaatatacgattaaaagccaatcagataaatgtgaatgctacatataggtgtgtgtacctgtggatgtgcatgtgtgtgtgtttgttgaattggattgacaacacacatataatactaggaatctagaactagatttcccatcagctatttatatgtagagagagctatgctgagtcagatattgctattctttctcttcaaagaataatataatgttggcagattttgtaaaatccaaatttagatttcctatgatatttctccaccttatttgaaaagtgaacttaggcaatcacctaaggaatacctgaccatttggtatgaaaagatgcacgttttctctgggatttttggattttccctttgaaatgatcaatcatacagtcaactccacccacatttctctcccatcaggttattctatgttgcgtctcgagagggtcaccttccagaaatcctctccatgattcatgtccgcaagcacactcctctaccagctgttattgttttggtaatgcatattaacaagtatatctagatataaccttgaataataggttagcaaaaaggaattccaaccagacattagatagtattttactttctcattcattgctaatgtatgtcatggtggagtttgggaggcaggatatcttccatctcttccctttactccatgtttctgatgcctattttttttgatgctttggggcaaaaatcatcatcacctcactttcatctttgcagaaatgtgtaaggtctaaggaaaatgattggcttggctcctctcattgacatagcacctcacagaaaagaatgtagagtattaagtcccaatgacttaaggaaagtagagcaaaaagctacagtccaaaaagtacccagatgtatcatctaggcaccttataatgaaatgcacacaaaattattgaaacaattgataaaatcctagacagtgccatgattcatttgagacatttgagagcaagtgtcttttatcctgcaggataaaaataaaagcaccacgaggtaaatttgagttgtaaaattctttctgcagagcaaagtgtgaaatgtgagctacaaaagactgtatgaggtgtaaaagtcctcaaatacccattggcaatgttatattcatttttactgatgattttgtaacatttctctcaactggagtctgttgtcaggagcaccacagaatgcactgaacatttttttttcatgcatttaatttgtttcagaacgtttccttgaaatttctttttaaagtatgtgtactctctgtgcagaatctggatgttaacgtcacttgtgggaacagaatgtattattccgtgaagagggctttcattttaagcctctgctatcagtcatgctgtccttggcatgtgcagctgcagagacttgctaagctgatctctgcgcttcattcttctccgtggtcttgagggtcacacacggcaagcacaccaggagagtaaatgtggaggaaaaaaggtcaatgttttgcaatcaagagccaacagaatcacctatgagtgtctgtgtttcctgggtgtggatagccaagagctcaccggagagcatttgcagagctttctgtaaatcttccaattgggcctcttttactgttcattatcggttatttactaatcatctcaatctttgagtctttcaattttgagtcattgagtaacctttcttttactctttgaagacatactatcttctctcaaatgcaaaaggaactaaaaacacaacacaacattcatatagaattccacttgaataaagtataatggccatatcactctcatactgttactggtgtgtaaatggattatgacaacagaatatagaaaagagattagtcaaatccaagttttaactatgatgataatttatcggtataaataattatttgaaaaaggtcgtaatgcatagtgaggtttttgttgttaatcatctgtgttttcactgaattcaccaagcttgcttccctttcccccctcagcaccctttgacaatgataatgctcttctctggagacctcgacagtcttttgaatttcctcagttttgccaggtggctttttattgggctggcagttgctgggctgatttatcttcgatacaaatgcccagatatgcatcgtcctttcaaggtaacctcagcaatcttgatgggtttacataaatctctctcctaatacctagtcctccctttgtcataacttgctgatggggaggttgggctgggggcagcatctgtggaataaaaatgtttaactcttgcaggcagtgctttcctgttggatttattttaagttggaaaaaaaacagtggatccaattttttatgtgatgggcttgaactttgtatgtcaaatttttgaaaaatgactgtatgaatgaatgtttggtatgttgatttttcatgaatgtgttcaatgacctgatatactcaaagtatgggctacttctgtctgtctttatgctagagttgtggacagccatggtgaggaggagtaagggagatactttgttaatgccaattccaaaaaggaatttgcctttacaaaataggcattttaagtacttaaatgttgtgacttgttacattgctctttctctatattatacactccaaaaagaatagaaatgtaaaatatacagggaaagagaagatctacaaatttaccacttgatacccatttaccataagtaagcatctcccttttggaggactggagaaaaagcttgtcatcttcttcagacttgactcatggattgatttgacctcacgatttatttgtttttaagaaatggcatagataaggttgtcagtcatgttgtcaggatttgtttctagtaatattcattgcctaatgctggtggcatctttattagcggttgaataggagttggcttgttttattcctgtcagttattattgtggatctcaacagaaaaatcaatatgcactgaaagactttaacatgtaacaagcagccggtgctcttgactccacattaaagtgggttctaatcataattatcaaagagccagtcttttaaaatcaaaaccataaatcatcatggcatttaactagtaaaataattccaacagaacatctctaataaagtatccatttttgtccttagagtttgttctagccaaagatttaaaaacaatttaaattaagttgaattacatttaagggagtacgtttaatacattatctgtgcaccatgaaagagattttgctactaaggcacgttggtgcctgttacctggtcgcatgactacagcatatcactaaagtatatgtcatgactgacacgctcatctcaaacccagcttctgttgcttgaacatgtttgaagtgacttttttgtgttctgtgttccaggtgccactgttcatcccagctttgttttccttcacatgcctcttcatggttgccctttccctctattcggacccatttagtacagggattggcttcgtcatcactctgactggagtccctgcgtattatctctttattatatgggacaagaaacccaggtggtttagaataatgtcgggtaagaattttaaatactttcaggacattgtgcaacaccatgtagaaaacccataaaggtgtgcatacataatatacttaacatttaaaaatgtaagtggcacaattgatttgagaacattatggcattttaattggaactgctttttggcaggaaggacatttagggtacagccgttgaatccttttggatattagtttgggctgctgtaatcacttcttaggagaaacagctttgttttagatgaaattttatcagtagttctctaatcgacctaatctctctttgaatcctttactaacctaattattttccttctagtttgaatgcagtttagtgattttatatcataatatgtaacttgatgagtgacacgagatttgttggggagttaggcagtggcctgcaaatgccttaaacattatgactgtacgctaccttaaaaggaagggtgactcatgaaggattataataacaagaacaatggagagaacaatagcagcttccacatgtgagtgcacatgtatgacttcatttaattttttttaaattttactttaagttctggaataaacgtgcagaacgtgcaggtttgttacataggtatacatgtgctatggtgggaatgtaaattagttcaaccattgtggaaaaacagtgtggcaattcttcaagaacctagaaccagaaatatcatttgacccagtaatcccattactgggtatatacccaaaggtttataaatcattctactataaagacacatgcacacgtatgtttattgcagcactatttacaatagcaaaaacttagaaccaacccaaatgcccatcaatgatagaatggataaggaaaatgtggcacataaatatgatagaatactatgcagccataaaaaagaatgagttaatatcctttgcagggacatagatgaagctggaagccattattctcagcaaactaacacaggaacagaaaagcaaacagcacatgtcctcactcatgagtgggagtagaacaatgaggacacatggacacagggagaggaacaagactttatttaattcatataatatcctactgaggtaggaaaattattatccccagttaataggctttgaattatagcatgagagaattcaggtcacttgttccaagtcatacagatataaagtagaatagctgaaagtcaaactcaggcagttttatattttaggagaatcaccctgggggttatgaggatggattaagataggttggggctgaagacagaatattgactttggtggttactgcagcaatcctgatgagaattgagggggattctgaagacaggcagtatcagcagggtctgagagaaagtgaaacatactaaaaggaaaaatcagcaagacttggtgaccagttaaactgggggaggagaaaacatagtagatgactaggtaggaagggtgcttatgaatagcctgtgttgaaagcatatctctctgtcagaggctctcctgagtcctctcccctacatgatcatctcaagcaatcctcaacaaggttgatgtgtgaggtgctattattcccaagtccagatgagaacaccagagctcaggaaaatggagaatttatttttgagtgtatgtattttaaaccatagaactaggaattgaacccacatctgctggacttctaagttcatgctctttctagactggatcccttgtggaagtggggggggcggagagagagagagagagagggaaagagagagacagagagagagagggagagagagagacagagagagagagagagataggtaggtaacaaatatagccagaagggcagatctattctcgctggtgaatgtggtgagtttagaacatagctttcatactttttctttgttttaatttacttactttaccataattaattttttaaattccagttaaaagtttggggagatttctggttaaattattaataaataatgccagtgttactaaaaaaacaaacaaccaaaaaccttgatatgcatattgaatctctagtgtgctgtgcagactcattgagaagtcagtcctttaaagcagagttttattaataccttttattagcattcaattggaattttgcatctttagatcttatactaatatttatatctggattttgtttccccaaagaaatgttactatacaaatgaggtgctttatggctgacacaggcacactgattgccttaactgagtatttaatctctatttcttctcagatcacactagctttctgtggaatatttttaagttttctgtgttctagacactaaatatagagcctgttctgagggaaaagggatcttattaaataccatttaccattagggttgctttattcattgctaacatttaggatagattagcactcatcgctgtgaaatctgtctgtctcccatactaaccaagacagttaaaacccctgagcagcacagaaaattaagagaattgaggaagaaagagctggtggtcctagagttagactagaagaaagggagcatgatgaaagagcaaagccattgttcgatcccactttagcaggcattttgttcctcctgtttggagtcagccaactctaatagttctttcctcttgctaacaagcacgtgtgtactttgtattatttctttgtcagttcatctcaacaagcggttttcatgcttgatccttcattgatgtcttttggtgttcatgtaattttaaagtttgttgctatttttctatctctaatgatgttttgaacatttccaaggcctccaaatttagtgttagccatttgtgaaactagcagcaatggagtagtcccataatggttatttggttctcaaaaatgccattaagtcttaccagggagcatggcaattctgcttttaaactgcgatcattgtaactctttatctttatagctgccttgaaagtgagtagcaaaaagcaacagtcctccgtaattttgtttgatttttctctgaggcagcattcttgtagtaaaataaagaaaattcataatatttattgctgcaataggaagtattttcttagcctttggccaaaacaaaacactcacacacagacgcacaaacaacaaaatcctgaagcagcgccctgtcccttctcccaactactctatgatcattttgttagagagaaactcaatgtgaacttagagaccaagagcctttgcttggagcagtttgttcaatgatttaatatcatgttctttcattaggtaaaattccaaaacctttatattatcatttatttttaccctgataatgcatgagtagatcagccctgtgaaaatgatagtctatcaaaatgcattttacctaggttgtttccatgaaaaatgagaggtaaccaaatagcactcggaaaatggtgaaaggctgctgagaactgacagccagggaatgttcagaatccaaggagctgagattttcagagatttgataaatctctccagccacaggatgccagtattgaaccactttttgtttgatagcatttctagggagaaaagaaaacatgctcttaagggaatggtgagatacacggaaagcttttttctgccatctgtgacagagtggtttattcttctggtgggttagttatattatttatttacttatagaaacacaagcttctcacgcgaggaaaaaggggcggataccccaatgacatatgcaaatacacaaagatagcaagacctggcaaacctgggccaggactcacagcagctgttttacttggctgtctctatttagcagccaaaccttgtcacggggttgagtgaggtgactggaagtgggtccctcctgctcagggagagagatagaggacagccttatttaaacaaaatctttgattataaaaaatcagactgggaaacaccagcagaatgactgtaatgcatctttgtggacagtgagtttgcaactccagagtcctaaaagcatatgctgcatacagtgggtcaagataacttcatttatgttaaatcactgacagctgaataatgcatttaacagactgttcacaaagactgcagtgcaatatgtaagttaattaagcttgcctacatttcttaggggtccaaactatcttcattgtaagaataaaatgagatcatgcttgtgaaaatatttgtagccttaaaaaaatactattattcttatgaagacttccagaaaaaaaatggccttgtgccacatcacaaatgtggcaatttttgctgtagttcccatattggtaccaggtatggttgggtaaatcaaattttgcagggtcagttgttgtttcaaattatttcaagaataactactgaacatgaaaggtaaagctaaaaatactacaactgttatttggtcctgtaccttacagttactgaaaacaccaaatgcagactcattaacacacctttatttaaagaaagagtaccgcgggttgattatccttaaagccgaaagactttttcaacatggatgtagacatgacagttgaatgccacatactctgcagctttccccggcaagcaggaagcttccttaaagacatacttgcctctcttgagcactgctgtctggtccactgctgtaagataatctagaaggagaagttgctgtgacttcaacaggtactcatggtcaaaatcaattactctgcagaagccttcattacgatgaaagtcattcaaatcctgagattccaagagagatcacataagaaagacacattggatattgtcaacagggctgattaaacacaaaggaagaggaaagatagcagaaagtgtgcaaaaccagaagagagattctatggccatgtgctgctactgaataacggacccaaaccaagcttttaggaaggagaatgacacattagggaagcagcaggatctaagttgctcctcatttgtctgaatggaggcaatgttatgacatgcggaagcaagatgtctaagatagcagacatctgggggtccctgaatatagagaaacatttttggaaaaggctttcatgttgggtgtggagggcagtcatggagattagttcaggaggctatgggcaggaggatctctttggggagacagggctgtagatgatgtctctttaacatcactgctttacatctggccattgcagatgcctgagatctcttgtttttctgtttgttttaaactactgtcacgtatccctagccccttctctgtctaagctacattttctttactatttattaatatttccttttcccacaaatgcctatttttatagaataagtttgtcatttcccttttctgaaaatatgggctttaattgctcttgagtgctcccttatgctgcacttacatctcaatgtaaagagtcggctgtgtaaaatacagtttatttaggaaacactcagagtttataatttaccgagactgtgctgggccctttacaattaatatagactgtaaaattagtgggctgaggacagtatctttgacaaacacagaagaaaaggatgaaaaaaatacttttttttttttttgagatggagtttcattcttgttgcccacgctggagtgtaatggtgcaatctcggcttacagcaacctctgcctcctgggttcaagtgattctcctgcctcagcctcctgagtagctgggagtacaggcatgcaccatcacacccagcttattttgtatttttagtagagatggggtttctccatgttagtggggctggtctcgaactcccaacctcaggtgatccacccacctcagcctcccaaagtgctgggattgcagacatgagccactgcacccggcctgaaaaaaataccttttaaaatgtcattaaatatggcttgaaaggagctattacagataacaagccatgaatgaggagaaagactctatgtccagatgaaagactatctgggcctgaaaccatcaagaggtcaggctgtaaacagctccaggactagcaggacattgaaaaggttctgtaggaattcattacaaagataagaagcaaactggctgggcatggtggctcacacctgtaatcccagcactttgggaggtcgaggcaggcaaatcacttgaggccaggagttcaagaccacccagacaaacatggtggaaccccgtctctactaaaaatacaaaattagccggatgtggtggcacatgcctgtaatcccagctacttgggaggctgaggcaggagaatcgcgtgaatctgggaggtggaggtttcagtgagccgagatcgcaccattgcactctaacctgggcaacgagtgaaactccgcctcaaaaaatcaaaacaaaacaaaaaaagaggcaaacaagaactaatgtccccagaaaccaaggtcatagagttctagaactgctaagataaaatgaccttagaaatcatctagctcaatggttctgaaggaaaaaaggtagacttccttctgaacactggagccagcctttcttgggatgccctcagttcctacatttttgtgtctatcagaattacagactgctaggccccatcttcagtttctaattgagtaggtctaggatcgagcttgaaaagatgcatttctagtatggtagttgatgctaattttgttggtccagggaccgcactttgagaatcactgatttagtctctcattctactgattaggcaaattaggccctaggagataagacaacattctcaataacatgttacaagttagagaatgaaaattacattctgattctcctccagattcttctgaggaactgattgtaatctcataggtgcaaaaagaataaaccaattttaaactgatataaagtgtatttttaaacatttatttatatattggtcctactgtttcaaaatattttcacccttctggtccatgaataaaaatccttatttgaatgcaaaatattaatgtattcttgctgagaagccatcatgggaagttacagaagtgacaaataaattaattgagcatgatagaattctaatgaagtaaataattcttgaaagtgctctatgaagtagacagttgtgtgtttttggtattcaacccaaaataattcatattttgctatttttaatgcatttctgatttccatgcatttttaattcatttttatttctttgtagagaaaataaccagaacattacaaataatactggaagttgtaccagaagaagataagttatgaactaatggacttgagatcttggcaatctgcccaaggggagacacaaaatagggatttttacttcattttctgaaagtctagagaattacaactttggtgataaacaaaaggagtcagttatttttattcatatattttagcatattcgaactaatttctaagaaatttagttataactctatgtagttatagaaagtgaatatgcagttattctatgagtcgcacaattcttgagtctctgatacctacctattggggttaggagaaaagactagacaattactatgtggtcattctctacaacatatgttagcacggcaaagaaccttcaaattgaagactgagatttttctgtatatatgggttttgtaaagatggttttacacactatagatgtctatactgtgaaaagtgttttcaattctgaaaaaaagcatacatcatgattatggcaaagaggagagaaagaaatttattttacattgacattgcattgcttccccttagataccaatttagataacaaacactcatgctttaatggattatacccagagcactttgaacaaaggtcagtggggattgttgaatacattaaagaagagtttctaggggctactgtttatgagacacatccaggagttatgtttaagtaaaaatccttgagaatttattatgtcagatgttttttcattcattatcaggaagttttagttatctgtcatttttttttttcacatcagtttgatcaggaaagtgtataacacatcttagagcaagagttagtttggtattaaatcctcattagaacaaccacctgtttcactaataacttacccctgatgagtctatctaaacatatgcattttaagccttcaaattacattatcaacatgagagaaatcaccaacaaagaagatgttcaaaataatagtcccatatctgtaatcatatctacatgcaatgttagtaattctgaagttttttaaatttatggctatttttacacgatgatgaattttgacagtttgtgcattttctttatacattttatattcttctgttaaaatatctcttcagatgaaactgtccagattaattaggaaaaggcatatattaacataaaaattgcaaaagaaatgtcgctgtaaataagatttacaactgatgtttctagaaaatttccacttctatatctaggctttgtcagtaatttccacaccttaattatcattcaacttgcaaaagagacaactgataagaagaaaattgaaatgagaatctgtggataagtgtttgtgttcagaagatgttgttttgccagtattagaaaatactgtgagccgggcatggtggcttacatctgtaatcccagcactttgggaggctgagggggtggatcacctgaggtcgggagttctagaccagcctgaccaacatggagaaaccccatctctactaaaaatacaaaattagctgggcatggtggcacatgctggtaatctcagctattgaggaggctgaggcaggagaattgcttgaacccgggaggcggaggttgcagtgagccaagattgcaccactgtactccagcctgggtgacaaagtcagactccatctccaaaaaaaaaagattatatatatatatatatgtgtgtgtatgtgtgtgtgtgtgtgtgtgtgtatatatatatatatatatatacacacacacacacacactttttatatatatatatatatatatatagtggaacttacaaatgagagtaatataatgatgaaattttgaactgttatttataaacatctaaggtaaaatggttagtcatggccagagtatgtttcatcctttaatttttgtccatttgaaaataaggatttttgaaagaattataccaattaaaattattaaaggcaaacatagaattcataaaaaattgtccaaagtagaaatgatgacctataatttggagcatttccaattcagtaatttcaattttgctcttgaaaacatttaatatatatccaagactgacatttctttagctgaacctaacgtttgggtctctgagtgaatttataataactccttccttccttagcatagggttttcaaaatttgatttataattcctatttccagtaaatattgttcatttgtccacatctctccctatgatatgttgctggaggtaagaatttctttcatattcctattttttttttccccatagactaggctcatagaatttaaacaagcaaattttcctgagctttttcttgccaaatgaaagaagactggtaaattctcatagagaggtttgtgtagttcttggctcttcctggggttaatgtgcttatattcacagtggcaaattggtctcagactttaatttatttatttttgatttgaatttctctttaaaagtatcaatttaaaaggtaactagaattattctttctcattttcaaaagtgatttttgcattattaaatttccctgccattgtaatgccatttcacgcagaaaaaaagtcagccagtaattaagaaaaaaagtgatggagattaagtagtattttggcttatttttaggactcatcatgagaagacacagttcctttaatcaggaaattaatatccataattttcactcaaaattgcagtatgtaaagcagattctcaaaaactctcctgaacacttatttatatatatgtttttatataagtaaaatttttctcatatttttatacgatatgcacacacacacatacatgcacatactacttactacatgttctgtacttgtactttgtaccatgcatattcaaatgtttatatacataagtttattataacataaacagtaaaagtaatgaatactgtttaaaataactaatatagtattttttaatttttgtggggatggattctcaaatacttgtgattttaaaagattctaaagctaaaacacaacttgattttaaaaagaatgattctccttacacaattataaatatttgcagtaaatattttccttataatactgttttgaccccatttaaaaagtattagattatattcctttgatccaatgaaaactgaaccttataaatggttagctgaaagtagaccttattcttgtccttctttagaagagtaaagatttgtcctagggaagatggctgacttcggttcccaacatgcgtatgcatttagactgtagctcctcagccctgtggacacaaaatttggacagcttattaggttacgttagcaatgcatgacggtttctccaacactaagatattcacgttgaaacagatttcctgttcgtcttatgtgtctggtaaaattgtttccccaattacaatttgacatatcaatagagggttaacaagagtataattacataacagaattcctcatgaactgtaatcagtctacaggaaaatcattattttatcttgatttgcagatgaatatactgctaagaaagggagcaactctgacctttgttaaagttgatcttttgtaattgaggtataaggtatgaaaagataaaaaaccgaaggccagagaatcaggaaatgaaagatagtatggactgaaggtaacaatattttaatgttatgcaatatagtcagagaaatattaaaaattagttgtttgctgtgcataggtggatctcgcaggaagctaatgaaacctaagcttcagtgcctctcacttagacatgttccattcgaggtcctgaacctaactttgtattaggaattctgtactaattttgttgaagaagaccagcaaagttgtgtacacttctacccccacaaaatctgcattgtccatgtgagtaaagtaaaataattcctgttatttttttctgttagaaataagtatggaggatatgtttttaaaaatttatgagttaattgaaatatccatatataacaagtgactttctcacaatatatatgatgtgatatatagggagatagtttcactttcatcatattttatacgttgattctgaactatagaaaaataataaatgggattttaattatagctcttagttgggaaagaaatatagagagatgtgggatttgaatgcccatgaaagacattttattttacttgaatatattcttgcttcactttaccctccataatatgttgtacattagtgctgatcaagtttacagagttacattttgctttcctaaccattcagtcaggaattaaaatatggcattgtataacaactgggaagaagctcatagtggatataaattagagtagataatgggtcaccttgatagcctctgtttacattacttgtatatgggcaaaataattattacctatacgtgtatttaagcttaattttcatataaacagtatttttaatctatgttaaaatagataatatctaaaagtgtgatctctaggtagtccttagtttattagtactgtacttcaaaaagatttttaaataggtccggcacggtggctcatgcctgtaatcccagcactttgggaggctgaggcgggcgaatcacctgaggtcaggagttcgagatcagcctggccaacatggtgaaaccctgtctcaactaaaaatataaaaattagccgggcgtggtggcaggcgcctgtaatcccagctactcgggaggctgaggcaggagaatcacttgaacccaaggggcagaagctgcagttagccaagatcgcatcattgcactccagcctaggggacaagagcgcgagacttcatctcaaaaaaaaaaaaaaaaaaaaaaaaagatttttaaataatagctaaaggtatgctctctaggtcatccttagtttattagtactgtacttaaaaattattttttaatagtcaattttgggagataattatttctttccttatattttccaattagttggtgtctaaaaataaatgttttgtctaattttagatcaggtatacattcacaaaagcataaatcatagtctcacaggaaattcaccaattttccatatgtcgtgagataactgtcctttctacaacctcataacaatgaatttatataattacctagattttcttagtgtgaatctacccattagttttattttcttggtagttatttttttccctcctctctgttactattggccttaaaatacacagaggacggttacagtgtcctaatagctgttacatgtgtgtgtttcagcgtacttgaatcaagtgtacatttatagtaccaataaccgcctttacagctttacagttaacaattctctcacaaaactgtagagcattaggcatctgagagccatagagggccaactttgttccagagtgaacatgctttttttcctcaacatatacactactgattttttttaaaagtatgactttcaagtgaattaatgtattggttaggagaactgcttgctaagtccttattacctcttgttaaagcctcagaaggccgtgctgaaagccagaggggaaaaaaagagtaatgcacaggtatctcttttgcagtggtgactgtattttgagtaccttgtgtgacagggtattattacagcatcttgtgggaaaacctattaggcctttgcatgttaaagctgtataatttgttgggttgtgagtggtctgacttaaatgtgtattataaaatttagacatcaaattttcctactaactaactttattagatgcatacttggaagcacagtcatatcacactgggaggcaatgcaatgtggttacctggtcctaggtttgaactgtcttatttcaaaagatttctgaattaatttttccctagaatttctccttcattccaaagtacaaacatactttgaagaatgaaacagattgttcccatgaatgtatgctcatactcgactagaaacgatctatgttaaatgactgtgtatatgaattatttcaagtactaccccaaataactttcttattgctctgaaagaagaaaagcaatgtaaatcactatgattattgcacaaacaaccagaattctccaacaattttaagtaatctgatcctcttcttggagaaaattgttacctaatagtttttccttatgaatgttattactactggtataaatcaaatttctataaatttcctacttaagtcttaagaactgggttcttcctttgatgttattcatgttcagaaaggaaacaacactttactcttttaggacaattcctagaatctatagtagtatcaggatatattttgctttaaaatatattttggttattttgaatacagacattggctccaaattttcatctttgcacaatagtatgacttttcactagaacttctcaacatttgggaactttgcaaatatgagcatcatatgtgttaaggctgtatcatttaatgctatgagatacattgttttctccctatgccaaacaggtgaacaaacgtagttgttttttactgatactaaatgttggctacctgtgattttatagtatgcacatgtcagaaaaaggcaagacaaatggcctcttgtactgaatacttcggcaaacttattgggtcttcattttctgacagacaggatttgactcaatatttgtagagcttgcgtagaatggattacatggtagtgatgcactggtagaaatggtttttagttattgactcagaattcatctcaggatgaatcttttatgtctttttattgtaagcatatctgaatttactttataaagatggttttagaaagctttgtctaaaaatttggcctaggaatggtaacttcattttcagttgccaaggggtagaaaaataatatgtgtgttgttatgtttatgttaacatattattaggtactatctatgaatgtatttaaatatttttcatattctgtgacaagcatttataatttgcaacaagtggagtccatttagcccagtgggaaagtcttggaactcaggttacccttgaaggatatgctggcagccatctctttgatctgtgcttaaactgtaatttatagaccagctaaatccctaacttggatctggaatgcattagttatgaccttgtaccattcccagaatttcaggggcatcgtgggtttggtctagtgattgaaaacacaagaacagagagatccagctgaaaaagagtgatcctcaatatcctaactaactggtcctcaactcaagcagagtttcttcactctggcactgtgatcatgaaacttagtagaggggattgtgtgtattttatacaaatttaatacaatgtcttacattgataaaattcttaaagagcaaaactgcattttatttctgcatccacattccaatcatattagaactaagatatttatctatgaagatataaatggtgcagagagactttcatctgtggattgcgttgtttcttagggttcctagcactgatgcctgcacaagcatgtgatatgtgaaataaaatggattcttctatagctaaatgagttccctctggggagagttctggtactgcaatcacaatgccagatggtgtttatgggctatttgtgtaagtaagtggtaagatgctatgaagtaagtgtgtttgttttcatcttatggaaactcttgatgcatgtgcttttgtatggaataaattttggtgcaatatgatgtcattcaactttgcattgaattgaattttggttgtatttatatgtattatacctgtcacgcttctagttgcttcaaccattttataaccatttttgtacatattttacttgaaaatattttaaatggaaatttaaataaacatttgatagtttacataa

SEQ ID NO: 646 - DNA, 1384 bp, Homo sapiens
acacatctgctcctgctctctctcctccagcgaccctagccatgagaaccctcaccatcctcactgctgttctcctcgtggccctccaggccaaggctgagccactccaagctgaggatgatccactgcaggcaaaagcttatgaggctgatgcccaggagcagcgtggggcaaatgaccaggactttgccgtctcctttgcagaggatgcaagctcaagtcttagagctttgggtaagagacaccagcattgcagagctaggagtgtagagaggaaaaccaagcacttctagaattagatccaacagctggctctttctcttaggtgatcacctccccaggcctcaattactttatgtttgtactgaaaaggaagaatcagtgatattcaaggcatgacttttctctaaagattttttaattctatgataagtctatgaaattttctaattttttgccatgtagaaatgtattgaggagtctctacttcaaggaagagagcctaattttaaaggaatgttttgttttgctttgttttgttttgttttgtttgatggagtctcgctctgtcacccaggctggagtgcagtggcactatctcagatcactgcaacctctgcctcctgggttcacgcaattctctccctcagcctcccaagtcactaggattacaggcaccagacaccaagcctggctaaattttgtatttttttttttttcagtagagacggggtttcaccatcttggccaggctagtcttgaactcctgaccttgtgataaacccaccttggcctcccaaagtgctgggattacaggcgtaagccaccacatccagctgctaaaggaatgttttttaatctgacttttataggaaccgttgcaaactggagacagtcatatgggtgcattcagatgtgtgtgtgacagggaaggagcagataagtacagcatatcagaatggctctctaatcctgtgtgtgaccaacactgctctgcgtatttattcctattgatggtgtgatcatgctattggctgtaatgcagccagcattacatgtcagcaagcatgcaacttcctgaagattctctttactgcccgctgctgaccctggtgctcaatttctgatgctctctctctctgtccccaggctcaacaagggctttcacttgccattgcagaaggtcctgttattcaacagaatattcctatgggacctgcactgtcatgggtattaaccacagattctgctgcctctgagggatgagaacagagagaaatatattcataatttactttatgacctagaaggaaactgtcgtgtgtcctatacattgccatcaactttgtttcctcatctcaaataaagtcctttcagcaagttc

SEQ ID NO: 647 - DNA, 52251 bp, Homo sapiens
atgggcccctcggggaggcgaggcctgcgggcgagcccttctgagggcagggggtgagggggcggcgcccgccagccaggacagcatcctgccgccgtgacaagcacgcctccggttgccaaaacaacccaaaaatgtgcctcaaaacacgttcgcaaagccccgggccggccggtcgcctgcctctcacctagcccgaccgcccgacgtcctactgccgagcgagggcgagcaagccaatgtgcctagcctcctttccccgatcctccccgccccgccttcccgcttctcccgcccccggatagctcagcagcctccattttccagatctttctcgaacccgcagcttcttgggcagccgttgcccgagtgctgacggaagcggccgaagtccgggcccggagctggctcgggcgcggagcggaggctcgcgcgcctcccgggcagccgagcgcgcaggcgcaggtcccagtaaccgccggttggaggcggccgaaccgcagtagggaaagacccaggctgcgggacgcggtgcaggctgcggcgctgacggcctctgctccttccgcgggtttccgactccctgccctagattttctgcttagcgacttggggtcccctctcgtttgcttctggtaggagtcgcaatcccagcagcaatagcccagaagaggacacggttcccgtaccgaagggttcagtaccagcagcccgaccatcacgcggcgggatgtctgtggttggcattgacctcggctttctcaactgctacattgctgtcgcgagaagtggcggcatcgagaccatcgccaatgagtacagcgacaggtgtaccccgtaagtgcctctgctgagcatcacctcgaccctaagaaacgtttttctctcccgtccttaacgtttgtcctgtctgctcgcttcctcggattttcccctaacgtgcgccgaaccccgagatgacaggtgcaacccgtcaaccgcagtccctagagaccgccgggtggcagtcggacttcctcgccccgcaaagcttcttttccttcaaggacgagggaccgcactagtttgcgcagctctcttttctgtacctacgcacgtcccctgcctcgtgccgctgtcccccaacgcctcttttgcttgcgaggaagaggttgctgtgggacagcccctggcgtccggaatattgagaaagatctccggttgcctctaacgaggtttacgtgggattatcggccccgcgccagctgccctccttcctttccccgtccctctgggtgacagctttttctcagaaaagtaaaaagtcagcttcggctgcacacgtcagagatgaattgcaggttcatctggccccgaaagccttttttttttttttaagggcggggagtgaggcatgtggggttttacaaaacccagtgcccttgagaactgcaggtaatggagccggtttacagggccaggtcaatggtgcattgatagggagagcctcgggatgggagtcactggccttgtgcattggtaactacgtcagttgctggaatgcggcggggttgggtcggaccaaaagcgtgtttctgcagagtgaattgccggagtcgggggcagctgtcccgtataaacatgactgtggagtgattctattatgaacgcttaatgaaaggcttaggaggagcggcgttatgtcatggaaacatgtttccacatgttccgttgtttctctggcctgggaagtttgttggcaaggaatataatgaagtaattctgaaatatgaaaaactagttgctgcttataggctgctgttactggtaattttatgaggaaaccaactgtatgaaacctatattactttttatggaaaggtaatttggcatcttaatttgaccgttctgaatggtccaaaatataataccttaactatactaaaacaaggtcagtgtccaatggtctttaaatgcctcatttactattctatggaaagctttaaaatatggcaaaaagatgttgaagagtagctcacttgaagcagtctgtgctttgatttctttccaagaagattctagaaggttttataccttttttcgtagatgtacacgtttcttctattgaaattttaaacgttttggacgtttatattttcaatacatgggcatagataaggtaatcctcaataatgtttgaactcttctactttttacatctttttctggcttttatgcacagtgagaggccgaaacagtaactgtgaagtcgatgaattcgtctctacaaggttttatattaagccacaacaaatactggctttcgccagaaacagaccggaaattccactctccaccttcagcagagtaggggttaaaaatgggagcaatctttggcttcattgactctcaacctatagagaaaaaactgagaggtagggtggacattcttttagtccttaaagccatatcctaaaagatcagaaaccagaacagtaagaaagatcgatctgcatttccaggctgagaaatctctttagcagtgagtgaacctgtgattctttaaagatcctggccggccagacttagttctttaaaaagtgggcttctagagtcttctaaaagtctctttgttattgtacttaggcatattcgctggttctgtgtggttgagaagtaatgtgatatttctgatttgtgtgctagaaagccaatagtaatatctagatttaatgagcctaatctaaactagaaagttcttaaaaagtgaaaggatattctcacttagcttgcatcagcaactcttctctccatggctgggcactgtcacttacctcagaagtgtatcttttgttgtttctgaacaaaagtacttcatggtagtgtagtgctcttacactatgtattactttgtgggtccaattgttgaggaaaaacatagcccttccgggcctcaggacatttatccatcaattcaacaccgatcatgcaaaaagcattgtaactattagataacctttaacttctctaatacaccacagtatttaataacacacataaataaaatgttagctttgcaaataaaatgtttttcatattccaattgcttacatcaaggtaatgtgacatattttctaagatgtgaatacattataaaatgatcctatgaaaagaggaaagaaatgttcaatttagttgttttcagcattcatacattttacgtttctttcattaacatatttgattgcttatggttgagaggattccatataaaccaagaaggacagtttaatgaaaaagaaccaagttttggcctataattaagggacaaaagacaagttaatttaacctatttaattcagattcaccttctgtaaagttagagtgtttatactagcctctcatctcctgcataagttgaagagggagagagaaattaacctgcataaattgaagagacaaaataattttcctgaacatcttattgaaaaattattacataataatatgtgctcattataaaaaatactggcacattaaaaggtgaaattaaaaatttaattcctccagatggttttctgtgtgtgttttcaaagggaaggggaagtatttactttatgtttagtaacctttttctttttttctttttttttttaagacgtagtcttgctcttgttgcccaggctagagtgcagtggcgcgttttcagctcactgcaacctccgcctcctgggttcaagcgattctcctgcctcagcctcccgagtagctggaattacaggcaacgaccaccacgcctagctatttttgtatttttagtagagacggggtttcaccatgttgtccaggctggtctcgaactcctgacctcaggtgatccacccgcctcggcctcccaaagtgctgggattacaggtgtgagccactgcacccagcctatgtttagtaacctttttctatgtaaaacatacatatttctatactatcagttgtagtgtctgtataatcatgataatttaatccatagcctaataattcaggttgtttatgatactttgtaaacagtgttgcaataactatctttgtaactaaatttttgatccttcaagtaaattcctagaagtagaattactgagtgtccacatttttaaaggcctggtacatgtctgcattgttacttaaaacaattagaatttccatcccaggcttaagtataccaaggtgattagtttcacacatggggaaaaaaatgatagccaagaatcgtcattaagtatcaaattaaagcgtgtggtaaattggaatagtgattgctatgtgctaagcaagcattgtcatatgtatcacaattctgtgagtttgatcatactaactatcttttttttccgtaagaagcctaaagcaaagttaaatcacttggccaaaaattagtaaaacaatgaattggattctgtttcaggcctctctgaccctagaacccaaatgtctttccagtatccattgttgtaaggatggcatatacgtaactaggttaatgatgaaaggaacaaattacctggttgagcagttattgtacaggaaagcatctttgctctaccatcaataaatgtctaattttagctagtttttaagaaatactatcttttttaaaaacattattttaataattcctaaaaatttttttgacacagggtcttggtctgttgcccaggctggagtacagtggtacagtcatagctcactgcagccttgagttcctgggctcaaaggatcctcccacctcagcttcctgaatagctaggactacaggtgcatgccaccatgccacactaattttatttttttccaacagagacaaggtcttgccatattgcctaggctagtctcgaactcctggcctcaagccatcttcccatcttggcctcccaaagtgctgggattataggcgtgaaccaacgtgcctggccagtaattcttttaagttatgttaaggacatgtaaaaatcttactttgtttttaaaattcataaaaaatacatacaaaacatattagtgtaaacatttggagaaaaagtagtgtggaagacaataaactactattaataatggatagatacttctcagaggtagaattatggaggaggtgcttttaatttatagtctgtaattaatactttgtaatagggaatatggattttctttaaatgaaactgtgtcaagatttttgttaggaatattttatcatcaaaattctttatgattcttcaatattcagttctctggttttctatcttattttttcctatttctttactagcatatgaataatctggaaatatgggaaaatgctgtttaaacactgtttcagatgagtgagacccctcttaaatgcatgaaaatagaaatcactttggtgcactgaaaacaacagcacatagaaaatgccaaatcggggggttaactgtggctataatagatgggcattttctggtgatggcagtttgggatgaagaagaggcttttacctttttttgttaaatattctttttactacatgagttggttttatatgttttactatttgagcttatattttatttaaaatattttaaatgctgaagaattacacaaagtaagtctcccccttcatcccttcccaaccacatcctaaagtttgatttatgtttctagctatacaagtatgtgattatatgtacataactgggattttttaacaaaagcagaattacattacattctgctttcattaaaaaatagtttttaagtattttgcaaattgctttcttttcacctcaaaatattgtggacatctcaaacttatggctctaatttacttcattctttttgctagctgtatagtatcccattgatacagtgactgttttggacatttcaagttaatattttgctagcgacatataaaaattcagtgaatacctttgctttttttaaatcaaatttgctgagatgagtgaaaagccaggttatttctaaatgtttaacattgaactgacttccttaagcactgaaaaaaaaaaggtttaatatagcactgatagtcttttaatatgtggtcattataaattaatgagtatagttgtgttgtgatgaaactttatttacaaaaataggttgcaggtagtggtagtttgcaaactcctggtctaaacaattataaccaaaagaattttaacattgttacgcattgatatttgtgtttgaaccaagtgaattataggtaatatgagtttttcaaataatatatctaatataataatttaatagttaaataatgtatcaaatttaatgtagctagtatacctaatcagcttttaaaatattgtctacctatgtaaatatttgtgtggtttctactaatggcttcaagctaatttatttatgattacctttactaagcatttgaaaactcttaaattattattgtttatatattgttaaatgtttaattatttgtccataatgaaaagctgaaagctttgttattactaaatcatatgtgcccagaagtcttatttttaagtagcaagctagaaagcaaattgcagcagtgagttttttttagagcattcttccccctcccccttctagggcaacattttttccaaataatttgagaaacaatatccagatgttttctttgctgtagaattttgtagatcccttaatttgttcataagcattgaaattctccaagaaagggatgtttttcccaagcttatttgaacgtctgaggaattatgtttcatagaacactatttgggaaatgttgttctagggcagaggttctcaactggaggtgattttgcctctgaagggataactgacagaatctgagatattttggggtatgtcacaactgaggtctaaagaggaggtactactggcatctagtggttggaggctaggaatactcctaatatccgacagtgcattacagtacagccccagtgacccaacaaagaattatctgggccaagatgtcagtagtgccaaggtagagaaatcctgctctgtacacatcttggcaagcatagttgaaactatttgttcagcctttgatttaaacctatggattacaatgatagcagagggtaaagagtaattgtgattttatggaactggcaaggaaaagaaaagggctgtttttaaagattagagagtgaggattgaatcttaatggagaataatagggagcaaacaaacttagtactgagcttttaggcaacaaatctcttctggtagtatgtattttctccaacctaattacgcttggccttataaaaattagctttttgagagaagaagaaaatcctaattttaaagagaaaatacagatacagctttcttaaagtagcatcttgtcatctgatttttatgcccctctcctactaaaaggaacataggacatttagaaatcttcattgtttagaattttgtggtattttctgatagtctgagattaccacacaatagcaagagcagattggatattatagatttaaactgcattgaaaaccgtccctggccgggcacggtggctcacgcctgtaatcccagcactttgggaggctgaggcgggcagatcacaaggtcaggagatcaagaccatcctggctaacatggtgaaaccctgtctctactaaaaatacaaaaaaaattagccgggcatggtggcgggtgcctgtagtcccagctactcgggaggctgaggcaggagaatggcgtgaacccgggaggtggaggttgcagtgagctgagactgcgctactgcactccagcctgggcgacagagcgagattctgtctcaaaaaaaaaaagaaaaccctccctttattttagccataaaatgacatttctaaatagtagttgaaataatcaatacaaagtataatatagattatgctgtatacacttggataaactgtatctttttctgtgaaaactcttacatcagcctaatatgtgttataatgtgtctgtttcccttgctattactaatataaaagttttgagagcaaatatgtgtttaatttatttgggtttttctgaaaatacttggcaggtattttttatttcatgattgtaacatcctggaatgtatttgaaagaaaatcgaaggagtttgaagggtgcctttataaaatgggttttctatgtattttaaactgggcatttccaagcctggttaaatgacagattttttaactttaaaagttgtctgctttcaacttcagagaatatctcatactggtaactgtttagctttctttgtgaagcgatacatgtatgaaacacatttcaaggaaccagcgcttaatgatagttgaatctgaatcttctttggctctactgttctaacaaaaattaaactcttgagaatcaacctacaaataagattttcagtgtagtcaagtgatggtagcctagtattgaaaaattagaagtatttgaaagtgtgtccaaataatggagttgggagcaagatgagttataaggtaggctgagaaatggcaaacgcatattttctctaatagatgagttttaggatggaatgccaacatccacacattaccaaattggatatgtaaatttttactctggcagagaatatgttgaatcaaggagttatttataagagatgtgaagatgtcatctaagccactgattcctgctatacccttattttcctgtttttcaccaaatcacaactaaagactagtaacttccatttcctctttaatttgaccatcacttttaacatttcagttctaaatatatatttgcttggatgcctcaaacttacctcaagcctaatgtgttcacaatagagtttgtgactgtcctgtccccaaacctatctttcttagaaaattttctgtctcattgagtgcaactagaaacctagatattattactgtcacttgcctcttcttactatctagtccagcactgtccaataaaagcatatgagctacataggtaattttaaatgttttaatagagccaggtacagtggctgacacctgtaatcccagcactttgggaggccaaggcaggtggatcacttgagcctaggagactagcctgggcaacatggtgaaaccctatctctacaaaaaattttaaaaatcagccagtagtcctagttgctcaggaggctgagataggaggatcgcttgagccctgcaggtcaaggcctcagtgagccaagattacgccactgcactccagcctgggtgacagagcaagaccctgtctccaaaaaaaaaaagttccaataattaaaaaggcaaaatgaagcaagtgagattaattttaatatattttatttaattcagtatatccaaaattttatctcaatatgtaatcaatatttttaaattgagatattttacttagtattaaatttttagaatctggagcacagatgtccaaccatttggcttccctgggccccattggaagaagaagaattgtcttgggccacacataaaatacactaacactaaagatagctgatgagctagaaaaaaggtccatccataatttttgtgatatctgccaccacagacaaaagagtccctgcattcaaacggttggacacccatggtctaaagtttattttgcactttatataagcacatctcaattcagactagccacatttcatgtgcataataaccacatatggctggtggctagtggctgccatatgggatggtgaagatctagtctgtcaccaagtcctttaagtttcctcctgaatatctcttctttcttcttgtgtcccagctgtcaccatcctgatatagactactggtaactttttgctctcctctcatcagttaacactacagtcaatatgatctccaacaaactctctaccacttttatcccatcatcatttactcttccttaaaatcttatttccttgggtaagcctttcctgactctcctcctctaggttaattcttgctgttacaaacttttatagcaccatgttcaccttctgttatagcacctagtttactttcttttgtgtgagtctatagcattgtgagatccaagagagccaaaaccatgttttctttcattattatatccctagcaactaacagtgtgccaggcatatagtaattattaacaaacatctgttaaattgactaaattaactttttaactgtttgctttctctgaaaatccagtagtccccagcagaacagtgttttgttcagcccttggaaagcactgctctggaatattgcctctccagtttgtattatgtatcagtatgtagggtcctctccattattcagaaacatttaatgaatcctcattgaaatttaatcctcattaactgaataaattttaagattataatctggcacctgagaccctatataatctggccttgatactatcttatcaaattgtcctatgaaactagccaagttgtattctttttgttttctccctggctgagtccaaattatattcttctagtcctcaaatgagcattaccttaggaaccattattccattcattatgtagctttattatgtccttgaaaaagatctaggctagaagatctaggctagtgctatccagtagaactttctgtggtatatttgttcttgtatattcagttctctgtatatctgctagccacatgtggctgttgagcacctgagatgtgactagtcctgagaaactgaatattctagttaattgaaattgtactagcaccacatggcttgtggctaccatattagatagtgcagatcaaggcagtggatacctgttaccttgccttcatagagttcacgttctggcttctggtactgagatacagtcactaaatgaattgtatcagatggtaatacatactatggagaaaaataaaattgggttaacagtgtgaggtatgtgttggggaggagcaggaatgttttttatataggatggtgaggataggtgtttctgataagctgacatttgagcagagacctgaaaggagtgagagcaccagccacatggatgtattttctgaacacttcagaaagagagaacagcatttacaaaggccctgaggcaaaagggtgcttggcatattctagaaatagcaaggagaccagtgtgcctagattgaatttgcagggtagagcagccaaggactggaccatgaaaggccttattggctgttagggggacccaagcttttactttgtgagatagggcaccattggaggattatttcatcatcagagaacagcagagtttcatgatcttagtttttaagtggatcactttggctactatatggagaacagacttacatacctatatatcaggaatgtctatttctgcaagacaaatagatattaaatgttttccctcaagtcctaattcaagaagtcacctctcttatctagaagtaattattctcttctttgctagtattattcataattctatatattctattgattttttttcaatagactatacattctcccagacaggtattgtgacttgtatacatggagtgcctataaatgtttgttgattgaatgtagttttctgtagttataactgaaatcacagaaacattttcttgaatcataacattaaatggtattttgatgaagatgttattctgtgcttgctctgtgttattattccatgctattacatttaaatgtggtaattaaaatacaagaatttacataatgtttactatgtgccaattattgttcaaagcatttacctatatccattctcttaattctcacataaccatatgagcagatattatcacaatcttccagacaagaagctgaagcacccagtggttatgtaatttccacaaggttaagtggcaaagccaggatttagcctttttaactgtttaccttccctgaaaatccattggtcaacacggttgagttttcttttaatgggtcatagatcagtgtaatttgaaaaacaattttggagatcaacattgtattgccagctattaggacttttttaaaaaattgtaacatttattctgaccaccattttattatatagggaaactttaaaataaatttttgatttgcataacctatttttaaaataatatatggttatatttctccttttaaattcattttcttataaggagaagcaaaataatagcacaataatataaaagtaccatggaacaaactttttgtttttctggtttagggcctgtatatcattgggatcaagaactcgagccattggaaatgcagcaaagagccaggtaaattgttaatgtggatgttttgacttacaggaagaattaactgaatattggtaactaagttccttaagttatattgttaagagtgaataagagagtgaggaaaataggacaggtactacatctttgttttgttttgttttgtttttttaagatataatttgctttgggttgtaaaatatttcttgaattttattttttaaaaatattttttagttgtgaagttagggtgtgctactatgtgacatcaatttttccccaaatggtccctcaggtgaccatccagagaataatgagggatattctgtctagaacatacatttcaatgatagttaagtaacatctttgtaaaataaggtaggaaaaatgaaagaactaatttccagagtaactcaacgtggctaccactaatttacatagaatttgttgaagtatttatatttttaggcttttgaaatctttatgattagaacgttgacttttaacattccatgttataaactgattttccttggactttcattacctccctgaactaaaagcccttaacaattatttcttgcattttatatatatctgggtcttatatctcatattctggctgaccttctaagtgtgtcacagataatcagagtctctaaaagcagcctttaaagtcatttctcctaaggagttaaagagagcaacatagtaattcagcatccctatagttttcatgtcataattgaagatcaaggtctgtttggctttaaaggtcactaggattatagcaactggatctcagtaatattctgtaatttgaactgcatattctagttaaagaaaaaattgctttgcaaaaatgcaagccatttacaaattaagatactttcatttagcactatgctacatggaagggattttaatttactagcctaggagcaatctgcagcaatggaagcaacatggtagtacatgaagattttcacaaagaattagatatggagaggaaaaaaaaacctagacaataataaaccagtttaaattaaaacacagaaatggaagtggaaataaataatcaaagatacaggctgcatatcccttataagaaatgcttgggaccagaagtattcagattctgtattttttcagattttggaatatttgcatgatacaggttgaccatcccaaatcctgaaatccaaaatgctccaaaatctgaaactttttaagtgacaacatgatgcacaatggaaatgctcattgaagtatttagatttcagatttttggatttgggatgttcagctcgtactaattcactagagcaaaagctcgaggaaaaccaaaaagatgagttgtagatatttgtaatttgaaacgttttaaaggtttattcgttctcttctgaagacattaattttgaatctaacattcccaggataggtggataatttgggaggcaagtgttaaaatgtgtacattctcattgtatgactttaccatcagttggaaaccagaaaaaatgaatgattatttgtaatcctaaacttggatgtgtaggataaaggaacttggtggttgtcaagtactaggatagaattttattttgcatttattaggtaactgataaatacaagtgtttactgccaacagatagtcacgaacgtaagaaatacaattcatggcttcaaaaagcttcatgggcgatcatttgatgatcccattgtgcaaactgaaaggatcaggcttccctatgaactgcagaaaatgcctaatggaagtgcaggagttaaggtaagctttatattcccagggttacaaacatatcttcaaattaagtaaacccaatgtgataatattgctatttgtagtttgacctttttcctctagatacagtacatacacaccgaagagatagtagtttttgtaataattttagtgaatgccaggagatctaatttagataattttttcattcaaatcacactattattgtcaaggaaaaaagtggttattgagactcaagagaatagtttttaggggataaaaatgaaggtatataggattcagaagaatagacccaaaaagtatgttaattcagaagaatggacccaaaaagtatgttaatagctgtaatgagtttaatgagttctaatttagaagaatcttatactataaatgttaaagcatacttttcttccaagtaagagatggattctgaatttttaattttatattctgagatagttgtagattagttaaccaaaacatgtttgtgctgatttttttcaaaaactagcctcataacacatggaactacttactatatggccccgaaattccactcctgggcttatactcaagggaattgaaacatacgtacacataaaaacttgtacatgaatgttcataaaagcattgttcataatagccaaaaagtggaaacgatacaagtttctatcaactgatgagtagatatacaaaatgtggtatatcttaacacatggaatattatttgcccataaaaaggaatggagtactggtatgtgctacaacatgtatgaactttgaaaacatgccaagtgaaagaagccagatacaaaaggccacatactgtatgattccttttatatagaatgttcagagtagaacaaattcatagaaacaaagtcagattagtggttgctaagggttaaggggaaggaaaaatagagagtgactgctaatgggtttctttttgggtgatgaaaatgttctacaattagataatggtgatcagtgcacagctttgtgaatatactgaattgtacacttcagaaggataaacttaatgctgtgcaaattatctcttaagaaagttatttttagtaactaattttagacttgatatatgtgttatggatatgtacacagttccatttttagaagagggttctgactaaaaggtggatgatgaatcgtagtaaggagacaggaggctgttaaaatagttgaggaagacaccatgagaagttgaagacagggaacaaattgtaaatccatattttaggtgaaattttcaggttactaaagtgagtagctggatgggttatgatagtaacaactgagataaaaaataatattcagatatcttttagatatgataagctctagttaatggttacctagagcagttttattctactccagtttaaaatttgaactacttaattttgtaagtagtttaacttcttaaagtgaaaattaatagatcaggctttgagaataggctgagaaaaacagaataatgtttttaaagaaaggcagaaccaaagttttgagtgatataattttatacattcatagtaagtgcctgtaagctagtagaaaaagctttgaaacatcatcttttgaagacttaagaaaatcaatgttcaactcctcaagcatgttatacatttgttttttatacatttatttaaatttatttcatctaactttaaaaaaaatttttttttttttttttgagacggagtcttgctctgtctcccaggctggagtgcagtggcgcaatctcggctcactgcaagctctgcctcccgggttcccaccattctccagcctcaacctcccaagtagctgggattacaggcacctgccaccacgcccagctaagtttttgtatttttagtagagacagggtttcaccgtgttagccaggatggtcttgatctcctgacctcatgatctgctcgcctcggcctcccaaggtcctgggattacatagaatattcttatacaaaagaatactgtatgatcatgcctccaaaagtcagattaagactatgattcattttctcttatttctgtttgcttgatttctttatgcacccctggtttaaaggcagtaatttggcataatacttgtttttgaatttacttgtaaataggtttggaaacaaatgcttatcaattttaggtctgattcagagtaaatcttatgtcattagatatatatatttatacatactcatatacataaacacattgtgctgcttgaaagaatgatgttctcatttccttttccaaaactgtatgactgaagcttttattttaaacccagggagagttctgactttcaaaagaaagattatttgatcttttcctttttcattgtttgctgtgtcacatttggaaaatgaattataaaaattgtttttgtgggaagtggggatctgagagggtagaaactacacttttgaaaatactttggttataatactgtctgtaaggtactacagcctcagaaatgacatagtcactgtttttaatgggatcatgattctaaaatgacaatctttctggaataaaacttccttgagcaagggtgtctttttcccattgtatgtctatcacatatacagtaggtgctcactgaatatttgttggataaacaaatgactcttaataaatatcccaacttttggtgttaggtgcggtacttagaggaagagagaccttttgcaattgagcaagttactggaatgctgttagccaagcttaaagagacttcagaaaatgctttgaagaaaccagtggctgactgtgtgatttcagtaagttttacttcagtaatgaatacccttgaattatattttacagtgtattaatgtaatattgaaagatttttcttcccttacactttctgcccttatccagtaaataacctaaatccatctgactttctttttaaaaaaactgccttatttgctaaagtttaggattgaatttcccataaaatcaattatgatgagcagtgactcttaaaaaactgttatgtaactagtgactgctgctatctgggatttatccctaagaatcttctcagatagcaattaacttcccacctgtgaggaccttaacattttatagcaaaggttgaaaatttctagttgggaatttgaggttgtgtatcaggggaaaaaaaagatctttaaggattcttaacatttaaattatttaccgtcttatctcttgaggtcccattaaacattgttaactggttctttacctacatgttaactaaattgatatattcctactattcaacttgactacaaaagttcaagagtcttatgtcatcagaaaaacagaatcagatgatgaacttttcagtgagtttagtaatcaattttttttcataggcatttggaatttttttaatgggagaaaaatattagagcttaatattttattttctagccatttagtaatagcaaataatagagtttaccattgaccaggtactatttataggcattttaacccatttaatctcagaagcaatctataaggtagggatattattaaccctagttttacagattcaaaaagtaggatactgagatgtcaaataacttgcccaaaatcagcacagctaatatagtgttagagccagatagttaattcccaagcccatgctcataattgttatactgccacttgaaaggatatgttagaatcatacaaattttaaagattcgtcttaaattcaaatccatttctatttaattatatttttccttgtgtgtcagaaattcatgtcagaacagagtaatacaaacttttgaccattattaactttgtggttggtgcagtagacccattgtaagctctacagggacaagtattttgtctggtttgtgcactgttttcctggtagctagaaaagtacctggtttgtaagtgctcaatgaatattaaatgaaccatgcatgataacttagatttttgtcaggaggataataccaaatcagcaaaatttatattcttttcctgttgctaatctgttcaatgaaatttctaaattcataaaacaataaaattaaaggaagctacttatttgaaacttaaaactggaagagcccaagttgttttatatgtaaatacacttaatagctttttagaaatgggtctatatgtcaaaatacttctcagtttgataaaactagggtgtatacatacgtacatctttatacattttaagactgagtttaatttttaaatagagatgtagttaatgggctgggcatggcggcttatgtctgtaaccctagtactttgggagaccaaagcaggaggattgcttgaggccagtagttaacagaccagcctgggcaaccatagtgagacccgtctctacagttttgttttgtttttttttaactagccaggcatggtggcacacacctgtagtctcagctactcagggggctgaagcaaaaggattgcttgagcccaggagtttaaagctgcagtgagctatgattgtaccactgcacttcagcctgtgaggcagagctagacacagtctctttcagaaaaaaaaattttgtatacatatatatgtatgtgtgtatgtatgtatgtatattttttcaatgttatttggtgattgttaaaggaaattcctatttatcacaagttccctacaatatagttcccctcctttgaaatataattgttttaaacagttgggactgtattcttctggttgggtgtatatacgcacgataatgaagtaatgttatatgtgcccttttttaacataataaagatagaattccataacaattcagatctacctgattctttgtaacagctacataggattccattatatggatataccataatatatttctctaatctcattttcagactcttgagttttcagttttttattatgaaagatgagcaaatatatttttaatagatcagaataacacaggaagtatttagacgaataaaacttaggcaactctgccatattaccttactttaaattagtattcatactttaggtcagatttttatggtatagaaattgtcaaacttaaaaaataaaacactagtatttttcctctttagttagaacatctttatttgccttaaactgtacataagttttagggtaattatatttttcagttgacaaaatgtttacataaaacattatacttaactgttgtttttaaatactagattcctagcttttttactgatgccgagagaagatctgtgatggctgcagcccaggttgcaggcttaaattgtttaaggttgatgaatgaaactactgcaggtgagcactttgcaatttgaaaatcactataagcaaaatactgttctagtttttttctaattattaacaaagcattatttttttttaactccaaggcaagaggattgcttgagcctgggagttgaaagctgcagtgagctatgatcataccactgcacttcagcctgtgaggcagagctagacacagtctctttaaaaaaatttgatatatataaaaatacgtgtgtgtgtgtgtgtgtgtgtgtgtgtgtgtgtgtgtgtgtgtatgtactgattcttataagcttgttactttgtagtacaactttttggcagaggttaaatatgtcttaatggctttacaaatctttactattacagagttatagatgagtaaggaaaaaataaagttaaagcattattaaccgaattgtgaaaagttcatttactttgaagataataatatgtattactatactgcatattaaagtacagtatcaaagtgacatttcttgttttccaagtaattactgtgctagaattaacataattctttgttcttatacagttgcactggcgtatggaatttataaacaggatcttcccccattagatgagaaaccaagaaatgtagtatttattgatatgggacattctgcctatcaggtcttggtttgtgcttttaacaaaggaaaacttaaagtaagtaaacacatggtttgttatatttacatatgttaagaacacagactaaagaaccgtaatagctgggttcgaatcctggctctgccccttaaactatgacctcaagcaagttacttaatctccctaaatcttcagtttgtttatctgagaacaacagtagtaactacctcatataatttttcaggacaaaatgagttaatgtgtacaaaattcttggaaagcctggcatagggtagctgctataatatatattagctatttttattgttgtttctattgttaggttgttaagtcatctatcaggaagcataaattatttatccataaatgtaattacaggaagcattttctaaaatgattcccattgattttagaaacctttctatccaagcgttctaatcgtaattttacttctgtgtgcttcttacaaattaggtttataatcatttttacattgattcttttgtccagacttatgatctctctccagtatgcacagagtagagtttacttaggagataaactgcaacactgcaagagtattctgtcttaatttatattactataatagcatctttgtaatcaaaaaattaaagggaaatgactcagactgaatatagggtaattttcagtatagattgacttaatccttggcctttagtcttacatattaacttactttaaaaagaacgtttttttccttcctttttagtaggtaactttgtagtgaaatacgatttttagatcacagacccgtttgaaaatctgatcaaggctatagcccttcttccaaaatacacacctgtactagttatataccaagataattttgcatttgattttgggtaatactagacttcatgagaggtctatacatggattctccatgctagtctgtggggcgacattccacgcagattgtactcatatcctcctgtgatatttaccaccatactaccaccccaccacccaccttataatgaaagagctgcaaaaccaccccaacagtaggattctttattagtgactgttgtaagtagtcatttaaccctagggagagagcctagatgtttggtcctatgttttcaagaactgtagtgttgaatttctatgactctcttctgctgggaagcctgttgctcaaccagcttgttacattgttacctggtttttttgttggttggttttttggttgtgttttttgtttttttgtgtgttttgtttttgtttctgtttttttgtaatagtcaaaaggcctaatttctgatccgtaaattgaccaattatggtattttatatttaatctttgaatctgcttttcttggatgttttgctcatgtttatatgcttaggactgtttctttgctctcttaaacttggttttggtctatctgttcagtgctgttgtagaaccaagtgactgagataatgaggctttagttgtaattcagttatttctgaattagaattcttttaattatgatatatggatctgtaactataaagtagaaaattcagaataaggaaatatgttgactaaatataagtgataatttaactctgattccaaattcagcacccctgtgattggacaagtttttttagcgtcatttttatttttacatttttttattttagaggtttttcttttttttttggaagaatctatatttctgaaaatacagttctgctttttcaattaaacaggtcttggctactacctttgatccatatttgggtggcaggaactttgatgaggctttagtagactacttctgtgatgagttcaagaccaaatataagataaatgtgaaagaaaactctcgggccttgttgcgtttatatcaggaatgtgaaaaactaaagaagctaatgagtgcaaatgcatcagatcttccattgaacattgagtgtttcatgaatgaccttgatgtttctagtaaaatgaacaggtaccacgtatgtttttagtttgaaaagtgtttacttattttataatgtttagatcacgtctgatttgtttgttgttttagaagatacgctcaacttttaatcccagaataatgaattttattctattttctcacagggctcaatttgaacaactgtgtgcttcccttttggccagggttgaaccacctttaaaagcagtaatggaacaagctagtaagtggaaattactggactatcaaaactgtaccataatgttgcctacttagcgggggtagataatgataaaataaatttttaaaactttgttttttaaaaagatttatatttctcattttagggaaggagattataactcattattcataagagtaaggcagtataattctgggtttatgagaattcttcctggatcttcttattgtttatatcataaatctcatgctagttctggccaagcacggtggatcatgcctgtaatcccagcactttgggaggccgaggtgggtggatcacctgaggtcaggagttcaagaccagcctggacaacatggtgaaaccccatctctattaaaattccaaaaattagccaggcatgatggtgcgcacctgtaaccccagctattcaggaggctgaggccggagaatcacttgaacctgggaggcggatgttgcagtgagctgagattacgccattgcactccagcctgggcaacagagtgagactctgtctcaaaacacacacacacacacacacacacacacacacacacacactcatgctagttctatttggaagtgtttataaactatagatgattctaaaatgaaattaatgtagaaatggggacataattgctttttcgtaaggattttggtaatcaattaaaaatatcttctatagggatttaggaggtagaaataagaaaattgaaggactctgaagagctcctttaaaacccatgaagtgcttttctctttctattgccactccatcatctggaccaagttggaccaagtgcattgcctgtcacataaataatatttattaaatgttatatctttctaaaaattgtatttttcttcccttttattttctgacaagtaaaaagtcaatccactttttaaaaaagtactcgacaaagccttctgttgagatttttaaagactatcatttttctcaattaaaaaaattttccagacttacaacgtgaagacattagtagtatagaaattgtaggaggagcaacacgaattcctgcagtgaaagaacaaatcactaaattctttcttaaagacataagtaccacattaaatgctgatgaagctgttgcaagaggatgtgcgttacaggtataattgttattttattttttagaatatgtattttgccagaaatgagtgatagatccaaaggggccttttaatgttatctgttccatccacttatcaataagctaaagtaaattgaagttatttctgataaataagtcttatgtctttcccatttatgtttttaagctataataggacagtgtgtctgtaaggacactgaaagaatattaattttacaaattattgcagtctgcccatttaaaatcccttttggagatgtaaagatattctgttaatttttataaggtcacataaagagtactcaggcccttttaaattttcacttctcattgccaaaaaccagtaacttttaaaatgtaacagttgtaataggaggactctattaagcagttcaatcagagtaacctagggtatgttttgtatttgttgatttaaatatggtatacatcttattttcagtgtgcgattctctcaccagcatttaaagtgcgtgaattttccataacagaccttgttccctattcaatcacattaaggtggaagacctcttttgaagatggaagtgggtaagttatttttaaaaccttgattagagcttgtcataaatctttacccagttaaacctacttttctaaattagagaaatttacgcttcttaaaattctgccaaatactttaaaataatgtattaaagagatataaaaatgatatatcacctataaatcataattgggcatatttttaaatttatgttttttataaaagtaaaacaaggctcattttcaaataaatcacagtatagaagtataaaaaagacctgcatttgtcatattctctcttagcccattttacagacataaacatttttaaaagctagtttatctgtccagtcattttctttgactatccataaataaataaaatcatacatttcttaggtacatatagaattatctataaatctctagtgcaacttagcttttttaattatattgtattttatttttccatgtcaacagacagtaactgttttttcaatagttatatgtgccataataaatttaaccaatacagtattaagtcatatttttgctattttaaacagtgctagtaagaacatccttgtgcacaaacccttgttcagttgtgcttggtatatctgtaagacagcagtgtaggaatggaattgtttagccaaagaatatgcacattattttgagtaatatttgcaaattattcactaaaaggatactggtttatattcctattaactttcatgagattgcctcttttagctcattttctcctgtacttttaattgaacatgccaatattttaaaaaaagcactgttattaaattaatgtttccctctgtcataagctacaatattttcatgcttgcattaacatttacatttttttccatgaactgcccaggatttaggtagcctgcttccctaccagaatcaaaatttatatttcaaatattttacttgactgcttttcagaagtatagcttgtacaatgaataatggtgtgtttacattttgaagttattttttaaattttgttctgtgttctgtacataagtacccccaagaaaatgagatttttgtatacatttcaaaaatatggattttcagccttatctgaatgtcttgcaaaagattttaatggcatgtgttaatgtcagtttttttctttttaaataatttttcacctgtctgccccagataatgtcaattttgaggcaagaatcattattctataaaatttaatttcagtttcaaggtataagtgatccagaaaaaaattgtaagaaaacgtatggggagctaaattgaaaagtaaatatagcctaatgactacaaaaagaaagtagaaggtattggtagtttcttgaaaactaggatagagtaagaagtttgtggattcaagattttaaaatcttccatacttatagtaataggatgatatatagtattaaagattggtttctgggccactataacaaatagtcataaactgtttctgttaaacaatttaaggaataggaattgctatgtaggttttaaaaactccctgtattggaggggtaaaatgctgcaaaggacattgttgtatcaactgaaaaaaagatggaaatatgaataggtaaagcatcagagaatatccctattaggatgcacactgacgtttttaggggtaaagcaccataatgtatgtataaccctcggttggttcaggaaaaatatatacagaaagtgtgtgcactcagatgatgaaacaaatggagtaaagtagcaaatctaggtaaaagatatacaagtgttccttgtcctatttttaattttgcaccttttcataggtttaaaattatttgcaaacaaaagtttctattaaaggtagccagaattaaaagggtaataggtggcaagtattttagaagttaatgggtaggacttggccctcatatgtgagggaaaaaaaccatacacattggccttaaaatatacgtattctcaggtaatttttctctttttaatagtatacagttgtctgttattatgatagacattatgaaaactttgagccataaatctgttgcaatgcatgtttagagcaaaatcagtaattgttttttctttttatttgtgcagagatttttgcagttgctgctaatgaattaagaatgaaatggattcagtaaataggttcataggcaactttctatttgtttctaagtgagttctttccctccattttagggaatgtgaagttttctgtaagaaccatcctgccccattctcaaaagtcattactttccacaagaaggaaccatttgaactagaagcattttatactaatttacatgaagtgccttatcctgatgcaagaattggtaagataaaaaaaagttctccataacattttggccttttataaataatgtgttattttagaatcaaggaaacaaatagacatttcagctaagccagtatgggacttttaaagaaagatatttatactctttctagaaatgtgcatttgtagtgctcagtttatttctataatgacagcagggtttactgcagtcggccctcagtattcatgagtttggcatctgtacattcagccaatattaggaaaaacaagtgtctgtactgaacatgcctagactttttttttcttgtcattaatacatgtaacaactactgacataccatttattttgtagtaggtatcataattaacctagagatgatatagacttaagagtatttgggaggttgtatgtaggttatacacaaaatactatgtcattttttttaataagggacttgactaccagaggattgcttgagcccaggagttgaagactagcctgggcagtatagtgagaccccatttcactcacatgcaaaatgatgtataaaaggttcttccatcctcagagagacctgggaccaatactcaatggatactgaggggacagctatatttctaattcatttttacttctatatttaaaatgctgtgcaaaaattagctgggtgtggtggcacacacttgtaatctcagctactcaggaggctgaggcaggagaattgctcgaacccaggaggcagaggctgcagtgaactgagattatgccactgcactccagcctaggcgacacagtgagactccctctatcaaaataaaatgctctgtaactgtcctgaaaggtttgtgtgataattattttttactgaaaaactttaattggtatattctaattttaaacttaatgtttactggcaacaactagaatgactattactggattaatatgaaggtgagggcgattggaaggtgaggcggtcccggagttcttgcatcccaggtgattgtgaagtgctcaccatttgccactgcacataattgaaacaaaataggaaaattgcatcaaactcttcaggacaaggttttcaaaacaagttgcaatcttggcagaactggacaaagagaaaagaagactacttatgcagaaccagtcttcaacaaatcatcctggagctagcattgcactctcgagaccctgtcttaataaggacttctgggatcacgctgagccgcagtatattgcagcccagcagaaggcagctttgcagcatgctcatgcacattcatttggatacttcataactcaagactctgcatttgggaacctgattcttcctgttttacctcgccttgacccagaatgaagaaaatatttgtgatggaaaagagactttgtaatatcaaatgccaaagctactgtcattcagtgctagatgaactgtgactttcaaaattttggtgaactttgatattttttgtttgttaaaggaatgtgtaagtgaaagcagaaagaagggtaatcaggatgatgagagctgtggaggctgtatcgtccaaggaattgattatgtaccgtaactgtaacttttttgtaatgctgtttaacagtaatcagactctgaactggatggtcacaaaaacattccccaacccctagcaagtttgactgaatatatcatgtccacagtagatttccaagaatcatttatagtacttaactttaaagaaacaagagtacttttaaaaaatgaaccaataagcttaaatctgttacatccatatttgctgtttataggattggtgtcagtgtaccttttgagtttacagtcaacatgtatcatcctaaaatattatttctgaactcataactacttccccctttctcactttaaaacaaaccccaagaataaattactaaccagtcttaaccatcttctataaacatattcttctataaacatcttctataaaccatcttctataaacatcattataaatgatgtgactaaatgcaattaaaaataatagaaaaaaaaggaaagtgagaataggagattgtaatatccattttaactgagtgaacttttcagaagatataaaatgaaattacaacatttaaaaggattttcaaattttaaatttttttctatgtactgctttatagactaagaaggggacagcacaaatattataaatatttcaaggatattatataaagcagtaaaattattgaacattatattagtttgctagggctgctataacaaagtaccacaagctaggtggcttaaacgttagaaatttgttgtctcatttctggaggttagaagtctgaagtcaaggtatctccaaatacagtcacgtctgagcatggtggctcatgcctgtaatcctagcactttggaaggctgaggcaggaggattgcttgagcccaggagttcaagaccagcctgggcaacatagtgagacctaatctgtactaaaaatcagaaaaattagctagacatggtaccatgcacctgtagtccccgctacttgaacgctgaggtgggaggattgcttgagcctgggagtttgaggctgcagtgacctatgatcctgccactgcactacagcctggataacagagtgaaactgtgtctcaaaacaaaacacacatagtcatgttctgaggtactacgcacagtgtgggagcaggtggggggcaaaatttaacccataaaaaagtcatccaagttttttactacctgattttactgcctaatgttctctcttctatagataatatatatatgagatttctttagagaaataaaacatcagtagatttcttaaagcattgataatgatctctgcaggtattttgctataggaaaaataaaaattggaattgctttatttatgaattaccaagatggttatgatttgtaaagcttatatcaaaaaaaatctattttgttttcaaattcagaaagtgaatcttgttattttggttttagaatagcagtattatgagataacttactgcctttgaatcaaattgtccatggttaaattcccagtgcttttttttttttttcctagcattgatgattttgagcaggttacttaagcttcctgagacttaataacaggtttgttatggtttataaaagataatctgggggaagtacctgccccatagtgatcaatcaggatatgatcataattattgccaagatgattatttgccaacatcttaaagatgatagccaaattattcaatgaattgaataagttaatctgaggctcacatactgattggagttcttttttccttaagggagcttcactattcagaatgtttttccacagtctgatggtgatagttccaaagtgaaggttaaagttcgtgttaacatccatggaatcttcagtgtggctagcgcatcagtaattgagaagcaaaatttggaaggcgatcacagtgatgctccaatggagacagaaacttcatttaaaaatgaaaacaaagataatatggtatgtagaaattctttctcaatgttcttgtaatagatagtgtatacagtatatcttaatcataactgggactttaatagttgaatacattactctctgaggttttgctttgattttctgctgtgggaatctgtataaagtcttttgataaaagcattaaggaataatactattttcaatgctttacatctttcacgttgtcacatactttttaagagtttggtgcatctttcatagtattacatggagcaggtgaacctggaattctttcctaagttcttaacttccattaaaacatgtattttattatggctagatttttagcttacagataaaaccacttcagaatgataaattttgaactatacattctttttagattgaaaatacatgcttaataaataatttttcagggtttatttgggggacatctgagacagttaagcagaggaatgtgctgtacattcagtaatgttaaagtacagatttttggccgggcgcagtagctcacgcctgtaatcgcagcactttgggaggccgaggcgggtggatcacgaggtcaggagatcgagaccatcctggctaacacaatgaaaccccgtctccactaaaaatacaaaaaattagccgggcgtggtggcaggtacctgtagtcccagctactcaggaggctgaggcaggagaatggcgtgaacccgggaggcggagtttgcagtgagccgagatcgcaccactgcactccagcctgggtgatagagcgagactccatctcaaaaaaaaaaaacaaaaaaaaaaacagattttttaactttattaaagagttatgtgacctgaatttactgtggggatactatagatgaaggaatcttaggagaactttatcgtatttaattacacaacgttttcatctttttatgtgtgctcctcatgaattatttgtgtgcattatttttaatggcattagattttttgtctaattacaattggaagtctgccctagattttttgtttgtttgtttttgttttgttttgttttgtttttgtagcccagaggtcctttatttttttttttttttaacacctatgccatgaattcatagggaataggttccagcagctcaggctccttcccattggttctcacaaagtgtgctgctctgggtggagcaggctggcgctttagttgaacccaggtacctttctctttggcttctttctttttctgatcattttccttcacacgtttcaggaagctatctcggctcttagagtgcttaatgtgctcaatacgcacattaattctcttggcaagaatcttgcccttaacttgtttgtttacaacaatgccaacagcatgctgggtaacattgtagactcttccagttttgccatggtaacacttgtggggcattcctttttgaacagtacccgttcccttgatgtctacaatatcacctttcttatagattcgcatatacgtggccaaaggaataactccatgttttctaaaaggcctagagaacatatatcgggtgcctctcctctttccctttgtgttcgtcattttggcgaattactggaagatggcggttccagccgaaaggcgattttcttttattctattttaagacagtttctccctttttttaaggttgctttttgtttttattaataattactatgcatctttcttccaaattgatcagaattcaaccactagactttaaactacttcatttaaggactgtggctttttctttcaatctttccatgtatcattttgtaatcgctttcttatttgaattgaggaagaggaaatgtctttatttgttagtgaaggtacagtttttcataaattaacataataattggtgaaaagttaatattttaaattataatccacaataactaagatatgtaaatttaatccattaagatttatttttactgaaattgaaagtgctttgtatgccttctaagaccaggtgtttataatcatttatctatttttttgttgttgttgtttgagacagtctcgctctgttgcccaggctggagtgcagtggcacaatctcggcccactacaacctctgcctcctgggttcaagtgattctcctgcctcagactcccaagtagctgggactacaggcatgtgccaccacgcccagctaattttttttgtatttttagtggagacggggtttcactgtgttagccgggatggtcttgatctcctgacctcctgatccatccaactcggcctcccaaagtgctgggattacaggtgtgagccactgcgcctggctcatttatctttttttaagtatttctgctgagacctttaattttctttatataatattagtgaatcctgggaactgaaaatacaacaagaatattatggtacccatcttgtacttcccctggcagttcttatttgctgcttctgtttgtctgtgagctggaaattcagttaaccaagctttaaaggatgatttctgtatgtgaactaagtgggttcacctgtgaataaagtgcatggatttatggcatctgctttggttactcagagacttacctgcttatgatagtttttggcttgctagaacatttgcaggcagttgaggttcccatacaaggaatttctagataggtgatgtgttccttaatatttcttttacaatgtatgtaatcaaaagaaaaaaggtagctaacattatggatcatatacttggcattgttggtgagcacattcatatatgtattatctttttttttaatttttttttgagccaccatgcccagcctaaatcttttaaatccctactacagctaatataataaatattgaataaattgtagtttatttccttttccttgctaataaaagcgatgatgctgaatacactgtgttgaaaatattctgtgcactttttacttttttttttgagacggagtctcgctctgtcgcccaggctggagtgcagtggcacaatctcggctcgttgcaacctccacctcccaggttcaagcagttctcctgcctcagccttctagtagctgagattacaggcatacgccaccacgcctggcagatttttgtatttttagaagagatgggatttcaccatattggtcaggctggtctcaaactcctgaccttgtgatccaccagcctctacctcccaaagtgctgggattacaggcgtgagccaccgtgcccggcctgtgcactttttaatggttctctctaggatttttctctttaattctgtatttggaagtttaaagacttaaataccattataaagtagtctccccttcccctcaaaaaagtgaaccaattcaaagactctggaagctaattgtttaaatttcaaggggtggaataataagataataagttcttctttttactctatcctagctgatggtattgctggctctgaggtagataaagaggcccagacataaaccagtgaacatcagcaggagccttttttttttctatgagggtcagtttatgaaagactattttgtatgtgttattttctaattcaaaattaaaatagcattgattttcccgaaaaatcacaatagagcttgctgacttcaatataatgatatgtgagaaaattgacacctctcttgtaggtataatttaatacaggggcatattaagaaattaccacatcaagccctgaatacttattaagaaattaccacatcaggctccgggtacttactaagaaattaccatatcaagccccgggtactttggtttgtgcctatagttacagctactcaggacgctggggctggagtttgagtccagcctggataacatagtctgcaaaaaaaaaaaaaaattatcacatcttaaactatatcacaaaacccagggatcaaagaaactatatgctattcatcttactaatgtaccacagtttatttcccaattgttgaccatttgggttctttatctttttatttacttctatttatttttttaattccacatatttgcttatgtgtagccaggactcttctatgcactagggatacagtgattaaacaagattgaaaaggttgccacccatctataacttacagtctagtgggagaggacaggcatgaagcaaaaagatagcatataaatataaaggaagttaatggggatgcatagtgggaattatgtgatagtgatgaggaaaccacttaggaaggaacaggtaagctagtctgaaagatgcaaaaggcagcttaagggtaaggagtagataggtagttgtccaggcagagtgaataacaaatagaaaggcactgagacaggaaggccttctttttcgttgttgtaacaaatagaagagtggttggtgtataggatataggtgtggagaatgggggaatagcaggaaaaaaaatgaaattgagagggtaaatcaagcgacaaatcgggtaaaaccttaaagttcatggtagtatctagatttgtttcttaagtgctttatgtttatttagcaaatagctatgagtacctaaaatgtgtgcttggtcatagcagcaaacagaaagatggtttcaactcccatggagtttaaaatctatcagtgaagtcagagtctagaggcacttccattaattatcccactattgataatatttctataaacatcttaaaatcattttaaagaattaacagtttattaccatttcatatccattttaagatgtgtaattttctgcttttaaatgtatcttagtcttgcaaatgataacatcttatatttgctgttgatcatggcaatagtcatgagatacttctcatcacctgtgcatctgtgaactcggttgtaattcctagtggcatgactagatagttggcaacctcttgacattttagtgaacaaaccatttaaggagcattcaaggaaggaatacgagtcctggttggttgaaaacaggttgtgataaagatacagtcataagtcttgtagaataggtgttagtggcttgtaagaaaacactagaggctatattagagcaacttttaaacaaatgctgggtcatttatactcctgatgacacacagagtgatattgtatagaaatatacattaacaactggattaagtgattcagaagagttggattctgaatgtgaagaaattttagaaataactacttaatctggtttattttccttttctctgtgaaagatataaatatataaacaatagaagagctctttcaataaatataaaaattctaagtgataaggcattgtgaccatttagcatttttttctgagtaatacaaaaattagagttaataactcaacactttatcacttttttcacctatcttacctatcaacagggttggggaggttgtaaggtagggcaggggagttgaaatatcaaaaataattgatttttttttaatttgagacagagtcttgctctgtcatccagtttggagtgcagtggcacgatctcagctcactgcaacctccgcctcccgggttcaagcagttctccggcctcagcctcctgagtagctaggattacaggcgtgcaccaccatgcctggctaatttttgtatttttagtagagacagggtttcaccgtgttggtcaggctggtcttgaactcctgacctagtgatctgcctgccttggcctcccgaagaataattgatcttttaactacaaaaaaaaaaaattagctcctctttggcagaaataagcttttattcaagatagctttctgggtattacagatttgcttaattctagatgtagttgaagacctaacttatgctgattcctacatttcaagctttcttcaggaggatggtgacaggattaagaaggtgaccaaaaaaatctattatatatatgggattatttgccaagtggagagttcattttggagattttattggtagaaagtttggtttttagacataaaaaaatcttaaaagtgtaccttttaataatttagaaacacccactttgagttttgattaatttgattaattttgattaatttatatcaaaactcaaagtgcatatttctaattattttacattttacaatttaaagatatagtattgtatttgtgtaattcatagattttgtatctttttcattttattttcttgtgttatttataaacatctttcatatcaagttgaatgttctctattttatttatttttattatactttaagttctgggatatatgtgcagaacatgcaagtttgttacataggtatacatgtgccatggtggtttgctgcacccatcaacccgtcatctacattaggtatttctcgtaatgctatccctcccctagccccccacccttgaatgttctctttttttgtaagcttttgtgaatcttgatttgtaaatttggcttgagaacaattttccacgtattttgcaattacttagccatagataaacaagatttatcccatagcatcaaatagatcttttcactttacttccctgttaatctgtttatttgtagcaattctcatttgaaaaatgagcttctacttaactgtttctacattttacatttcaaaacaggcttgaactcttaagatgcagtttacatttttaaaacaaaaaaaagacactgcgtatattatcaattatgtattttctttctaggataaaatgcaggttgatcaagaagaagggcatcaaaaatgtcatgctgaacacactccagaagaggaaattgatcatacaggagccaaaacaaaggtttggtttactttttctgtagttatgtctttttgaaattgatattttgaattattgtatttaatgctttcttttaacgcacttgatatttttgatcttagaattgtgagagaatatagaaagctgatagccagaataaatatactttaatgatttattaagagttgtgttttttaaaaaggaaccctaacaacatgagcaaaattaccttttttggtaggaaaaaagatacatttttcattaactttttttttcatctcatgagaacacacggacacatagaggggaacaacaaacattgacgcttactggaaggtggagggtggaggagggagggagatgatccctccccttaatgggtactaggcttaatacctgggtgatgaaataatctgtacaacagacccctgtgacatgagtgtacctatataacctgcacatgtgcccttgaacttaaaagtttaaaaaaaaaaaaaggaaattttatcaaagaacccaacaataaaattgcctgaattctttaccttatttccttaattcattatttctcatgtttcaccaataactgcattgtatttctaaagtatgaatacataagttaaaatcttaactttaagtgaaaaaaatcatttcagaaaaatatgagatggaacaagctatatgaggaaaacatgttagctgtactctatatctcagaattaaccactctaattattttgttgcatatcataaaatatttttctatgtgtaaaaattaatactttcaaaaataaaatgttaaaggataaatgatttattgagagtaattatttttctaagatagtgattgccaataagacagaagggagaggccctgccccagtcacccagatgaatgtggttataactcttaaagctatcatcttcaacagatttttctaacctgcatagattaaattctatgcaggttagccaaatagattcatttctcagagattgtaaagatttagttttaaattgtagattctaaagttatttaaaacctggaaactttttttctgactttttcaaaattttaattgttgaacagctttattgagatatagtttacatgtcattcaaatcatccaattagttgtacagtttttagtatattcagttgtgcaaccatcatcacaattttagaatattttcatcatcccaaagagaagccttgttatctattagcggtgacttcccatttcccttcagccctctccctgccagccacagggaacaggcaatagatttgcctattgtgaacatttcatatacgtacagttatacagtatgtacttatttgtgactggctttcaccaaacataatgttttcaaggttcatccaggttgtagaatatatcagtattcctttttatggccgaataatacggcattgtatgaatacataccacattttatttatccatctatcagttgatagacatttgggttattttcacttttttactcttatgattgttatgaacaatcatgtataagttttgcgggggtgtgtattttcatttttcttgggcatatacctaggaatggaattgctgggtcataattgtttaacatttttgttaacattgttttgttaagattgtcatcttgaacattttgaggaacttcccaactgttttccagaatggctgcaacattttacaatcctgcaaacaatgtatgaggggttgcagtttccccacatcctcaactaacacttattattttatattttttaattgtagccactgtaatgggtgagaagtagctactcgtcttacttttgcttttcatttccaacccaatatttttaatatagaaactaggatttaacatacacagactacaaaataacatcagtcttaaggtagtactttaaaataaatataacagatcataatcgttttgattttactttctgttttacctcttaaatctatttttaagctaattttagaaatttatacttctctttcggatttgcagtcagctgtctcagacaaacaagaccgattaaatcagacacttaaaaaaggaaaagtcaaaagtattgatctaccgatccagagtagcctatgtagacaactaggccaagatcttctcaacagctacattgaaaatgaggtatgtaaatctgagttgatgctgaaataggtggtagtttattctgaaattttgtagaagtcaatgattatctccaaaatttagggcactagtttataactcctaaggaattatattaagtagattactaaactattttttacaaaatactgagctgttttaatgccatatgtactgtgtagctatcatcttagttgtgtgaaaaacatgtattgcctcctctatagagaaagacttttctgaaattgattcttccttttattctgtctttaacaatgacacccagcagaccacatatggggaaatattagctgctcccctcttctcctgtgttgtccttaaagattatatctctgttcaaaatgttttctgacatccattaaatatttttttaaaaaatctttgtcattcttgacattttcttacatgttcttttctatttacatgtttaagttacagtctctagaggaaacgagttttgtttctttaccagtatctgtttaagaagtaatttatattttataagtttacatttaagtggtagttcctaatttttacaagctcagctggcattaaaaggtcagtcttctgactttacaatgcttgcttttgtagtacctacctatatcatctattcattaataattgttaaaggctgcattttatgtgaagcaagcattcctggagatcctgaataatttggaatttgtgtgtcttgagaaaaattttcccaaaggaatgaattgtagggaagcacagttttgggaaattttgtatataaaatgagattttcttaacttttgaatgtctcattattttcacttcacaaatgtgaatgcattgtaatttataaagggattcttaacgtttacatgtgtttttattaaagtgaaaattttgctcaagtattataatcttcaggttatttctttgcttttgttcatcataaactaacatctataaatactttttatttttaccctcaaacctatgaagtgtaggttctgttagagaactacatttcacaggtgaggaaactgagacacaagtagactaaattacccaggatcagagaataccctttggatttggatccaggtgattgttctccaaagctcagtatcacaaccactataccatatccacccccgcaaggcttttattcattaccagttatgtgtcaaacatggaactaaatattttacatgaattatctcaaccttattagcagccctatgagttagatggaattatgctctctgtttaggataagaaaacttatgtttagatgattttcctgctatctcaagatagtaaatagggaacctaggattttaatctgagtatgtagaatgacataggctatgttttcttttgttttttaacagctttattgagataaatttacatatcataattaacccatttaaagtatccagtggttttcggtatactacgttaatttttttacatgaaatttgctattataaccatttttaagtgtataattcaatggctttaattacattcaccatactgtgcatccatcaccactgtctattttcaaaacaattccatcaccccaaacgttaactctataataacttattttcctcccttctcccagttccctactttctgtctttgcgaactgcctagttatcaatagataagaatcatgttaagtgggattatacaatgcttgtccttttgtgtctggcttattttacttggcataatgacttcaagattccttgtttcagcacgtatcataacttcatttcttcttaaaatgaagtaaaatactacattgtgtttatatactttttttatttgttcatcttttagtgcacatttgggttgtttctactttttggctattgtgaataatgctgcagtgaacactgacatacaaatatctgttcaagtctctgctttcaattttttgtgggtgtatctaggagtgaaattgaaattctgtgcttagcattttgagggacagccaaaacgttttccatggtggctgcagcattttacattcctctcagcaatgtacaagggtttcactttctccacatcctcatgaatacttattttttgtattgtaatcatcctagtgagtgtgaagtggtatcttgtggttttgatttctatttccctaatgcatattcttatggcaactaatctgaagctttttgaataggggaagatgatcatgcaagataagttagagaaagaaagaaatgatgctaagaatgccgttgaagaatatgtatatgattttagagacaggctgggcactgtctatgaaaaattcatcactccagaagtaagtctaaattctgttaattttttgtgaggactatttaaaggtttactcgagaatgctagtacaaattacataaataaatgtaccaaatgttgttattgttgccaatcttgggcccatatggggaaggttcttatttttacaagttgcagaagtatggtgaaaaacatatttttgaataagaagttagaaaattttgaaatttaatattttatacttgaaaaacattctgtccttccatgatttttaattttttttttatttatttatttgagacagcatctagctctgtcgcccaggctggagtgcagtggcacgatttcagctcactgcaacttctacttcccgggctcaagcagtcctctcacctcaccctcataagtagatgggaatacaggcacatgccatcatgcctggctaattttttaatttgttgtagaaatatgattttgccatattgcccaggctggtctcttagttctgggctcaagcgatcctcccaccttggcctttcaaagtgttgggattacaggcatgaggcactgcactgcactgagcccaatgatgacttttatttctaaggaaagtatttttaattagtgtctctcaaatatattactaggacttgagtaaactgtctgcagtattggaagacacagaaaattggctttatgaagacggagaggaccaacctaaacaagtttatgtggataagcttcaagaactaaaggtacatttttttaaagtccatgttagtataaaccagtaactttttctaaaaattagggtgtaagagcacagtttatgttctattaatttttaattttttaattgagaggaaaattgtatatatttgtggtgtacgacatgttttgattatgcacacattgtggaatggctaagtcaaactatttaacaaatgcattacctcacatacatttctttctttgggggggagaacacttaaaatctactctctcaaccaattttcaaatatacagtatattgttaagtatatatggtaactgtggttaccatgatgtacaatagatctcttggacttactcctcttgtctaattcaaatgttgtgtcctttgaccagtagctctccatcataccatcccctgataaccaccaattctactatctgattctaagagcttaccttttttagattcaacctttgagatcatgcagtatttgtctttttgtgcctggcttatttcacttagcataatgtcctccaggttcatctaagttgtctcaaatgacaggatttacttctttttaaggctgaatagtattccgttgtatatgcataccacgttttctttatccatcatttcactgatggacacttagattgagtctctattttggctattgtgaataatgctgcagtgaacatggagtttagatatctctttggcatagtgattttattttctttggatagatacacagtagtgagattgctggatctgtatgtttttagtaagtatgtgaaaaattactaaatcagaaatgtataagaggaaatgttctaattttaaaagcattttgagaagccagcaatgctatataattgaaatcagatattgtatagtcataatgttgaaatataaatgtttatagatgatcagagtgttacttttgcacaagctatatattactggcatgtctttaagaagtgataagtatatcatcttgaccattaaaggagtcaccctcttctcctgctcctctgactgttaactgtctgatgttagggagtaataccacactggtctgttgtattttcagtgtcactgctcttgaattttaacgtcctttcacaaatcaagagacttggccacaaaatctccttttttaggtcagtggtgttattttagggaaagaccttccatacttgctaccaaatctggaaaaagtaccttaaaagattaaaagtttatattgggctgggcgcagtggctcacgcctctaatcccggcactttgggaggccgaggcgggcggatcacaaagtcaggagattgagaccatcctggctaacatggtgaaaccctgtctctactaaaaaaaaatacaaaaaattagctgagcgtggtggcgggcacctgtagtcccagctactctggaggctgaggcaggagaatggcgtgaacccaggaggtggaacttgcagtgagctgagattgcgccactgcactccagcctgggcgacagaatgagactccatctcaaaaaaaaaaaaacacgtttatattggaaggatgaaggaaattttcagtcattccttcttagtatggatcatagcagttctttaatgtgcatatgaattacctgggtgcttattgaaatggaaattttgattcagtagatacaaggtgggcccacttttaacaaacttccaagtgatgctgatgatgctggtccctgaactattctttgagtagcaagggattatatagatgctaaatgatgacattaacaaggatttttagaatatggggaaagatggccctttacaacttgggacaggcatgaggtgggggaaggtgtgcaaaagaagttactcaacttaaaagtaaaagaagttaatactgtgcaaaaaattaccttcatgccaacaaatacttccaaaggaaataattagaaaacctaagtttatgatagcaaaactaggctttaccatgtcttcttggtagtttttaatccctgtctccctaaaagaaacacaagccagccaggtgcagtagctcatacctgtaatcccagtggcccaaagtggcagaggcaggtgtatcacctgaggtcaggagttccagaccagcctggctaacatggtgaaatcccatttctactaaaattacaaaaaattagccgggcatggtggcacgcacctgtaatcccagctactcaggagactgaggcaggagaatcgcttgaacccaggaggtggaggttgcagtgagttgagattgcgtcattgcactccagcttgggcaacaagagcaaaactccatctcaaaaaaaaaaaaaaaaaagaaaaaagaaacataagccaagcagctgaggccagtagaaataactggaaatcccagcagttcctattatggattcttctgcttcaaatatgtaagtagccatagaaatgaatgttagagaagttttcacaagttttactttttctgtttttgagatggcatttaaaaatttaaaatggtggctaggagcagtgaatcacacctgtaatgttggcactttgagtggccaaggcaggagaatcacttgaagccaggagttcaagaccagccttgagcaacaaagcaagaccccatctctacaaaaaaataaattagccaggcacagtggtatgtgcctgtagttccaggttgggaggctgaggcagaaggatcacttgagcccaggaatttgaggctgcagtaagctgtcgccattgcactccagcctaggtgacagagcaagaccctgtcccaatggaaaaaaaaaatgcagtacttgcttccctttcaaaaacatttaaactataaaaagtatgacgtgaatagaccaaatgtagtaatggtatcctggaacagatgataatgaactctgaataaagactgtagtccagttaatagtaatgctccagtggtagtttcttagttttgacaaatgtaccctaagatgctaacattagagaaaagcatagagaagcgtctggtgcttgctctctgtataatttccttttaacttttctgtaaatctaaaactgttctaaaataagccgatttttatttaagtatataaagaatttaaaagaaaatattttatccttctaatgtgctccccttcccaaaactacagagtctgttttaacatttagaaactccttaatccaagacatgtaggggaaaaacctacatatactacagtacacattttactgattaaatgtataaataatatttagttgataataattatcagtcccagtaattatgttgtacatagagggttatattatgattttgagtatttgataccaagtttcaaatctacaaattctgcatgcagtatagtttttacagttttcttattttaatagttctataaagttttaacacccagcttttaaggaattaaagttttgattgagacattggatttgagaagctaagaagtaatcttaatgagtgagaaaaagataaggtgtgtggaaggcatccttgtgtaggattgaggaagtagctactgtaacttgcttccatacaggaaaataagaggggatatatttttatctgtccatcttttcttcctatttatcatcctataagggccctataaaagttttctgttaaaactcaaaaatttttcttctttaaaaatttcttatgttaacagaaatacggccagcctattcaaatgaagtacatggagcatgaagagagaccaaaagccttaaatgacttgggaaaaaagatccaacttgtcatgaaagtgatagaagcttatagaaacaaggtattgaattcataaagccaattggtgacgatggcatgtgcatggtacatagaatggggcaaatctaaaagttctcagctacaaagctatagcagttgtatctatcaaattccagagactttgtgtaccaaacttaaaacttttttttttattggagaatttcacttaaggattctgatacatttgaaatacagtaaaggtatgtagctttcatcttttagaatttcctgaaactacattataaaataacccagtgaccaaatccattgttttcttcctagagatttcatttttatgtttttcatatagtgaaaaagaggacctctttgactttttttaaattatgggcctctttgagactggactctgctagcctttattttgtttcttggcttatttttcttttagttgctttttgtcctccagtccattagtcatccataatctcctgtacgctttattcttttatgtacatattcaaatctatataaccttaatctttccactgtcaaatatgtagttatacagatgatacttccatttagatataaccgtaaaatttgagaaaattaagcttattgttttgtttcctctaaatcagtagttatcagactttttttaagacaaacaatattttaggctttgtagtttttactgtgtctgtacagctattcttatctgccactgtagcacaaaagtaccatagacaatacacaaactaatggacatggctgtgttcccaaaaactttatttaaaaaatcataagcagtggctggatttagccgatgggacaagttttttaatccctactctaagtaaatattctctgtaatccctagtttttgtcattgatgttaaacatgcattagtaggaagaagagaccagcaccagaaatattcaagcatgtcaaaatagcttacatttattgtgcacatcatgaattttaagtactttatgtggattatctcaccaggatatatcctatacaaagttaatgctattatctttattttacaattaagaaaacggaaatacttaagcaacttattgaggtttacccaagtagttaatgatggaatcaacattcaaacctaaccagtctgacatcaatatacaaattcccagcaactatactgctttccactacacaaaattgagaagaattacttattttagaaataagagattttttagttttgtgaaacaaaaactgcagttcagaaaacctaaaggaaaaattcagatattgattgtaaatatgcctgctaatatcagtgttcaaattgttcttataggcacagatagaatgttgtaaggataatgaaaaagtaagaaggaagaaacaacccaatgaaaacaccaagaatattttaaatctggtataattactagtgtcacagtgctccccaggctttagctatcttcttcaatatgcacatttaagatattatcccacacaaggcaagacttcacttttgctcaaacatttgagtttttattatgtgctaggctattttctagatgactgaactatattgtcaaacaaaacattgaacttgtttttaatatgcttcaatagtgaaaggtggacaataaattactgtaagttatgtcagatagtaataaaaagctgcagaaaaagtaaaggactgccagggttggaagaggtttgtcagaaaggtgtactaataaggtgatacacatgttaggagagaaatgaagaagtgaaaactcaaagatgtgtgataactggaagagaaatgctctagacaaagaatagcagttgcaaaacaccaaggggagaacatgttagaggaacagcaaggtcactgtggttgaaaataggggtaagtgtagcagttgagagatcataaatgggtctagttggcccttgtaaaagtttgggttttactctgagataggaagctgttggaggtttttgagcacaggagtaataacatttggcttttttttttaaggatctggaggcagagagatggaataagacattattagaataatacagcaagaaatgatggaggcttgaacccagatggtagggttggggagccaagaattggttagatttttgcatttattttgaaggtagacgcttttaagatttcctgatagatttgatgtaaatctatcacaaagaagctgaaaattactccaaggattttgacccgaaagaatgaagtttccatttgctgagatgaggaaaactgggaagagtaggtggggacataatcaggtgtttgaaacataagcatttcaaactttacaaatagaaactcaaagttggatatagagttgagagttaagggaagaggttcaggctagagatttttttttttttaaagcatatgggtagagagatgaatgaggatgaactggcaaaagaaacttaaaaagtgatccatgacataggaagaaattcaagaaaatgtggcgacctagaaactgagtcagatgattgatgcataatttgtaataaaagcagaaggaggatttgggtatccgaggaagctttatgggttttccatttgtttgtttggggttttttttcttcatatatatagctttatggttttaaaaatggcatcaccatcctcccacttctttgactttggagtgttcttacattctctttccctttatcttctgtgtccaaactaatccatcaggagattctctttctatatgttcattgccatttctttgtgattctgtcactactaatctaaaccatgactacttggttgtgtattacatgtgacagctgcagtttctcttcttcagaaagaattttgtcatttttctaatcaagaatttaatatgcttttctgttatatattcataattttgtgtctagtttgctatatgccttgttcaccttatttctcctttacaaattccatttccttgcaacttcttccttggctaagtgctttctccatgagtattccttagtagtcattctttcccaaacctgatttcttcagagagcctttcctttttaaactcacactgatcttatcttttatcccattctcttcagttctgtgttattcgtatggggtttcttcagatgagtacatttgagatatacagtcaataagagtctaaatttttaaagtagaaattactaataaactggtgctagctgaaaaatcattaacatgcagtcaagctttttttttttaaataggatgaaagatatgatcatctggatcctactgaaatggaaaaggttgaaaaatgtatcagtgatgccatgagttggctgaatagtaagatgaatgcacagaacaaactaagtctcactcaagatcctgtggtaaaagtttcagaaatagtagcaaagtcaaaggtaagaagtttatgaaattgcctttttaatggtttcaagtattaaaatttttaatgagagtcatactttggcaaataatcaacttgcagaagaacttagaacagaaatttaagactaattttttatttagttaaaaaattttaagattttaggtatggggtatcccttgatttaatttttcatataccaggctggtttttaaacttcaagagtaatacagaatgaaataaaagcaatgtgacaactttctgattaagtatttcagacttataggttggatgaaacctctaagtcttcattacaaaatttttcagtataagtctgtctttgacctagtttgaagcgtataaacttccatggtaaaatcttattccgagataaacttttcaatttaaaaaacactgctaatgaaaatgttggccaggcgtggtggctcacgtctgtaatcccagcactttgggggggttgagacaggcggactgcttgaacccaggagttcgagaccagcataaacaacatggtgaaaccccatctctacaaaaaatacaaaaattagctgggcgtggtagtgcatatctgtagtcccagctactcaggaggctgaggcaggaggctcccttgagcccaggaatttgaggcagtagtgagctacagtcatgccactgcacgccagctgggtgacagagcaagaccttgtctattaaaaaaaaaaaaaaaaaaaaaaggaagcaatctaaatatctgtcaataggaaactagatcaataagttgatgcatccatacaacactatgcagccattaaatatagcattttacatatagagatatctgtttaaagatgtatacagtgtattggtaagttaaattacagaacctaaatgtattcatttgtacaaatacgtgtgctcatagatttgtttatatgtatgtgtatgcctgaacatacatctagaaggatatccaccaaaaggttaatattattaatttgtaggagatggaatttcaggggatttttaaaataacattcagtatgttttgggatatgtgattttttttctttttttttaacaaaagctggtattttttataatgaagtaagtaataacaatatttttattctaacaaagttttgccaataagctataatatatattttactcctaatgagatgagatgagatgtggagtgtgacaagagcagtttgcaactaaaacattccccttaagatgttaatccctatatttccgtggctaccccgatctttgtgacattgatcttcaaaggtttttaaatttgagtagtgtttgtatagtggtcttctatttgtttgtaaaaagcaaggaaattgaagagcattgtttcatttaaattattaagttccaatttactttcacggcactttttccttcaggagaggctactcagctattttcaaacaaaaaaaaatgtcgtttgtgtatgtatttgtatgattccatttattagaattgttttcatataaatgttgaaaattttcagtttatgaaataggtgttatttgatgtaattctcatagcaaagcattacacgtaatttaaaggaagaattaaaaattattcctgccaaagtaaactgtatttgattataaagaaacaagttttagaaaggttaagtacaaaaaataattgtttaagattcaataatttttgactgccacagacatatactaacaaacaaggtaaatctctcatgaggcatttgaagaaaacagttggctatctagctgagcaaattcagaaagggggaattatgtgaaaatttagaaagttaatgtggaatttagaaagttaatggtaacttgttctgtaatcgttttaatataatcaatttcttcatgtctttaggaactggataatttctgtaaccccatcatttacaagcccaaaccaaaagcagaagttcctgaagacaaaccaaaagctaatagtgaacacaatggcccaatggatggacagagtggaactgaaactaaatcagattcaacaaaagacagctcacagcatactaaatcctctggagagatggaagtggactaagtcttaattttaccttcacattaattcaaaccgtgcaagtaaccacggggtccatcttttacatctggtacacacaacagacgctcagttgttcttaaccacttttgtcatttgttttttggagtagttttgaaaagtgttttatattgagtgcacttctgttcatttccattgctgcttatatgcagtgttagccgaattagatttacaagacaatctaagctttccggataattttatatatcaaacatacaggatggatacatagttggcaacagtctaccttatttaaagcttctactgggataaacctcaattcctttattcaggaaaggatactttattgcattattgttgcagaagcatagatttaattgcatctttattttgaaaaacaaatgaaaattgatggggtttaaagctacagaggcactgacctttttctagttattgtattgctacaatttaaatattaaaacaaataagagctttctcaacaaattagtccatctcattgatgtaccacagaaatccaaagctttgctgtcatcacataaatgaattaaatcacatgtgaaagggaacacacccaattttatgttaaggtgaaaccagcagtttgcttcttttattagtaatgtggattgatgttttctcagagtaactcgttgtcttttcgcttgaaatttttgatcttgtcctgaagactagctgctgctaaaacaatgctagcctaaagatacaggagtctctgacaaaatgactttcatgttaaggggaaatgctgtttatctactcagacatgcatctgtgatgttcatagccttgtttcagttataatagttgtcttgtttttttcttaattgattttgttaataataccttaacacagggtaggaagaagtggcacagtgtattgcattatatacatttatcattgatttacctaatgttaccttgtagattaaacactattaagtggtaatacttgaaaaggagcacttataccataagtcttaggaaataatgtttgtaataaacttaactatgttacatatcaacaggcaaaaatatagaatgttacatagtgttgtgtgattaaattatagttcctgctgttaacattaccttttgaaaccttggctccagttttggtgcttcttatacaaattaaatgcgaaaagggactgtaaactt

SEQ ID NO: 648 - DNA, 149823 bp, Homo sapiens
gaaactggatacatggtttacagcaggtcactaatgttggaaaaagtacagagtccagggaaagacttgcttgtaactttatgaattctggatttttttttttcctttgctttttcttaactttcactaagggttactgtagtctgatgtgtccttcccaaggccacgaaatttgacaagctgcacttttcttttgctcaatgatttctgctttaagccaaagaactgcctataatttcactaagaatgtcttctaattcagatactggggatttacaagagtctttaaagcacggacttacacctattggtaagtaggagtttctctattgatcatctatttattctgctactacatacatataatttaatcttgttgatggattttgcattttaagtcatggcttttcctattatgtttattaaaagcacacaataagcctatgtatatatatcacacatttatctttcttgcagttcaaaaaaagcaaatggatatttcaacatatgaatattattcattatatctagtgtttactggtgtcattctaataccctaatcagccagaaaatataatttatactttatcaatttcaactttaatattttctgataatttttaatcagaaataataagctaaaatttgaacaatttgaaacaagttaatcatattgagtgatcattgatcaaactttaacagatagctgtcaagtatttgttacttttcaacccacacaaaagtatggtgtcttattctctgcttataccgtaaaaaattttcattttattttcctggggaatgaaagtcatgcccccacctccaaaaaaaaaaaaaaaaaaccaaaaaaactagaccatcattagtaaaggatttgaagagctactgtttctcgcaacaattagtatattttgtttttacaaacagaaataagtaaataaagctactattcatttaaaaaatagagttacaaacttatgaattttatagcaagactacattcaattaattctaaaagtaaaggactgaagggaagtgattcccagtgatctgtaattatttgtctgttggaagtcaggcccttctgcctttccccagtttttgaaggacctgtgccttttctggcagcatttgcctaggctttcagactggaatttccctccgaatttgcaggggcctgtcatgagctctctgagtctcagctccattataacaagaaagaaaatcaaggcttgagtttttcctcttttttccttcctagtcagctgactccacagaatgcagtggagtcacagattgctttttttatgggccaactacaccctaaagtatatcacttgaggaaatgtttaccaaaaatgttctatacttacgaaaaagaaaacatggggaaggtaagcagggtgtaacacacaatcaattgttctgcagataacacagaaaatacaggcacaagaaagatgagagagcagcacacaaccatttcgcatctttttcgtcgggcagaaccgccgcggtgcgcaggcaaggagtccttcccggcagctccgcgcagctccggttccgcgtccggggccgcagctagagcgcgctcgggccggagacgcggactgcgcgcgcacgggggacgcgcgctcgggggctcgcgcccgcgcgggcggtcttgggctcctgctgcgcgcagccccagctggccgctgccaaaatagagttgagctgggtcgggagaccacgcacgccgatccctcacagtctcccccacaccccatgggtgaattaaagagggtaaggtaggggaaagagacgctgttgcacttttctctgcaaccctggaagaactgtgtttccagctaccgcacgcgcaactcacatcgcaagggaccgaggcggtacactctgagcgtaaacagagaacacctgcagctctggaatcggtcccaccgcagagggctgggaaccggaggactgtcggtccagcccataaggggctgctggggactaaacctcaagaaaagtaccgaagaaggctctcccctggcctcagcgagactaccccaacatcctaaacctgtgcaggcacttccgggcgccggattccgggataacaaaattccagtcaatttgccggtaaaagagacctctttcaggatcttgttcgcagccacccgccccttcccaacccaagcacatcccctccgcctcctggtattgcagccccgcaggtggttgtgaggtgtccgcacctgcaacatcttagtgaccctgaggcggctgtggcaccgggagacaatctgtttacctcgtagcctccacgagggtgctaacggtcgttcccagggtgaatggctggacggagccatccaaagggctgagggagaggaacagagggcggtgaggagccttcggactgaactattggattgaagggcctgacccgattcctgagggagagatgccccttgaatgggtctttctgattgcccagggtagccccactgggaagaacccacgggtgcagctgtagagagtgtctgagggtctcgagggtagctttcagatggcaaattgcaagttgggctgtgttgagtggttcacaaaaccgagcccggtgtatgtagacatcagtcagggtttacaattctatatttaattcagttgtgttgtactaggaaatgagcctccttttgtttaaaaagctgtctccatggtttttaactaggggctacatcttgtatgcacactgatggttacatgaaagttttgtatagatgtctgtgcttgtatagaaaagcagaattaagataaagttgttccttctgcctacctgcaagataatcattcattgtagtgtaaaagcagcacactcaggttataactagattgttcccttaaagttaactaactctgggacactggccagactcttggtttctggtcttggtttacttctttctcccaagtgggatgattctattgaataatatgcagtactaactttagaagctttttatacttacctatatcaagaaaagagccatatctgtgtggtaggaaatgttatacataaaacaaatatttattgaccactcccacagtgcccaatattatgctttgattcatattaaatttccataattcttcaaattaactgcatttgcagaatattttatgcactcagtataatattgcatattatccacagaaggttatgtctgcatacttaggggtacatgatacacagtgcaaacactgtattgagtctgtaatgtgagtcttgctatctggtcccctgaacactctgagtctgattttatttcagtgataacctccagcaagctctgtgctcataaggatctctgaaagtagacgtttcatcagcggaaagtgtgatagccattatgtcaccctaacctccagcgagctttatttagaatgccagccacacaagcccatgttctgattctcatagttggggcttaggctgccagtttcttctatgaagctaaactctagagcctcccttctttccatgcccgagtccatctccaaaacagtgcttctcagattcctcttttctggcctggatccacaggtagtgaccagagttaacagagttcttgggccaggcacagtgtctcaaactggtaatcccaatactttgggagactgaggatggaggatcacttgggcccaggagatccagaccagcctaggcaacatagtgagacccagtctctacaaaaaataaaaaaataaataattagctgggtgtgggtgtggtggcatgtgcctgtagtcctagtgactagggcttgggggttgaggtaggaagatcacttgagccagggaggttgaggatgctgtgattgtgccattgaactccagcctgggcaacaaagtgagaccctatctcaaaaaaacaaaacaaaacaaaacaaaacaaaaaaaggatttctttttctttaacaccttttttttttttttttttttttttgaggcagagtttcactcttgttgcccaagctggagtgcaatggcatgatcttggctcactgcagcctcagccttctgggttcaagagattctcctgcttcagcctcccaggcagctgggattacaggtgcacgccaccacgcctggctaattttttgtatttttagtagaaatggggtttcaccatgttagccaggctggtcccgaaatcctgacctcaggtgatccacccacctcagcctcccaaagtgctgggattacaaatgtgagccaccacacctggcatctttaacacctcttctaacaaaccaagagagatttatagaggaagggagaacagaggcttgttaatgcttctctcctttacttgacccctctaccagacacaatgtctaggattatcttggattcagccttgagcataagttgagctagagaagggcacattgtcagacttccacctacaggcccaacccaatccccacccccagggatgcactaggcaggcaagacaacttcactccgcagctctagagtctaccttaggatagaactagttctttgagttgcacttcctcacgcttcaccttattggaacagacttcttggaaaaatccagttggcttcaaggaacttcaggagggcattgtgctctggggaggccctggggaagtgttgaaatgtgaccaatatgatcttgagagatcaagcttgagaaaaccatgtgaactggaactgaccaggcaagctgataaaggttgtctcttctttagtcttttgggaagctgttatgtatgtttttgtgtggttgataagtaagaaaagatatttggagtgtaacttttaaacaccaaataacctgaatgcagatgaccatgagcacttatatgagcagttttatctggtgataatgtaattgtccccaaggactttgtcaagccctgcaagacaatcaagttagcaagcacatcccactggaaggtgatcctagaatggttagtgattccctttttactttccttacagaatgatgagtttgagtgaagctaaggggaaagacaaaggggaactgatatatatatatatatccagcgtaatatatttctttcctggcactgtctcatttaactataaagtttactttgttaacccaattttactgattaaaaaatggaatcagaggtcaagcaatttactcagcttgtcaagagaatgaactgtaaatagaacccaagaaatattctgaaatacatactctttctccaaagtggtaaccacttgttcttgttgatataaaggaattatgatttaatacaatgttggtctatgcagactttcctccaatggacatttcgagcttaagaaacatatttgtaagtggctttttaatcttcatttccattccacggtagaaaccatatttggatccttctagaattcagaagggtggcacagggagtggtgtatggaaagcagagtggaaatcacatctgggaggactgaggtctgagtggggtgggacaaaggcacttctggtcccctactctggagtttcctggaaaggatctctggagtttggatgaagtttagcttgtgaatttgtggtgtatggtaacaactcgcagggttaccaacagatggtgagaaggaactgagaggaaattcagagcatgtacttgttatagagtcagtgagtatgaggagggcagggaaatcactcaaactgagtgactgaattagatagcataaacaaacatactgttgtaccatgagaggaggggatagggaaagacaatttaggtgtcaattaaaaaaaaaagcacttttgacaaacccagctgtgcctcttgcagtgagatatgctagtcccacacccatgctagcatttttcacggtaagtgctggattccttgctcagggtttggatgcctgcagcctctgcttcccggccttctgcaagctccacctgctccagcggcctctacaggaatggaaagaaaattggtcggaatccactgctgggtcctggaatcaacttcccagtttccagacaagaaactctggagaaaacaagtgaatctctctcaagccttggcacacactgtacaccatctcgtaatcgcgaaagttatcaccatgttggaaaagcccacgcccttctaattgtgcaacctctgtaactgcccagaccataacactttccctagttccacgccccatgcttgagtgtgacggtaccactgttaagtcttgcctttccaagctcccactttctttgctgaccaagtgagacccaaattgctggactccgcacctctgcggtcccggcactctttgaccttaagaatcagaagctcaggcaggggcttttctgaaggaagaagtttggttggatccatcccctcgctgcaaaagccgaggaattctgaagcaatgcaggatgtttccccttccatcaagaagtttccagtatcgccggatacatttaaatggcagcctagaataatctcgtgctaaggattttgttcctgacccaggttgaagcggaggagagggtgtaaaggatgcaactgcaagtgttcagctagtttcacaaggtgctttgtggcctactagcgccgggatcgtcgttctgttggccccgaggctggacagaattgattccaatggatggagtcccaatagttttgaactggaactggctcaaatttccatttcaattacagagaggaagagatagattagaccacctacccgagattatttcccctgccccactcctttcttaagaccggatctccctgttacattcttctaagggcaccgactataccctggcggggcactccaggacccctgggttgggacaacgtgctgtaaagaaaataagtgaaaaggttcttcagtgaactctttttatacaaagagccgtagattccgatatccaggccaaactctccaaaaagccctcctttcctctggggcaagggtgggaggttgcccgggggggtgggtggggggtaggttggattacccagataattgcttcggctttcgttttcctccgcgataaaaaccgcgccacgccagatcgagatactctcatagtgattgtgaatcaatcgccatcctgctctaggggctgatgttgatgtcttaagtagttattcacacgtgcagcagaaaggctttttttttttttttttttttttttttttttaaacaaggcacgactgctcacctattcaggtttgcttttttaaagcttcgatcaacacgacgctccctggtaattcctatggctgtactgaaatttaacccgtctgtttctaatacaaagcgctcgggatgagggcgggtggagcctacgggcgtgggcgggtagcccagccctctgagccagggaatgaaactggagttctggctaaacttttcagagaaaggcaaaagcagcttctgatgggtttttcggctgggaggggcggaaaaattaggcagacccggagctcccgtaggctgaaaaacttgctcctcttccccctcgggctatcctggcctagtaatggagatctgaaaaaaatctagacttctttcggggtctaaaaggtagatatgtgggacgaaaaaagtaattgtcctggtttcttaaaaagcaccaaaaagtgggaatggaagagaagacgggagaaattgtttcgaaggaggaaggtattgcaagttttgtgcaagtttgggtgggtcatctacccaggcgcgcggggaaagatgtgtctgccacaccttttgcgagcccaggaaacttgaaccgctcctgaaaatcctgatattttttcccgctgcagcccgcacgggtcaagcgcgcgggggctgaccaacactttccaggtcaggtcgagttgattgctcccagctcacgctccgaaatgcggtgctgaaccacgggaaggagggggtggggaggaaggcaggcagttgcatcctcgcgagtggggagtgcgaggcctcctcagctccagccagctgggtgaatggggcgcgcacggccccgtaacgccgagcgtggataaaatatgctaggactgcgcttctccggctcatcaaggctgcgggagcctccccgagccatcatccttcgtaattgcaaccgtcaatcaacactttaagacaaagtcagaaccgggaagggcgagccctggagacctgtctcgtcggaaagaaggaggtggaggggaggtgggggaaaaggagagaagtttgccagaagttggcagagggagtgcaaagaaattgagaacgcgcaaggtagttgagcagagctgtcccccggtctcaccacagactcccaggcctcccgggttctagtctctggtctccgccaccagttacaattcccgcagcggtaagtacggggtgggttcctaagtgtgcttacactaagaggtacagtggcagttgctaagatgtccccggcggaggatgagatgcgtctgtccacccgcggtaggtgtatttatgggtcagtgcagaccaccgctggcgccggcgtttagaccacacagacccggttccacctacttacatctcaactgctttcccttcccgcagccacttggctgtcttcatattgtggcctcgggaacccagaaccattctcaaataacccatcttagacaccgcaaactcgggttcctcctcccacagcttcctttcggagagggctttctgggggacgcccagacccgtccaaggtcactgagctagcgggtccccggcttcaacaggggtcccttgcccagcagaattgaagggtcaaaggaccagagtgagtgctcagagggaggagggagttctgagggagaagaaagggtgcacttggagggcagtaatgagcttgacgctggaagcctggtgccgccgcccctgcctctgcctcttggatggagacccagctgcttccttaaatcccttgcagagctacctgaggaaggtttgtgtgccctcgggtctctggcaagaatcaattccagtggaagattccttgccttgtccactgctggcggggatcttgacatccttccaggggatctgaaatagggctgcccccagggagcgtttcccatcgtcgagttaaaggcctggagcgccgagggcttaggcttctgagctaggagttcccttggttcttaggaaaggtcgttttctctcgctcgagactttctgctctttcagtccccctccatttcgctgctacgcttaggttttggcctggactagactttcaaagcaaaggaaagggcttccctccgtgatacaagctcctgcgttaattttttaaagcatggatttttaaaacccagtccccagccaccgttccctcccgcacccctcccattttgtgaggatttttctttcctggaaagtccacctgtggagagataaatgagtgccagctggccttttgccaccaccactctccatctttcggggatgtggtgggagggtagactggcatggaccaagaagtcgctagtgtggcctaagcaagtcccttctggccctggcagctggcgttatgagcatggtcacaaagcttgtctcactaggtcagcctcagcctcaggttcagcctcaagccaaggcagggtttcttgatacactacaatttcaaggtcctgtcagaccctctttcaacttctttcaactctcctaacttcccccggcttcaccaagcagaggtgaaatcaccaccacacactaggggttggaggtttcctcttaggaccaagcgtttggagtcctgcatccttgccatgctagggtctgggaaaggtgctgtatcataagtgcacccataaattcttcgcattgctgtgggaggaggttcttcttaattaaggctttgaaataaactgattttcaaagttcacgagcaaagcagggcaaccactgcagtgagccctgaaactgactccctttctttattttcttagttctcagtgatacttaaaacaactaggaatactgaaatgtagtgacagtgatacttgatactatcacaaaaattggagcttttggcaacttcagcccacttctccatacaaactaatggacaggccttcataagtttaaatgtttccacgaaacctgaagttgctactaaagctgaagtctaaataactttgatcctgaatatatattgaagagcaaaatgacaaatcaattaagagtcagtagtacctgaattgccaggtgtgggtgggtgatgaacaacccattttatgtacattatgcactgcaaagattggaataatttccaagtcaccaaataccggattgggcagtttcaatgtgtaatctctataccattcaaatagaataaacttagatcttttgagattcaaattcacccccttgtgggtggactctgataattacttcgttgcacagcagattctaaatatgaggcatttcgcatgcagtcaggaggctggaaagaatgtttttcatcttgttgggaggagatctgaaaactttgaagatgcggctgggctggtggtcgaagagcttgcgtaacagatggttctttaaaacattttttaaatgctgggcctcggcctcaagtggatggtcccatcagacaacagaatgaaaaagtacagcctggactgatccttgtattccgtgtggaaacacaggtcactaaaactggaaagtctgtcgcttagatgatcttgggctccagtcgagggtcttttaaaagtgaacgaagggactagggagcagactggggaaagaggagtcgctgccccttcctctaattctatgagtgagctcttggcttgtggcccgcctctcattgagctgaccctcggccccttcagggcgccggggcccacgtgtcgcctcttcagggtctcagtgccctggggagttgaagctggaggacccttgaccgcagaccaactctgcatgtaagaacggtcagctaaattttctcctttcaatggtttaagtgggtgtttaactcccttcatctcctcatccgacacactagcaagggcacacgcccacccgcgcccccatcccttcttcttgcttcccctcagatcgaggaaattgccgctctggctgcttctccttcgccgccacgctcagacagaggtcgcttctgactagctgtaagacccggctgcatttacatccccccgccccgggccagggtggggtgggagggggtgaggcggggtgaagaggttggggcaggccgggggactggagcctgagcctcatccttattggctggcggctagtgtccgacctgagtccggaacccgcgtccgcattcactgtcttcacccctcaatccagccttcccccaacccctggccctacttacctccttctccccctcgtcttcccccctgtccttcccagcaccgtcaccctcggggctgggaagggccgttctcggtcccgcgcggggagtggaccaggcaggagagggaggttggaacttcacaactccacacttgcgatagtgagcaagagagaggcagagagagatagggggaaggggcggagaggaggggagagagaagggaggcgagagaaagaggagagagacccctgccgatcctgagccagagggcggtggagggaggggaaggagtcgcccgagccgtccgggagcagtggcagcggcacagccggggcggcaatagcagccccgcggtcgcctccgctgcccgccgggagctcggcggttcacggctccgcgccccgggcagctgcgtcctcgccaccgccgccgcctgcgcccttgcggagccgaaccagagggccgggacgctgtcttcctcgcctccttttttaaccctgacctcctcctcgcagcttgggggcggctccggagctgcgagaccggacagggctcagaggtcctgcccggcagccccgaggaggcggaggcacgctccggcgaggcgagagggttgggttagcaggcatcccggtcgccccttccttcttttcgccggagttgaatctgtgctgcccgtgtccaggtgctgggcttccggaccgacacggatcccccatccccgcccgcggtcgccttgtcatgctgcccaaagtggagacggaagccctgggactggctcgatcgcatggggaacagggccagatgccggaaaacatgcaaggtaaggaggcgccgcgcggcgctccggctcccgctgcttccccacccccgggctcgccctgcaggcttcagcctcccgccccgcgcgggcgcgggagtagccccgctgggcgctcgcagccgcgggagtcaagccccctccccaggtgcaggcataaaagtttatggctcttgaacaatgcggggcagaggtttttccaagcaacgtctaattggccgcttctaattaaggaaagagaggcttccagctctatggcaacccaagcagggcagcttcaggctaaaggtactttagaataataagatcattctaagaaatggaatgtctcactggacacccgaacaggttctctgtcattggaattggtgtgtactgtacttcaaccagtactcttgtgtggagggaggcgacccagtctaggaaagtcaactacagaaagaggtgacctccgaaaggattgtcttagcgctattagaatacatgtgaccacaccaaaagcccaggcggacacccgcagccagctcggatttggacaattcaacattgctggcagaactgaagggaacaagttaccccaaccccatcccctgtacgcgtagtgctgagtgagttgggggtgggaggacagcggttcgtttattgcccccttttaaaatctgagatctgaaaatatggaggtcccattcgttttcccagctcttgattgccaacaaaaaaacaaatcccgctggctacattttctcctcattccaaaatagcaaccctatggcttgtattaagcccttcagaagtttatctcatttgctctgggccagggagggaacaatgctaggaaaagtcaccggtgctcttccatcctcgccccttccagggtgcaggatgtgcgggccggcgggcctgtgatcccggaacgcttcctgccatccccttgcgcgaacttgaaaggactgggaggtgttgagagcagagttcagggctggtgcactctgcggtgctgagtgggcggcgcgcccgggcgctcaggccgggggacctgtagtcgccctaccgcggaggggaaaatacgtagctggagggcgtgcgccgtgcgggttgtgatccgttaccccatcggtcatcctggggtctccccaagcctctaggtagggctgtgagagtcccctagagctgaagccccggaggctgacctgtgggtctggctgctatgggaacccggttggtccaaagaagcctttcttccgggcacctggaattccagtttagtgtggggcatcggggaagtggcgctggggggctgggttgggggacctcagccggcagctccggagagggcctacccttggggtcgctgggtgaggccggcacgattcttggctccaaaaggaaagtttctgcttcttgttctggcgcgagaagccaaagacttattttgagagcggagagagaaatgttattggtaacgttttctttggaaagttcgagaggggtcttctggacacactacctagtgcccccaaaccagagaagtagtttttctttggtgcctgggctcagaagtcgccactcactcagcccatggttcgaaatcagcatgggaagcgccggggcaaggcttcgtcggagactagaggcctgcctgtcgggaggagcccctgggggatggggaccccattctcctgcttgctctggttcccacctgggacgcctccgtaggagcccagaaagacgatccactacatggtcccgggacagagcagcgcgcccaactttgagggaactttgtgcgcctctctgaggccctagctttccaaggcaccgccgtccgttcttctttccctagaccgaaactggggaagagtgtgggcgcttctttgccccgatgagttcgcctccccaaacgcctacttcggctgcaccagagcatctgggaaactctgaaaggtgcccaggcctcacacagcagcgtctccctactcagcctctgtctttgggttttttcaagagagtctctacctcatgcctcggtctttcttcgatgtcgggtccccgaggtaggcacggagtccctctgaaagcagttgcctatctgtgcccctttggtgtaaagttagagtttactttgttgggggaaggggaggtagaaaagatcacagttgggaaagtgcgcttttcgccttgttcctaaaacatgcctcaagactgtcatcgcgattgttaggagagctatcaacgtctaggggctataaaggaatttctgaaccctcggcccttcccaaacccccaggttcctaaaaccctagtgggggtctcttggggctgggattcaggctggcaccgctgggaggacctcgcctagcatccctttattaatatttcacgaaggcaggctcctgccttctctggagcctcttttctcggaatgttcccaaactctggctaactcactcccctgtgagccatcctagggctctgtggcccgggaagagacgcgtcaactccgcgggtctgcgcgcagtccttagccgcaaagtgctgcaagtgacccccctgacggccctttccgaccgaagagctcgggaaccaaagagaaaaaaaataactttattttcaaaagaacaagtcatcactgcggcgatactgtggcggaggactttggcgatggggtgggggctatttctctttcctttttggtaaacaaatcagaggaaacttctgcccggccgtggctttccatcccccacctgccccaccccctgcaaacgccactgattaacttaaaacaaactcggctgcgtgtttgtgcgccgttgggtagcaggaggtagagcctaggcgagagcctggtgcgcccacgggtttcgccgaagagtgcccgggggagtgcgggcagggtcccggctgcgcagacctgcgggtgcccgcccacccgcgccccgcgctcccatacttgacctgtgtggatgtggagtctccgggaaataccggatcaggcacttcctggggtctcctggtcactgcccttcctgtgcatagtttgtcatctttttagctgcgaagacgccttcgtgggtctgcgtccggagcaaggcggttacccgatcccggcagtgagccgcgccgcgcgtcgtggcggcctgatttctgtttaactttaatagggcgatctcgaggtgtttatattttgctatgatgatcggaaacatgtgaggttcattacagggcttcaatactttgaaaccaaaacccttctgtgtgtcttttactcttctggtatttttccccgtacgggcgtcctctattttctttttccttctttttattttcacagattttcaaacgtaaggagatgaaagtatccagaatagaaaagtactgtcaatacggaactgaatgtttcgattatctaacagatctgaaagttgggagcctcaggctgtttagttaaagtgggctgctgctgagaagcgggtttctggggcttcagtttctctgtcggacagagtttgcaaattggtgctgctgtccctgtaagcaaggtgcacttgcagcaaaccacttcaagagggagggaataaagcctgcgcttgtttctctaccttaggcgaaggtgacattttggaatttaacttcatagggatttaaaagaaattctaaactgtcaccttatgcaattcatgtctctatttgttgctttgtggagttatgagacttgtgtttaaaagcggtcagtttaaaatgttaacaaaagaagttggaattgtttgtggcacatggaattatatgaggtccatgcttattgatgacaaaagatgttttacttgtaaaaatagttcagtaagaccttgctaaaaattgtttttattttatattttaccatgtgatatttgcccagcaatcaccaaaatgctttttgttgcaggattaacacctacatgtaaattaattgaatatgtgtatacatttctctttttgtttcagtgtctcaatttaaaatggtgaattactcctatgatgaagatctggaagagctttgtcccgtgtgtggagataaagtgtctgggtaccattatgggctcctcacctgtgaaagctgcaaggtttgctcacacattgctacctgaaaaatataatgtccaacaccaaaataaaccagtggattacttcttttaagctaaatttaggctccttttttaaagactcaactaaaaatgagggagaaagagagagtcttagggagatgattcttagaagtgtgtgtctgatttagttcaaaaggcaaagaaatttatgctgtttagaaaactttgccagtctcatggttctaaaatactttattgtagtaaagtgatatagctgtagaaagacttccatttctaacagtcctaaatattgattttgcttgacttatatatatttaaagcatcgttgttcttgaaagggaatatgacaaactatttcccaaatacattttaacttcagagtatttctgtgctataagtctaaacattctttatccacagacataaaagcctaaattcccaactgtgtgatttcatcttgatttattccaaaataattttaaggattttttgaaatttatatcataaagaccaagaaatcagattttagtttttaatataataatttttataaatatatgacctatttaagtgcatggattttaatatgtaaaatatgctatattgttaccaaaaatataaattatactttaagaatttatctcaggactttttaatacattcccagtaaattcaatattcactatttttcaaagttttttttgtttgtttgtttttgtttttaagtggaaaactcagtacaattacttaaaccaccaccaggaaaatccctccattctctataacaaagtaagaatgtttctctttgtggcaagtgggttaaatatgaatactatcctggtaaatctcatattataaagctacacattttatttttgattaattcttttatataaaatataaggaaagctcataccctgtgtgctacaattcagctatctgtgatacatgctttttccttccattagttttgcctttttaagaacagttcccatacttgaatgtattccagtggaattatgagcattttcccattttactctttaaatccttttgcttttaactatccagtgttgacatttgttaaaaaaaaaaaaaaatctgaggtgttttgctattcagttttttccactggcattttgcaatggtttatcactgaaattatatcagactacttaaaaacaatgccaggacttcatgagtacctctatcaggaacatgtgggataataggaaaatagattaaaaaaaaatttatctatatagagtgtattttttctgactgttgggataaaatggtgggtagccaaatctccccaggatttgacgtaattcttcaagaataaaactgatgccagaaaaatctccaccatggcctggcacagtttgggaaggttgatgttgctgaaatgtaaaataaaccacagaaccacataagggctcaaatagtgcaatgagaggatttactggtgattttcttaaaatgaaacaatggaaaagacgggtgttagatttataatacgtctcactattttctctgtcttatagggattttttaagcgaacagtccaaaataataaaaggtacacatgtatagaaaaccagaactgccaaattgacaaaacacagagaaagcgttgtccttactgtcgttttcaaaaatgtctaagtgttggaatgaagctagaaggtaagattcttctaaagactactgcctattaaaactctccaaggacatgaactgtaaaacaacattgtacttatagcatggtaacattattttcccagcattttaacactaccgacaatactgtaagatctttctatgtttcatctgcagaatagtctgagtctcatttaatcatggtgaaatctactaggaaaaaaatttaaaatattagttgtctttcccctgcccacccccttttttttagtctggggagcagatgcattagacacaaaaaagggaaaaagatcaggttatgaaaataagactaaagcaatccaactgaaaacaagaataatttgtaaaactattaaaagtaaaatattctttgagtttttaaatcaagatacccttggaaaagtttgatttcaattctttttaaaagaggtgtgcttgtcacaagtgttaactactaatttcatgattcttaagagttaaagcctttaatggtgaaaaggagtttctcatgtaggatattatctttgatagtgtagaaatgtatttttttaaaagataatgactgaggctgcaaaataaaaaattgagaatcaggaaacatgaaaaataacgaactattaaatcattagcaaaggtctgaaaagaacaagaaagtggctcctgaaaagccacacttgaactttgttgaaagagcagaccctatactacaatgtacagattggcaggcagtaaagttaatatgtgactgctgtaaataatttgtagttcatggactactatggtatgttgctgctttctagcctctgacctgcttgctttccatggattaaatatactgcaaataaagcaataacagggatacatatcaccgatggtgctagatacaagagtgcattttatttgatcaatgaggcacaggctatttttatttggaacttttctgttatatggaactcatacttgatagaaatactaaaaaaaaaaatcatataaatctgctgaatagctaacacgcttcttccgaacagaggtagccactttggttattatgaggactgttaatgtcagtatcatttttaagagatcatgaaaggaaataattgatgcttattaattttcttattaccaatcactattatttcccaaatagcaaaatattgtggtagatgcttactacatacagtaagagactcagaagataagtaaatgttgtgattttgcatgatgtcatttaattccttttcaacaaaaataataaggctgcatttctttaccttaaataattaaactttcttttttttaagttaagctttcacaattgtaaatcacttgtggtacatgctcatgcttccttaggagtgatatgaaacaactgaatattcaataaattatcatccagatgaaaaactctttataatcttgtgcaatattctgtatacttagaatttacaataaatttttaatgtgatactaatccaagataaaaagctcaaaaacttaacctccagcaagttcaatatgtcacaagctatcagaggtctctagtttctgtctaattgccattggccactatggacttagagggaactgctaactaacttattagtcatggccgcagactccacacaccactgtcgcagaagactctcttgacagcttctgaaatgaatttgttttaattatgtccaattctacttaaattaaaagcagtaactggtggtcatctgatgtgggctcatcaagtccaggtgaacatgattttccaagaacatgtccccaccccttttgttattgcaacaaggtggccaaaatggctttcagggaggaaggtatcttgtgggaaagtattcacaatttaatccaaaattgggtaactcagttccacacccctgcaaaagaaaaccccaaagcagtttgggtttccataaggaactggcataataaaagcatatactcttagtagaacgactgatactctttcttagcaatgtgaaatatttcttttcttttttttgagacaggggtttcactcttgttgcccaggctggagtgcagtggtgtgatcttggctcactgcaacctccacttcccgggttcaagcgattctcctgtctcagcctcctgaatagctgggattacaggcacccaccactacgcctggctaattttttgtatctttagtagagatggggtttcatcatgttggccaggctggtcttgaactcctgacctcaggtgatccacccgccttggcctcccaaagtgcagggattacaggtgtgagccaccgcaccacgcctatgtgaaatatttctatgtctaacaaaaattatgaactctcctccatccacaaaagggttaatatgtccctatgtggccaaagtatttttttgatgacgacacacacttggaggaaggaattcataaataaagaggacatggttttttgggaaatctttgtgggctattgtaacgaaaacaaccacacacataccacttcttgtcgatttacatttctaaatatctgaagaatgctaataatttgcaccttatttatacctttccttccttccccccaccccacccccaacagctgtaagggccgaccgaatgcgtggaggaaggaataagtttgggccaatgtacaagagagacagggccctgaagcaacagaaaaaagccctcatccgagccaatggacttaagctagaagccatgtctcaggtgatccaagctatgccctctgacctgaccatttcctctgcaattcaaaacatccactctgcctccaaaggcctacctctgaaccatgctgccttgcctcctacagactatgacagaagtccctttgtaacatcccccattagcatgacaatgccccctcacggcagcctgcaaggttaccaaacatatggccactttcctagccgggccatcaagtctgagtacccagacccctataccagctcacccgagtccataatgggctattcatatatggatagttaccagacgagctctccagcaagcatcccacatctgatactggaacttttgaagtgtgagccagatgagcctcaagtccaggctaaaatcatggcctatttgcagcaagagcaggctaaccgaagcaagcacgaaaagctgagcacctttgggcttatgtgcaaaatggcagatcaaactctcttctccattgtcgagtgggccaggagtagtatcttcttcagagaacttaaggtatgccaccagctattacaacttacagcaccccttttaagagagacctaactatgttcctaattaatacattcttggtgctgaaaatatgtgttccttaattttctactttgtatgatttacagagtagacgtaattttattaccttgacttcaggactgtggcagcttaaatttatggggctttgattttgtgtagctcttagtttgggggggctggcatttaacataaagtataggaaactcgggcttttttttctaaatagtagaatatctgtattccttttaattcagatggtttgtggcttaaaacatttcaagtcaatgtgaaatagcgcctagtaaactatttttcttgaaaattaccatgtaaagagctatattataatggtgtcatcttgaaggtttcttttgaaggaaaaaatgccaacatttagtagtgtttagactctaaggaatgaaaatgataccactggttagtagtatcaagtaggtatttactactgtttgccttgacattaggttggtaaagcctttgttttcgtagcagattccaataggatgtttactgtcattggatggggaatgggcaaatggtgagtgctagtttacttggtttgggttgtagttctcataatctatgtcttgttgattttagtggactggtacattgtaaacatagtacttgtttgtatagggatctatgtttaaattaataattattttatttcctgaaacttaagtctgaatgaatgtgagaaagttatttagaagtttggaatctaagaggggctaccaaaacacatttggtagtcagtggtttcattcctattttaaaagtgagtcttgaatttgatttccaagtatattttgtcacaaaatcaatttcttccttttgctgtaacggggagagatgtggctgctaaatatctgtgacttgtgattacctaggacaggagattgattgtaaaatttctgagagaaggaaaatgcaaagccgacttttaattttaagagttactgttaaaaatcgtctgtgtaagtagatggtctggggaatgtggaagccacatgcaaatggaaaataatgctttcatagcagtctacattaagcactgttctttgtacatggaagcaaaaaagttacctgaacagacctaaataagttgataaaattccatcagcacgctgttaagactgtggacacatccagctctttatttccacgtcctttattgctacgcttaaaaatggctgaaggatatctcaggctgcaaagggcaagcagaatgcactgcgttagcacaattaggccagatattttccgagtatgtgttagggtttgtaaccactctatgataatcagaacatttttcatgaaaaaacaaaccatgcaaacactttcctgatattcttacattcaaaactgtgtccttaatcaaacaggtaaagtatttgaaaatgaaaattaaaatgataattttagatactgtcgaaaggttaggtaatgtaaaaatgaggaaaacacagactttttacaatcaaatgaactgcttaataattatgtcttcataggcaggttgttagattctctgagccttggtttttctcatgtgtaacttgtatatgtggtgtttgtggaggagtattgggagcacagatgtaactacttatattgaggaggttttcaaaggaaaatgagaatatgcagataaagcacccagtaccgggagtctggcatatactacatactcagtaaagtgtggtgctgttttaaattgatattactggggccgggtgcagtggctcatgcctgtaatcccagcactttgggaggccaaggcgggcggatcacctgaggtcaggagtacgagaccagcctgaccaatatggagaaaccccgtctctactaaaaatacaaaaaattagccgggcttggtggcacatgcctgtaatcccagcttctagggaggctgagacaggagaattgcttgaacctgggaggcggaggttgcggtgagccgagatcttgccattgcactcgagcctgggtgacaagagcgaaactccatctcaaaaataaataaataaataaattgatgttatcactgttgttttatgaaaaatgtgcagaatctacataatttttatatttaggatcaaaacaatgcaattatagtctcttagtttaacattggcaaaaactattacatgtgttatagagtagtatgattttgttataattaacagttattaatcagtactaattaaggacctaaaattggccaaggggtaagttgggtataaggtaaaaacaacgttgaataaaacaacatgtttcctctcagagtttataataagacagtttcataaataattattttaaaaaataaagacagccgcagagaataaaaatatattttacaaatcaacaaggaaagaaataatgcatattattttcatgtaaaaaaggaaacatgaagtaaatacagctagcggctgtaaggcattaagaaggctgggaaaactttttccactattcctctcttttccctcctctgtggataaattttacagtgacttctttatatagcatgaggttaaatatttggctaaaacataaatatctttgagaatggggcatataaaagcatttttcaatcaattacggtgttgtttaatgcatttatcagtctttcatagaatacgaaaaaaggaaaagggaaaaaagtacaaacgtgagggtcgtctacaaggggtgggagatgttcccagaagagaaagataattttgacccacttcacagtttgccttgggcttactttgaccaggagtgattcaagtattttttggtgaacaaagagtagaattcagaaaaacttaaggatagtttcagtagagagttgggaggtgactattgacatttggaagaattccttttcctttcgtttataaatttactttgtcagaaagcaaaccaactcatttgaagccaggattgagacatctctagggctgtggctttcaatttttttaatcatgacccacagtaggaaatgtattttatggcaggacatagtgtaccaaacacatcacacgggcgcacacacacagagatgcacaaacatacaaacacatacacacaactaaaccaaagtttcaccagatagtacataacctacaagccacgcactctgatattttctatctattctactttagtctaatttatttcatgtttttaaaaaaattctggtcacgactcactaaattgatttcacggcccattaatgaggcatgacctgcaattcaggaaaacttgctgctctagaggaggttttatcggccatccattggcgttgcctacctgctacaattaaggataataactccggaaaaaggtctcttcctcctggcgtggcctataagacatctttgaaacccacagcctgagtccccaccctatctttctgtaaaggttgtaattttaaaatatcatttgggaagataaatgctcttttttattcaatttgattttaattatttttgtagagacaggggtctcactctgctgcccaggctagtctcaaactcctaggctcaagcaatcctcctgccttggcctcctgaagtgctgggattacagacaggagccattgtgcctgttttattcattaaatatctgtccttttccttggtaacttcacagcaaattacctatcaagtgatatacttattggacagattttttatacctctaaaacccaaagatgaaaaatcacatatttgctcctaattaggcaattttgaaatgacctctttctcactctctttttttttttgagacggagtcttgctttgtcgcccaggttggagtgcagtggtgcgatcttggctcattgcaagctccgcctcttgggttcacgccattctcctgcctcagcctcctgagtagctgggactacaggtgcctgccaccacgccggctaattttttgtatttttagtagagacggtgtttcaccgtgttagccaggatggtcttgatctcctgaccttgcgatccgcccgccttggcctcccaaagttctgggattataggcatgagccaccgcacccggcctacctcttgctcactctctcaggacaaattacactctctaccacataggaaaaaaagagaatttcatttgtttactagttaagggaacagaagggccaggaaatttggtaggttgttttgtttttctatacatctacaaggtgcaaaaaaaggtattctggttttcattcaaaagattggaatgaaaaagaagaagttacaactccccaactctcatagaaaccgtggaatttcagagctggaagatgaaagggaaaagggctagaggacacatataagcgagctgctttgtttttttaacacacttgtaaaggacaattctggtcttcatccaaaataatggcttgagaaagatgaaattaatactctgaaacttgtagcttttgcaacaacagatgtgcatcaaaagatactcattgcctagaaatcacaaggtttttcagagctagaagagatcactgagatcatttgaccctacctctttttacatatgaagaaactgaggcagaagggaatgtaatctgcccaagattatccagctactgaatggcagaactgggactggtagattcaggttcaaagaagcagtcctcttgtacgcattccctcatcccccccagcatgcacacgcacacacacacacacacacacacacacacacacacacaaagaggcagtgtaatctttgactccaaagaaaacagtcctttgccagtgaagctaaagcaaatctctaggttatcagaagcccatcactaccatccaattaccaaatcactaataatcagtgagacagattttccctgagtccagatgaccccgtgggagtgaatgagtcactttaaaaagctacaataattctttcaggccactggggtatcattcagtacagtggattcagcacttctgggccttgagtttctgaagcattctctagtgccctaccctctgcggatagtttactctccaggtgaatctggttcagtgacggcatatgggctgtgctctgccgttaaagcggccaaacacgattatatcctgtgctctactagaagctgggcatgttcagtatgggtttcttgttacgtatgcttgtcgagatagcagaaaaagaatgcagggagctcactttggcagcatatacaataaaattggaaagatacagagattagcatgaccccctgcacaaagatgacacaggcattcatgaaactgtccataaaaaagagaacacaggatggtaaccgggtgataggtgagccactaataaaattttctgatctttaaaccaaatctgttgagtgacctatgctcttgactgtttccttgtgtttttagaaattaagagctaattcgagacttttgtattctgctgaaagagctgtccttgtgagtcaagaagattggctttttttttcagttattttttttttcacctgtgtcttgaatatctcacaaacacaagagcagtgagaaaataattcccactttgttaaacaactaatgaatctggaggatctatttgatcttctaatgagaccagatgtcttaagagaattctgggaatggatatataagaacttcccctcggtgaatgattctgatacatgtacgtattaaaaaaaatctaaattaatcctgactgaaactcccaactagcatttctgtggaaaataggtctcagagactcagggagtttgtgccaaaggaatttagccatgctgaagttggtttttaagtatagctttatctaaagcgagggcacaaggggaggagcaaaccttcttttttctctagccaattatggaagctatctgagcagcattatttatctatttttaacattctagatcctttttcctaaatcacagttacctttcccaatgcaggcctataatctcagactttattgaatctgccccaattttaagctatattctttagtaaatttacttagtcctacttttttttttttaagacagggtctctctctgttgcccaggctggagtgcagtggcatgatcatagctcactgcagccttgaccttgtggcctcaagccatcttcccactttagcttcccaaatagctgggaccacaggcgcatgcaaccacgctagctaattttttattttttgtggagatgggatcttgcgacgttgcccaggctggtctggaactcctgggttcaagcagtcctcctaccttggcctcccaaagtgctggaattaaggcataacccactgtgcctggcagccctacttttttttttttgtgacggagtttcactcttgttgcccaggctggagtgcaatggtgcaatctcagctcactgcaacctccacctcccaggttcaagtgattctcctgcctcagcctcccgagtagctgggattatagcgcctgccaccacgcctggtttatttttgtatgttttagtagagatggggtttctccatgttggtcaggctggtctcaaactcctgacctcaggtgatccactagcctcggcatcccaaagtttacaggcgtgaaccactgtgcccagccagccctacttttctatgggagagaaagagaaactgagagagaggatcctgctcggtgtctaccacatttacttgccatatggctgttctttgccttctcctgagagttggggtcaggaatcatgggtccaacacgagcactcctcattgccatgtgatgtcacagagcaatagccactttacttacctttgttttcacttctctggatgcaaagtagctaatctgggaagcacaaggatgacacaaagaaaataaacattaaagtttgttttccagtcaaatttttcaatgaatgaaaattttccaatcaaaatttgatctcaaggcacattaagccatctattgccagttctcatactcatcacaaagttgccagaatgaaataaatcgaacctgcataggtttacaaggaaatgataaaactggtttttcttccgctgaaggtagatatgaaagtgttctgtctttgtgaatttggagagaatgttggaatcagcaggtttgattcatggtctctaaggtctcttcaggtgttaagcatctgcttttatatctttttccaagcagacctgaaacagaaggctttggtgtggctgatagtgttggatgagaatttatgttatttcagcctttcttgcttacatacgtatattgcatgtgtctattgtagactcagaaagccattatctttcttcttgctttcttctgagctttcttcttgctcacaattcactgaaagaatcagctcttctcagtcaatgcctgtttgtgctatggccaactcactgtggggcagtggaacatgcccacttactgtggggatgtgtattgttctttactgggatatcttgaaagtacaccagtcacctcaaaactcccatgcattagttacttctactaaggtaaaatttactctccctaaaatttactgtttttaatgtacaaatgataaaacagctctttcacactttaaaattctcttgtgtccctttgtaataaactcctctccccaccccagtccctgccaatcctgatctgtttttgtccttagagttttttttgttacttttaaaaagaagtaaatttgctttattcgttgagtatacatttacaaactgcaaactcagtttaagctccctgaaacttatggtttcagcgtagttgagcactaatagtttccatggaaacatatcctccatggggcgctgggatatttggtaagagagtagtgatgatcataacttcacactgggtctgcttgttcacatgtcttatgagcgtcctgttcgtattaacctgtatgttatctactggaaccatggggagaacatgagaatagcgaggcacacccaagaaatccatgtttaactagcttggccatcgtcaggtgtctgaatctgaacagtgagagtaggaccacactgctaccgcatacctgactgcctcattctgtgtccctcctgttcgatatagtctggttttgcaaactgaggcttaagcctcggcagccaagagcaagcccttgttcctgttctgatgaggatgtactgaattattttgtattcagtttcctacgatgaccttctctaattacacaaaagaaaacataatgaatttacatatctttgggtcaatttatgaaaaaccattcttttcagtaatacaagtcctttaagacctgttggaaaatggtacagacgtgagcattttccttgctctgctctaggtcatatggtaaaggagaagagaagtaacttttcttgggtacccactaagcacctactctagtgctaggtgctttcaggccattttctagtttgatctttaggacagtccagtgatgagagcacagtgtatggtcatttggtcagagtgggagtaaaagaccatcgctctcgtataacatgttctctgtggaggatacgtccgtcagtcataatgactcatagagatgtcaagttaattgattcgtaaaagtttgctaaatcaattttttttctttttttttgagacagggtctcactctgtcgcccagtctggagtgcagtggcacgatcttggctcatggcaacctccacctcctgcattcaagtgattcgcctgcctcagcctcccgagtagctgggattacaggcgtgcaccacaacacccatctaatttttgtatttttagtagagatgggattttgccatgttggccaggctggtctcaaaactcctgacctcagggtgatctgcctgcctcggcctcccaaagtgctgggattatgggcatgagccactgcgcctggccgtaattgtgcttttttttccttttttctttttttgagatggagttacactcttgttgcctgggctggggtgcaatggcacagtctcggctcactgcaacctccacctcctgggttccagcaattctcctgcctcagcctcccgagtagctgggattacaggcatgcgccaccatgcctagctaattttcgtattattagtagaaacaaggtttcaccatgtcagccaggctggtctcaaactcctgacctcagatgatccacccgccttggcctcccaaagtgctgggattacagatgtgagccaccacgctcagccaaattgtactttcagtaaagtactttactgtttacaaagaacttccatatacatttttttggtcctggtctctgtctttcattttgggagcatggatgtaactggcctttcatcaatggttcagtagtgttgttttttaaagcctacaacagaaccatctcctatgaattgactatcacctgtctaaatgccctgtttacagcatgttgtacctgcaagagcaggatatttaaagtactttataattgataattgccattatcaatatgctcacctctttaccatattccaacaggtcttaaaggacttgtattattttttaccgaagagagtggtttttcgtaagtttacccgaagatacatacatttattatgttggttttttgtttttttttgtttttgagacagagtcgcactctgttgcccgggctggaatgcagtgtcgcaatctcagctcactgcagcctccgccttcccggttcaagcgattctcctccgtcaacctcccgagtagctgagatcaggcacacgccaccatgccctgctaatttttgtatttttagtagaggcggggtttcaccacgttggccaggctggtctcaaactcttgacctcaggtgatccacctgcctcggcctcccaaagtgctgggattacaagcatgaaccaccgcgctgggctgggttttgttttttgtttttgtttttttttttcatattagaggaggcccagacaggtgcggtggctcatgcctgtgatcccagcactttaggaggccgaggtgggaggatcacctgaggtcaggagttcgagaccagcctggccaacatggtgaaaccccttctctacaaaaattatgaaaattagcccggcgtggtggcacttgcctataatcccagctacttgggaggctgaggtaggagaatcacttgacctcaggaggcggaggttgcagtaagccaagatcgcactactgcactccagcctgggcggcagagtgagactttgtcttaaaaataataataataataattagaggagaccatcgtaggaaactgaagacaaaataattcagtatgtccccatcagaacaggaacagggtcttgttggttgcagagacttcagcctcattttgcaaaaccaggctatatataattggaggggcacagaatgaggcagtcaggtatgcattagcagtgaggtcctccccagcttgtgaatacctgggtaggcttaccttatctcccaacctcccagtgctcggcactggttcctactgaacaatcggtagaagcaattttgtcagcttgtctgcctagaagtagccacatgcttgtttgctgagaataattagggtccctgcttattccagtacttatgcttttccagcaggcacacagattgctcacagatcttatggaaaggctgccagtgttacttcctcagtgttggggaggtagagcccactaagcctgagccccctgttccctgtctgcacactgtcatacaaagtcacagaataagttaaacacatacacacatgcacacaaacacacacagaaaacatgactcatatgtgacatccctcaacacacttttgaaggactttgccctctgaacctatatggtaaaatagatcttttttattttccaggataaataaagaatgattttgctctgacctattcttctgcagcttgggaagtagatcatacaaatctttgagagttcaacatccatttgcagaatggctccatggaaattggccatttaaactattcttcacgttaaagacattaagctctaacccaagaaaaccacccacagccaagaacaacaaaaatgacataaaccacgtcacctaacccagcagttaggtatttcttgaatatctgatacttaaaacttaactcccctctacacctgtgtcctctccatacagtaggctaacatcaggcagccagtggcatgggcgccctggctggcttcatggggcacactaaccttgcacatcattttctttatcttctcctctctcctccttgtccacttttcttctgtcccaattcgctttttcttttcttacttcattaactctttttcctttccttctaatacctcaggaagcacgcttaggcattaccttgtcctcagctgcatcttcatttacccttcaggtgaaatgtggttgagcaaggaaggcaactcgttccctacaagtctgagaatgggtggagcaggcaagagaaacggttaaatagaccccagagaagggctgcagttaatgataataggatttctatctgtccttccactgtaccaagtgacttccacacagtggcattttccaagggtgagtgcagagggagtagctgctcagcttggatgggtatgggcaggagaggttactgaggctgcaggcttagcaaggtgagtatgcatggatcccacgaagtcaatgcaaaagcaatttgaaaatccctgcttttcaaataggtgtaagggtttctgtccatgacaaggctgttctacttcagtcttttaaccatgtatccacacagtcccagagatggtcactagtgtcttcctcacctttaacttcctccttggaaataattttcacatgctacgttcttgacctaccaggacaaattctatgaattcttcacgtatgtgtcctgggaaggaatagccaaaagctttgacaagaataactaagtctgggctgggtgtgatggctcatgcctgtaatcccaacactttgggaggccaaggcaggtggatcacgaggtcaggagttcgagaccatcctggccaagatggtgaaaccccatctctactaaaaaaaaaaaaaaaaaaaaaaatacaaaaattagcctggcatggcagcggccacctgtaatcccagctattcaggaggctgaggcaggataattggtcgaacccaggaggcgaaggttgcagtgagccaagatttgcgccactgtgctctagcctggccaacagagcaaaactccgtctcaaaaaaaaaaaaaaaaaaaaaattaagtctgaagtacccaggacttgttgaaatgctgcctgatcatttctctcagaaaactaacagaaaaccacattattttgaatatttggaaatgtcaatgtcactcagagtgcacaacattcgggattaactttttttttttttttttttggagacagagttttgctcttgttgcccaggctggagtgtaatggcgtgatcttggctcactgcaacctctgcctccagggttcaagcgattctcctgcttcagcctccaaagtagttggaattacaggcgtataccaccatgcctggctaattttgtatttttagtagagacaagacttctccatattggtcaggctggtcttgaactcccgacctcaggtgatccgcccacctccgcctcccaaagtgctgggattacaggcgtgagccactgcgcccgacccgggattaactttacaaccaaacttgatccaacttctaattctgtaagaataccatttctttacatgacagatggaataattggccaataggtctaaagtctgtcctttattgtgcaataagagcctcgcaaaggtggaatgcaacctgagatcttaaggtcctggtctctgtctttcatttttgggagcacagatgtaactggcctttcatcaatggtttagtagtgttcgttattaaattctataacagaaccacctcctatgaattgactgtcacatgtctaaatgccctgtttatagcatgttttacctgagagagcaggataattacttcatttaaattaaaaacatatttttatgggaatgacccatggtagacactggatacatgttgaattaacgtgctcaagacataaaggacggatacagatttctcaatggtaaaggcaatatgtagacatctttgctttacttttaagcaacattccatagatattgtcaataacctgaaaattcccagaataatgttttaaatgacttcttaattagcgttccttattttcatacaggcacactcatattcatttgctaaaaacaattatctgcatgcacaagttcagggtcccaaataattctccctggcagattttgtgtgtgtgtgtgtgtgtgtgtgtgtgtgtatctgtgtccatgtgtgtatcgcagtgttttgagtgcatatcctgttttcacacacattctctgaaatgttggctcattctaagggctgttgtttcatttcgatcactgtatcctgtggactctgaaactgctacaaatgcttcttcaccacacatcttatcagcacagttgtgtgcctttttgatctaaagttgtgatgaataagaggctttacttgttgcctaatttttaaaaaacttaccaaatattacatttccccttataaaataatgatatagattagtgtttgtgcagaagtgttggcaacagaattcttcaaaagttttccgttgagtgatgaaaagctgttatattattttgactagctaatcaaatgtaattggggagcttgaagtgccttagattttccttgtacagttatcaaagcaggaaatgtaactcgcagagctgatgaaagccatctctcatggtattctttcaattatagatcttacagagcaaatgaaagaaaagctctactgctaaaaactcagaggcttgaaatgccccttaatgttaactgctgtattagctagttaacacattattatgtactttaattgattcttactccagctttggagaaaaaaattatggatctgtttggcatgtaaattaaggtggggggaagacacctgagtgcaataacagcactattgctattaacacttagttcaagtaacatcagatacctgcagtgtaaacaatggccctggttcactttggcgtgtttttttttttttgagatggagtctcattctgtcacccaggctggagtgcagtgtcgcgatttcggctcactgcaacccctgcctcccaggttcaagcaattctcctgcctcagcctcctaagtagctgggattacaggcgcatgccaccacacccagctaatttttgtttttttttagtggagacagtgtttcaccatgttggtcaggctggtctcgagctcctgacctcatgatccacctccctcggcctcgcaaagtgctgggattacagatgtgagccaccgcacccggcctaatttttgtacttttagtagagacggggtttcaccatgttggtcaggctggtctcgaactcctgacctcgtgatccacccaccttggcctcccaaagtgctgtaattacaggtgtgagccaccccgcccggcctaaaagcattactatgttgcactcatctgttggtattcctgctgatgagtgttattgaaggagttttatttgaccattgagaattgcttttatgagtttatcaatgaagtgttataatctagtaaaaataacttcatttcagtcatatttggaagggtccagctgagatttttagcttttgaaaggatcaaaccacattacacctgcattttactggggtgtagtatttttctttgttgttgaatcacactcttaaagctgcccctaaaacatttcagccataaatgggtagtcctgacctaggatcaggccaaattcaaattttattcacatattcatttattcactcacacattcatcaaacatttatcaagtttgtactgtgtgtcaatccctatgctaaattgctggagacatgacagaagcaagtgctgtaatcccagcactttgggaggctgaggcaggaggatcacctgagttcaggagttcaagaccagcctggccaacatggcaaaaccccgtctctactaaaaatacaaaaagtagctgggtatggtggcttatgcctgtaatcccagcaactcaggagtctgaggcaggagaattgcttgaacctgggaggtggaggttacagtgagccaagattgcaccatcgcgctccagcctgggcgacagagcgagactccatctcaaaaaaaaaaaaaaaggacgagagccgtcttcactttacaagttaagtcttcatggcagttttctcaattaaagtagaacccctcctgacattgatgcggcactaaacacaatggcaaactctgaccctgaaatcttgtgcaagtacttggttatgacagcacactaataaccccagccctgtttacaccaatgtttaagattatgtttgaactggaaaggacaacttaattcccatagacaacaaggtgagagtaagggagggttcagggcggcatcactaggagagaacagctcgtgtaaaaatacagaggctttggcatagcacttcttggaaacttcaagtaattcctatggctggaaggacaaggatagggaaggggcaaggggtaaagctggacaggtgagcagctcatttatacatacggttctaatatggattttattcaaagcaaaggggagccactggaaaaacttaagcatcgggggccagaaggattgaaaatgtaccagggacatatgcccaccacataatgtcatgatttcggtcctggtataggattttccttaattgccagcatttagcttaaagtgcatttaaatattgttttgtttttaatttactatctaaacttgtactaaaggagttggtatcttttatgtccttagttatttttgttattgtctccaacagacctttttcctctaggtaaattttggttattgatgacatgtatgtatttgaggtcctggtccttgtttcatatttaatttaaagaaatgtaatgttttaaaaattatttatttatttatttattgtagatatggggcctagctatgttgcccaggctggtctcaaactcctaggctcaagcaattcttctgcctcagcctcccgaagtgttggggttacaggcttgatccaccatgcccagccttcagatttcttcagtataacattctttttgaccagaaagttttctttttcttttttagttttaatttttttattgttttgagacagagtctcactctgtcacacaggctggagtgcagtggtgtgatcttggctcactgcaacctctgcctgggttcaagtgattctctagcctcagcttcctgagaagctggcactacaggtgtgcaccaccacatgcagttaacttttgtatttttaggagagacagggtttcaccatgttagccaggctggtctctaactcctgacctcaggtgatccaccacctcggcctcccaaaatgttgggattacaggcgtgagccaccatgcccagccaagtttttctttttaaccttgaactgatttattgctgattatttcatagttattattttaatgacaccaaatcatccttccagtatatgcacacatcgagggggcagtctagcccagtgtgcctaaagtgattccacactagctttttaaaattacatattcccaaattctaccccagacctgatgaattgctcatccattcatatatttattaattcaacatacattaattaagtatccagtatgtgtcaagccctgttctagaagtgggaagaaacaagtgaggaggaagggagcagttagaggggttcagagaagaccaatgtgaagagctgacatttcagctgaaatccaaataacaagaaagaaaacagccttgataaatctggacacacagcactacaggcacaggaatagcatatgcaaaaatcctgaggtagaagctagcttaatattttcaagaaaataaaggaaggtcactacctaaaaatcaatgattgtgggggaaatagggctcttgaaaatgtcaaaaagtttgacaaggtccagctcctggagggcttggattttattgtttggaataggaagccataggaggattttaagcaatggagtgatttcatcgaattctcagtagaaaaactattgcactggctgcagatgggaaaaaagttgaagggaagcaagagagtatacaggaggtccatcaccccaggggagagatggagagatggtggcttagatcagggcaggagaatggagatgggggagaagttgatggacccaggatacatgttgaggtaaagctgatagaatttgccaaaaagactttgagagaagatgaggcaggcaggactcaggtttttggcttaagcctttgggagccatttgtggagaaggggaaccagaccatctaggggaaaatcctgcacatgttctaaaacttccctaaacagatagagccaggtgccagagccagttctcagatgtcacctttgggaactattcatttattctaatccttatttttattcaagaaggcacagctcgaccactccacgcagatataaattcaagctcttcccaaagatttctcaggggtggggatcctctatacattccctgccatctatttaattaattatctttttttttttttttttgagagggagtctcactctgtcacccaggctggggtgcaatggcacgatctcggctcacagcaacctctgcctcctggggtcaagtgatcctcctgccccagtctcctgagtagcaggaattacaggtgcccaccaccatgcccagctaatttttgtatttttagtagagacagggtttcaccatgttggtcagggtgatctcgaacttctgacctccagtgatctgcccacctcggcctcgggattacaggcgtgagcccccatgcctggcccctgccatctattttaaagtttggcagtagtcaagacattcttttatgtacaacttaaatccttccttctgcatcacgtgtcattccctgtggacctgtcaatagagatggaacacgtggctaccccttgcttcatcataaccctttacatgatgacttgctgaattgcagctatgtgaaaacctaaaaaatttagacattagggaatctaaatttatttcagtaattaagacagaggggtataactaagactgatcacctatctatgcagccataaaaaagaacgagatcatgtcttttgcaggaacatgggtggggctggaggccattatccttagcaaaggaacacaggaacagaaaaccaaatacctcatattctcacttataagtgggagctcgctgagcgcggtggctcacgcctgtaatcccagcactttgggaggccaaggcggggagatcacttgaggttgggagttcaagaccagcctaaccaacatggagaaaccccgtctctactaaaaatacaaaattagcctggcagggtggcgggtgcctgtaatcccagctactcacgaggctgaggcaggacagttgcttgaacctgggaggtggaggttgctgtgagctgtgatcgtgccattgcactccagcctgggcaacaagagtgaaactctgtctcaaagaagaagtgggagctaaatgatgagaactcacgaacacaagggaacaacagacacgagtctgcttggggctggagggtgggaggagggagacagcagaaaagataactacagggtgctggacttaatacctgggtgataaaataatctgtacaacagacccccatgacaagagttcacctaggtaacaaaccttcacatgtacccccgaacctaaaataaatgtttaaaaacacacaaaaaagactaagtgcctatgcagacaccagtgtgcaaattcagttggctacgtatgcagagaaataatggctgagaacatttagtgcttcctcccttgaagttcctgattctgaggttggctctgagctcaggaaactttgcactccttgtatttaaagtgtgaaatattacctttaaaggtatttttctccttcagtatgaaacctatagatgaatttcatccgatgtttgcatcagtgtcttggcatagacccaatttgttttcctttgttgtcctttttatgagggtaaagttgctagttattttaaatattttttgtaagctttatcttcaattctttaatgatctttgttgctttttaaagaactctttcaactttcttttctatagtagcacaagaatccaagctatagtctttccaaggcttctctcctcctggggcagagcagtgtcagggtttggattagaaatcaaatccagggatttatctacaaaattacagatgagcataaatatgtcatacatatcagaatcaataaccctgctaatagcaatgagtgtttcatctattataattcttcagtctcccaatattccaacaggacttagtttcccactacttcgaaacttacttaatttacttctagtcatttggaaaaaaaaattgataatattttgtctgatatctttgaagttgaaaaggcttcttgccagtttacttattagcccaagtcagtggtcccttgcagcagagattaatcccagctttgcggactctaaattttatacaatttaggaagcgctcagtgaaaaagaccacaaaaatctctttcttttgcacattttacaaaaacattagacctggagcatacacattgcttgagtccctcaaaaagccatgggattttctgtgcaagtaaaggctgctgaagctgaagctcattagtttcaggtaaatctgcttccgatttgcagttctgctaaggtatttcttgtgtagaatatcatttgggctaggaggaggtagaaataaagatagaaatctacacagatgatgatattttaaaatttggtaaaataggatttaagtctatactacccaaactgactgaaaataaatattaaccccagacatctgtagtgagtttttctttctaaaaataatttctcattgacccagggactatcaagaaagtcatgcctggagactaaagaagtaatttttctctgagctaagttcagcatttatagcctcattagacactctgtggttattcagtcttaagcattccaccttctcctaagctcacctagactagctgataccaggcatagtcccattagttcaatttcactctccttaccctaagaaatttttaatatgtatatcaaacaaatttaaatggaaaatgctgtaagttctcttttagttctgatgaagaatttataaacaattcatattctttttttttttcttttgagatggagttttgctcttgtcacccaggctggagtgcaatggcatgatctcagctcactgcaacctccacctcctgagttcaagcaattctcctgcctcagcctcctgagtaacacggattataggcatgcaccaccatgcttggctaatttttgtatttttagtagagacggagtttcaccatattggtcaggccagtctcaaacctcaaatgatccacccacctcagccttccaaagtgctgggattacaggcgtgagccaccacacttggccaaacaattcatattctacaatagcaatatagtattgcatatagatacaagttttactattatctaattaggaaactgtggggtttcctatggtaagattataaagtatgtcataaaggttttggaggtcctcatactgcagaaatttaatttttctattcgtaaaaggaatcacattaaaaactactaaattatcttacatttcctatttgattttatttacccagtcttgcccttcatgccaaagtaaaaagattagaattcttaagtgactaattaagaggaacattggaaaacataatctctaattatgtctcaatattacacgtgtccatgaatagttatctctaagatgaactccatttggctttaaaataggatgttagagatatttttatgaaaagtttgctctccagagctgtaagttcaacataaatttggaaggctaagggaaagttttttttttttaagtcgtctttattcacttctaattttgcccgaaaaataaagtgacatccttaagtacttttcatttgtgaggtagtttgactgatataaattgtgcagggtagtagttttgtatacagttggttttaggtaatttttcccaggcatctactttcctgttcataataagctgtcagtatatgttagttaaatgaatggatggcagagcccctttgtgcatttgctgtgggcttcggctttctcggtcttttggtttgaggaatagttaaggcacacagagaaggtagcctagcaaatcttataagccagtcatatttgggagtgtctgaggatttttatttttaaatcatctacaagtcaagaatatatactttaaatgaaatgatcagccaggtgctgtggatcacacctgtaatcccagcactttgggatgccgaattaggaggatcacttgagcctaagacaaggagtctcagcatagtgaccctgtctctacaaaaaatttaaaaattagccaggtatagttgcatgcatctgaggttttagttacttgggaggctgaggcaggatgatcgcttgagctgaggaggtccaggctacggtaagctgagattgcaccactgcactccagcctaggtgacagagtgagactctgtctcaaaaaaaaaaaaaaatcactcactgttcctgcataataacttttaatcaaaaatctgttccaaccccccagccccatcccccccaccaaatatatacacaaacctgatttagagctggtttaagtggctggcttttgctctgtgtcaatgtgccacgcctgtgtatgtacctgagcagttaggatgcatagcagagtttcagtttatatgtgcaggctctcaggtaaaagggagaattctggaagaatctgcagggaatactagaaacgtgttggcaatactttataagagagagtaaaaatgaatttatcttttgaaatgggagcaaagctacctatttttccagatatatacgtccttttacaagtcgtcctttttagagcaattgacttctttggtttgaaattatttacccagatggctgcctaacgagaatttgagattaggtcaaatcatttgtaggactattttgattaatgttctttgatttctaaatcaaatgtaccagaccaaacactttcaaagagaggaattaatatccacaaaatattatttcatatgcttttgctctaggtttttccacagctttcagccctgtctcatttcaccttaggaggtagagaaaaataactaacacatcaataattagtttagacctgaaaacactctgctgcacagctgtaatgtttcacaatggtttctgagctaagaggtgtttatgtagcatcaactttatcgaaacaaaaccctaggtaaaaacacattgaaatggcacttaaaacaacaacagtgcccaaaatctgttgtttcattacacttgagtataaggcaaatctggaagttaaattgtcccatattgagaataactgaataaatgtttacataattgctcccacttttgctgaatcttttggtttgatcaggtttagagcagagaggtaaaaaatacatttattaaaagagagcttttgagattgaatgctctaattaactgctaattacttctctaactaggctattttagattaaaaacctaactgtctcaattctagtggattttgaggttgtgatgaagagcagagccgatattcagtgggaccacaggatcaagcactgcctgtgttactcagtatttctctgctcagagacagaaccaattataatatttagcagattttttttattggaaagtcttaaaaattgatcagttttaaaatagatgcacacaaactaccttgagctttactttctgatgaaaacaatctatactatatgataaagaacagatagatatggaatgctggttcaagctgacaaaatatgcacttttgttgtcttagatctagtgaggaaattgattcatgtttggtatgactatcttcacaaggaattgcttataaagaggtagggcctaactcatttatataaatcgaggtaaaggaataccaggagtaaatctaggaaaattaatttttctgtttttaggtgcttctaatactgggaaaccctattggtttcaaagggaacttctaggtgagaccatttttagagaacttgtattccagcaagcaattttttatggagcagaggaagcatttttaattattatatattctaaccatattatatagcaatcagataaatttaaagttatagtctgttgattaataaattcatggtgggttggctataatagcaattttgcttcagtatctaagacaaaatttgaatgatttgagaatgcatgatttacctcataatgtgacacccttttaatcaaaacacccgaaggccaaataattagatcttgtataaaacttggaaagaaaacaccgttgtatacccctacccaccattgaaatctgtttttagttaataaggaagtgggagtaaaatatttgagtgagcctatatataggctctcatgtattaaaagaaaagctatttacaactgatttgttgctaaataaaatcttggatgaacacttttaattactaaaaaggtaaggttacaataaacacaggaaatataaatgaataaagtgtgcacagagtcatgctgctttcaggactataaatagcacctccatctctgctactattattagcaagtatgaacaaaagaagatgtccagaaatagaaaggggaagagcatctccatgagccttgtattccatggcataggaaatgtttctagcaagcccgtgaatttagagggttaattgatttttagaaaggacatttccatgctgtcaatttgccaaggaaattcttttaccagcatgtttgtaaaattggcaggctgatgtttcctctaggtgacacaagatgtgatgaagaattttatctttacttccttacgaaaatcagcgttgattgcttgcctttttgttaacttatttggttactattagtttgcatctacagaggatcagttaacatagttgaaactggaagaactagtgcatcgtgaacagccctgaaccaaaagtcaggtttcagtttcacctgagccactaatgtgctctatgactttggtcaaagcatttacatacatatatatatatatatatatatatattcccctttatatatatatatatatatatattcccctttatatatatatatatattcccctttatatatatatatatattcccctttatatatatatgcgcacacatactgctgtcccttgatatctgtgggggattggtttcaggaccttccacagatattaacatctgagaatgttcaagtctctggtataaaaatggcacagtatttacatataacctcccatgtactttaaatcatcttaaaattataatacctaagagagtataagtagttgttacactgtattgtttagggaataatgacaaaaaagtctgtacatgtttagtacagacacaatttgttttccccaaatacttttgatccatggttgaatccacggatgtagaagatacagaatcacagatacgtaggccccactgaaacacacacacacacaccacacacacacacatatgcacacacatcttctctgagccacagtttcttgattaattaatatagcaaacatatatggagcgcctcaatatgccaggcacattgctaagcagcagggatacgaagtcggttaagatacccagtccttgcttactagcctcgcactgctgggagacagacttttgaacctgtaattagaatgggcaatgggtgtataacagagacgatagctgttataagaacacagggcagagcttttctgtctgtggagggggcaccagggaaaactttgcagagatggtgccatttgaatcaactcaatcttaaagaattcctcttgaatttttcttcaagactgatttggatgaaaatggctatacttggtcctcgtgaggaatcaatgacataataaaagtatgctaaaaagcataaaaaacaatataaatagtctattagtaatgaaatgattcatgggcatgaatattacagatctagttctaatttttgattgcctgtttattaatgtttttttctttttgataatgaattatgagtgcagttatttgagaactgattgtaagactgtagttaaaagtgggagaggccaggcacagtggctcacacctgaaatcctagcactttgggaggctgaggtgggaggattcaagaccaacatagcaagaccctgtctttaatctaaaagaaaagaaaaaaaaaagaaaaaaaaacaagaaagagagaaagaaagaagaaaaagggccgggtgcggtgggtcacgtctgtaatcccagcactttgggaggccgaggcgggcagatcacaaggtcaggagatcgagaccatccttgctaacacagtgaaactccgtctctactaaaaatacaaaaaattagccaggtttggtggcgggtgcctgtagtcccagctactcgggaagctgaggcaggagaatggcgggaacccaggaggtggagcctgcagtgagccgagatcacaccactgcactccagtctgggcgacagggcgagagtccatctcaaaaaaaaaaaaaaaaaaaacacgagagaaacacaaatctcaaacactttaattttttttttttaaatcactatggactggaattaaaaaaaaaacttctccaaatatggatatattttcccataagtagtcatgatagactgaatgattattttttaaatagttacatttttaggggtttacacgtgaaattatgaagatatggaatttagtaataattctttttaaaaacatgtattacttatttataaactatatgtgtattctggtgaaagattgtcctctaggaaaaataagtcttagaattatttctctccagtaggaatttattattgtcctatcttcagccagacagctctgtggtaatttcatttggtgatctctttaataaatattttttggagtgcctattttgtgtgatgccaaatgaagtaaacagtgttttatgtaatatgttccaatatatattttttagaatgaaccatttaccaagtatacataagtcagacattgactgcatatcccactgaacatttccattaatataagtggaaaaaggaaagccgctttgcaaaaaaaggaggcttttttgcttcagcaatatgcaaattaatttgaagcatgccagtagttttaatataggttgattcagaattaccattgtgaataacattcacttctattactgcttttgttaaaactaagcgccaaaaaaggaagcctctttgcttcagcaatatgcaaattaatttggagcatgcaaatagttgcagcatgcaagtagtttagaattagactttcattaaaactaagtgccacacagagaagaggtgtaaaacagagtagtaatctgttgcgtgcacttgaagggttcttgaaagacgtgcataaaccgttaccgttgtagcacaagttgagcagcaaaagccaaagtcgcacatctgtgtcttgtcgccacctctccacttatccactcatgctggcttttctcccagcagctctttgccctcctccttttaacactgtgggctgaggtgaggatgttctagtcaagagtctttacgagccttatatcgccaggctttcagaaaatgtgaagcatggtagtgtgaatttagaaaaaataaaagtgtgtataaaagctcttctgttttcttttcttttttttttgttaagaaacaatagtgtttatttatcatgttttgcttagaattcctttggtattctgttctcttgattttaacaagaagctaaactcaataacatcttttaaaaacaaaacaattttcggttgagggtgggtgaggaagttatatgaagattgagtgggaacctcaacccaaggacataatagacaagaaacagtttttttcctcccctttcttcagaagtagtcttccgcatggtttaatgtgctaacataaccccggttccaatatttcaaaagatacagaacttcccagcatgatgataaagttttcctgtgttccaataataaaacctcaacgtaccagtgatttccagttcctttgtggctcagcaacttgtgaagaccaactaagtcctaagtacccagcctgcagtatcagtgtgggagtcggaaacagatgttcacgggacaatgccatttgttgtcactgtcgatactatgtggcaactttcccaaatgaaattgtttgtggatggaaaagaatgtaagcagtgattcatgcccaggaatttttttttttttttgtctgcaggctaaccgtatcttatttgttttaaatcgcagagcattagtggattaaaaattttaggttaacttactattatagtatctttttcattttttgtcctgtacttctaaaaggagtgactaatttaggtagcttactgagaatagtaaataccttacttgatttgagaattcaaaagcagctgacatcttttcagatttagtgttttaactattgagtaggtacagagttgccatttaaatgaacagcatgacttgcttagcatttttgttaataatttggaggtttggagaattcaaaataaacattaagtagaaacatattttttggtaataggtggcattgcatgatcttggtttgagattttcataaatattacaaaggaacttccactaactcactcactgttagagataatagattaatttgtataaattaaatattaattatagagaagtttaaaatgtacttaaaatgaatttgatacaacaaagctacttaaaagttaggtagaccatgtcatgtgacatgtatacaaactatcctttttcaagaaaaaacctaacaagcgtttaaggcataatatctactactttagtgccgtttttataaaacataaattttaatctacaaatgaaagtcttttaaacatttattcataccaacagatgcctaaggccagaattataaaatgttttatgttgttttaaaaacatatgtatttctcataattaggtttcggcatcacagaaaaattattttaagggtcatacaacaaaatctgacttttaaacaacagccaaaggaaagattggtatcacatgtagaggaagaggtccttaattaagaagcaaattccggagtttcagtaactcattttcactagctaatgtttaataaattgtattaggttagtgcaaaattaattgcggtttttgccattaaaaccacaattaggttgggctgggtggctcaagcctgtaatcccagcacattgggaggccaaggcaggtggatcacctaaggtcaggagttcaagaccagcctggccaacatagtgaaacctcgtctctgctaaaaatacaaaaattagccaggcatggtggtgggtgcctgtaatcccagctactcgggaggctgaggcaggagaatcgcttgaacctgggaggcggaggttgcagtgagccaagatagtgctactgcactccagcctgggtgacagagcaagacttggtctcaaacagaaacaaaaacaaacaaactggcaattaattttgcatcaacttagtagttgtgtggttccgtcttcctcggacttctttttctcatttgcaagatggtacgtcagtctggatgacctttagggctctcgcagtttttgattctagtttagggctttgacttctgttctctagcagtcactgttaacattatttgagtatctgatgatagcttgtactaattttcccagaaaaatgcataaaacagaaattttgcatgcaatcccagggcttcatggactcattgaagcctagtgatagtcccaggtaaagaagctagttaaagaaagttagtatcctcacgtttctgtgaagattcaagcaagcatttcaaattgctccaaacgtgggcatcagaactttctgattattaaacaaagttgattgtttttattttctaacatatctacgttagaaatttggcattgataccagcacacttggagaaggcaaaaacacatgagttggtccactaaagacttcaatagcacttggaaagagatactcgtgtgtgttatgtatggcatgtcaagggaagttacctacatcccagctaccttgctttagaacaggaaaggaatgaactaaggtgcacttgcctgtctcaaccagtgaatcaagactgattgtttgtagttattttaatttatgaaaaattcaaaatttaatgctacagaaaagacaatgggcctagggaggactatgttaaagtcttgttcattttctagacccaacagagaatacttgaatgcacagaacaactgaggaaaatcatactttaagtaacaaatacaaactagaaattaattctttcataattaagactatttcaactattaattttcttccaatatacccctctactttttttagccatttatgggtcattctacattttcttaagttctaatatgatctggagaatgtcttggacttctttaaagtaacttcatgcatgtgctctcattagatcctttatttactaccttactttaatgttatacataatacataataaacatgtgaaattcattttaatgaatagtgtaagcctcaaaaaatttacttaaccacttctttgacctagcaaatttataagcgatagtaaaactttccttttacctttacaataatagcttttaagtactcaggctgacaaattcttcatggactcacttttatgtttttcaatttctattaatttctctgtattaaagttgaattagatggatttatgttgcctattcctggcattcatagcaactataaggcatgatcaagaaaacagaaattctaatcctcatgttacagaaatggccccaattctacttgacagaaatgatttcaattagggagtctctgggctaccttttctgtttcaccagaacaaatgttattgatataaggggaaatccttggataccatataacctgctcactctatggagcagagttacttagagtgctccgaatcccatctttgatctctggcgatatttttctctgttatgtcactgaggtcacctggctcatgtgtgacaaactgcctgcataagtcacagtgccagtggcagagatttgtaaccatgcccctggtccattgcctttgaattatttcacaggcccgctgctttacatttacactctgtcggaagatgaacaggggaagggagtaaaatcaagggcagggtctcatcctgaaggacaaggggaaacaggtggaaggttaatggccctggagcgattccacaagcctctcaggcttgatatatgggcctggggcctaaaacgggcattggctttcaaagatatattatttcatttgaggagagacattctggagttcctgcatttgtctgctgatagatgatcctctgtccacaattggttatggcgtgtgagttttccttgggcctgctcccatacataaaaattttgctgagctctccaaccttttgcatgcctttaggaatgggaccggtgcaagcccactggcaggctgttggatttttttgctgctattttagtagttccttttgaaccgtgaggcaagtggggaatgaaagacacttctgttcattcatacatgacttgataagggtggccttgttataaaaaaaaaaaatggtgaaagggatgttaggaatcaaacatatgtgtcattttgggaagacaggctcagtccaaaatttagtcatttgggtttcaaaaagttgcttacataaaagctagatactatcaaatagcttttgactttattactgttttgcactccccaggcttttagcaaatggcttactctatttttctttattatttccaaaaagtttgaggtgatttggagaaagaaggagaacagacagttggaaaaaggtgctttacacagagatccatgattaatttgcctaacaagaaccatcaggcaatgctaccaagaaatatgtctaatggctcaaatgttacaatcaaatagaactggtcactagattaatggaaccagtcacccgaattaaccttgtgtggcctctcaaagttgtactatagagtctaagactgcaaaaatcatttgcctcagcctcttaatgttcatagacttaatattcatgaaaatatttggattctaatatgctttgatttatagtattttgaaatttaattattaactctggtttgagatatatatatataaaatctttgattttatagttcctggtaattgtgatactagctttgtcagagagagaatgcttattttatggcaagcattaaggaaaaatgagctctgtaaactcactatctaaacaaaaggcgatttttctttccagctcttttgtgttccattacccttgtgtttggtgaattctcacaccactgtatgaaatatcaaaatcctatttgtggacattttatctcgaatagctttgtcaaaaacaaattcttcacctggagaaactttccattatcatcacagatacactggcatttaactacaagaagttaatattggacaaatgatcagataatatctgagtatcaataggaatttcattcttggatgagaggcaacaaattgcaaatacttttcacatatatttacaagggatccttatcacaatccctattcatattgccctcagtagaaacatgcagcatctggccattggcccctgttaataatgattacacagatgtccttttcttttcctctggaatattgcaaagtagaggttagaccagaagcaagaagactggagaggcatgtttagtacctgcaagaagatatttaataactttcttagaggaaagattcagaatcaccagttacattgagttgaatgaggagcattagccgtcaaaagaatctgtttttccacttgttgcttggataaatggataaaagcctgccaaggacttcagtccaccagctgagggtaccatagctaaaatactcccaacagaagggcaggtcccaaaccacacaggcatgcttttcaatcacagaataaaatgtagttgttttcgtcatttcagcttgtgacctaaatgcctcattttcatgtttgaaaagttaccaactttatttcagtcctatttcccttcctctgtggtatttcccagtcagtagaccacagtcctgtgggttatatcaatgcctaaagcagagatcaaatcaaagcataccacataactggttaaaatgaaagctcattccgaattagtaaataatgcccgcctgtcttccacatctgtcaaagtctcccagctcagatggacacctccataagctgatccataggaagccaaatacttgcaaacagcctcttaattgctcatttgcagttggacaaaatgctaaatgcagaaagacttcaaaggcaatggaatctgcattgaaaacaggatctcaatacacatagtcgcttattgttgcaaaattagaataacaaatgttcccagcatgaagccaacataaacttgcctgagtattattcaacctgaaacatagtctaccttttttttttttttaacagcaatagaagaggcatacttagcactctgtttgttattctatactgttcattttaatgatatatttaggtctccctgacactttgtatttttacgtgtaattacccatattaaaaaaaaaacaccactcattagtgttctgttctactgacttaattatgccccttaattaaatctcagctaacagggggtcaccgcagtgtcagtgggatttgtcactgtttgtcagcaggtgtctggttgcatctatttctggttttcgtatggtttgaatctatttaagaacttgctacaaccccgtcctcccctccacaccaaccccaaatgccagagacagcattctcattggagggaagaagcagtatctatttgacaggcaactgcttcccaaaagcttgtttgtaagaggaaatttttgttttcattactctagaaaaaatctcctgattaggggaaagatgcttaaaacagacttggataaaacagatgcactatttaaaagatgaataggtttacattctaaaaattatgatcatatttttgtatacaattctaaaagttccttgaagaacaaaaaatatattttgttgctgctgttatgagaagaacatcacattaggtgttttgcatcatctggccattggtgtctttgtacagagtactttgtatcaattatttggttcacgtttttcattttaagaatataaaacaaattacaaacatatgagtcaaaccgaaaaaaatgtcttttgtgtgactaatgtagggtcaataggaatttaattcttgaatgagaggcaacaaattacaaatacttattatttggaatgagtcttagtattaagacttatatgtcttcacatttcacattagaatgttttaaactcatgattttagtatattaattaagggagatataattcccatgtttctgtatataataggcatctaatgttgatctgaataattgattagtccagtcaggcttttataattagttgtcagcttttcagtgtaaagccctcaaaacacctgctgtgcatctacaaaggtcttacatatttattagtgtttttaacctaaaaaggcatgcaacctacctgaaaagcatttaattttttttctggaactaagatgacccttccaacatataccctaagaaactaaggctatatgtctctgagtttttcagtctagaagattttggactgaaattctgatttttaaaaatcataacacttatctttatttaaagataaaaatgtcacagtttttctatggaagtttttcagaactcatatttctaatagtaaggttaagcaagacaatgggttacagatatcaaactatcaacaatgtaaagtagttttgagacttcactgtcattattgtataagcaattttatttttctgggtttacctacaaatgtggtagtcacagaagaagaaaaataatttaaagaaaaatttataatactcagcttatttatttctgaaattcaaatcaattcatttcatcctaaaaagttaactccaactggcttttcttaagtaacaaatgtcatcatttgctgtccaagtaattttcaatacaatgctcatttgatgttgcctctaaagttcttatcacacaagtaataagtaatccatacattacatatatgtgtacattttaaaaaccatttcaaatggtgagataagaatttttatgcattttatggattcctgtacagcctcctcattgtcattagataatgaaaggcttcgccatgtgtgtatcgtaaagacctactaagcaatatgaactctccagattgctttacatttacacagttgaagtatatatatatacagtattgtacagtattgtacagcaatattgtatagcaatgtacagtattgctgggcacagtggctcatgcctgtaactccaacactttgggaggctgaggcaggtggatcacctgaggccgggagttcaagaccagcatgacaaacatggagaaaccccgtctctactaaaatacaacattagccgggcatggtggctcatgcctgtaatcccagctacttgggaggctgaggcaggagaatcgcttgaacctgggaggtggaggttgcagtgagctgagattacaccattgcattccagcctgggcaacaagagcgaaactccatctcaaaataataataataataataataataataataataataataaagtacagtttaaataccatagggtaggtcagatattcttaagattccttctttcattcagtaaatacttatcaagtattagtcgtatgccaggtaacattataggacttagagattcaacatgaagagcatagacaaaaatccctgcttttgaggatcatatttatatctattttagtgactaagagcatttatttaagacaattgcactcatgtaattaaaaagcacttataatctggcaagctagcctaatcttagcaatggaatgtttctgctctctttctgtttaagccttcaggagatcataccagttttcccaactggcatatggtgagttcaagtacatttcccacatatgctcagggattatcttaattgtattcctttctgaagcttggaatcaagggaaaaaaagaacaataatgatttagggaaaaataatagttttttaaaggtagatttatagttagtaactttatataggtgaactgatcacagagaagggtgtaaatcatctgaataaacaatggattttcacacttactagaatctctaagaataatattttccatattacagctaaatgagacccattatgtatgctttcagataaactcacaaagctcttacccatgtaaatctcatagatctgccattattcgtaatgaataacaagttttatcatgcattttcattaaaaatgcattaatccctttgtagtaacctctccctaattcattgattcgataatacaagaacagtaaacatttctggcataacaaaaatgtggtatcaaagcatactgtatccataaatacaaaatgtaacaggaaaacaaatacatttatcaaaggaggatcaggttttccagccactaaataatgctatggtcgaatactgctacagtctaatacattaagaactcaatcatagtgccgcattgtgagccgtttgtaccggatctgattcttccagattaaatgacttgttgaaacttgaagatgaaagacaggcagaagtatccggggctctaccctcaggaggctccagggtgggttactgccagtgggggactaatgcttccgtctagtggagataggaggaggaggatcagaagtgacatgtatgtacccttttttacttgtagattatttacttagctcgttttaggctctgtgtcctcatctgtaaaacatggcattacctctttcaggtattttactggggattaaatgacttaacacaaattaagtccttggtagatagtatatattcaagaaaagtcaatttcctccttcctttattgatgcttaaaagcccctggtgctgtatttgattgattcaacaaatacttgggcttggcacaaggcactggctatacagttacttccctcttatcatcaccatagaagcctcctgatgtggaaattaggcaggccttggagtcacacttggcttcaaatccccttccatttgcttcccataagctcagcatgtaacttcactgtccttctctaaaaataggggtaatgtataacttacgtggttatctaaaaaattaaatatttgtagagtgcagtgtgctagaatatctggatacagagagatggattagagatggtgtctagagcacaacagaatgaagacctatctcaaaaaaaaaaaaaaagaaaagaaagaaagaaatggtctctacccttaaagagggggatacacatgtacaaaactgtgaatcccaatgcgatttttgtggggaatgtgttcgaatgctgttcctgaacatatatctcagcatttccaaaacaaaaattacatttcagaaactcagtagataagaaacatctgcaaaagaccgacacaatttatcttcaaactaacaaatgtgttgatctatgtgcatttgatatctctatacttatataggatgctaggagacaattgttttaagtctgtgtggtgctcattttctttgcgcctaatgtaagagctgtttggtccatagtcacctctgtccattctagaatagagggtggtgagatggggggtggtgtttttactcgtgagtcgtttggagattatcaggctaactacgtgataaaagatgctgaaacactggtttgagttagggtggagaaaatgtgaccaactcccagagtccagtatgattcacttactgttgttaagactttctgccttcctttaattactatgtcaaacaagccttatttatgccaaacaattaagtctattattaatggagaggtaagagggtggggagagaatgagttccggaaactttttttttttattttgagagggagttttgctcttgttgcccaggctggagtgcagtggcacaatctcagctcaccgcaacctctgcctcctgggttcaagctattctcctgcctcagcttcccgagtagctgggattacaggcatgcgccaccatacccagctaattttgtatttttattagagacggggtttctccatgttggtcaggctggtcttgaactgccaacctcaggtgatcctcccacctcagcactccaaagtgctgggattgcaggcatgagccattgcgccggcctgacttctggaaacttttttagaaataaaagactcagctaatagactacgatatgttgagtgcagtgatagaagttccctaaggagagtaaaatctcaacaaatgtgagtcctctttttctctgcaatcctgacctgtgctaaaattggggacaaggccgggcaaggtggctcacgcctctaattccagcactttgggcggccaaggcggctagatcaactgaggtacggagttcaagactagcctgacctacatggtgaaaccccttctctactaaaaatacaaaaattagctgggaatggtgacacatgcctgtaatcccagctactcaggaggctgaggcaggaaaatcacttgaacctgggaggtggaggttgccatgagccgagatggtgccactgcactccagcctgggatatagaatgagactcctcaaaaataaaaataaaaaattggggacaatatcgggtagacaaattttagtttctaaagtagctgaagggtctttgttcaggtggtttctgcctttcagctttgacctttatctgccttgttgcagcccatgcatactcttcctcttccaatattcatacatccacaaatgtccctctcccttcaacacatacacccttcttcaccaacacacacacacacacacacacacacccttcctcttaaagcttattctcaagaaaggtttaagtttgtcctttcagttcaatagccatctttcctcatggagtttgtcaggtcccttcttttgtaattctcctacttgtactctccatccactttatttccctttttttttgagacggagtctcactctgtctcccatgctggagtacggtggtgtgatcttggctcactgcaacctccgcctcctgggttcaggccattctcctgcctcagcctcctaagtagctgggactacaggcacgcaccaccacacctggctaatttttttgtattttcagtagagacagagtttcaccgtgttagctaggatggtcgcgatctcttgacctcgtgatctgcctgcctcggcctctcaaagtgctgggattacaggagtgagccaccgcgcccggctttatttcccttttatctgttctttcatcccttagtcacattttattttttttatttttatttttatatattttttgagatagagtcttgctctgtctcccaggctggagtgcaatggtgtgatctcggatcactgcaacctccgcctcctgggttcaagcaattctcccacctcagcctcctgagtagctgggactacaggcacccaccatcatgctcagctaatttttatatttttgaagagatggagtttcaccatgttggccaggccagtcttgaactcctgatcgtaggtgatctgcccacctgggcctcacaaaatgctgggattacacgtatgaaccaccatgcccggccccttgctaacattttaattttgtttgtttattgtaattagagatggagtctcacgtgtggcccaggctggtcttgaactcctagcctcaagcagtcctcccacattggtttcccaaagtgttggcattagaggcgtgagccatggtgcccagccccttgtttttttttgttgttgttgtttttgtttttgtttttttattgaaacaataaaaaactcctctccatctcatcccacttgctcttgttgcccaggctggagtgcagtcgcgcgatcctggctcactgcaacctccacctcccgggttcaagtgattctcctgcctccgcctcctgagtagctgggattacaggcatgtgccaccacgcccagttaattttgtatttttagtagtgacagggtttctccatgttgctcaggctggtcttgaactcccgacctcaggtgatctgcccacgtcggcctcccaaagtgctgggattacaggcgtgagccaccatgcctgaccgcccagccccttgttatttaaatctttcctcttccactggctctcatcagtccacatgaatgtgcaaagctcccctcctgaaaatagaacaccacattacatgggtctccctgtctgtcaccgtcctaccttttctcatcatgacacctttgcccttttctccacctcttctttttggtgttaacacagccaatactgtaggactgcagtgctaaagccgggcagcaagctcactgcatttgcacttctccatgggaaatgcctcttgtgaatcttaaacatcatcaaggagcttagccacatcttctcagccctcatcctctctccccattttaatccttggccatccttgaaattccttctggcccagacttcttggtcactactcagtactcctctctgagtgcaccttgctaggtttcttcactagctcctctccctctacccaatcttaaacaatatttttttctagttttctcttattggtttccttactttctcatccacacattcttagtgatttctcccacaaacacaattatgccatactttctctcgcaaactccacagcagcatcgtgaattgcttgctgaaacataaatgatcatcacctccaataagcctcatttagttctgcaactttgggttttgttttgttttgtttgttttgttttttgagacagagtcttgcactgtcacccaggctggagtgcagtggcaccatctcggctcactgcaacctccacctcctgagttcaagagattctcatgttacagcctcccgagtagagactgggtttcgccactttgggcagactggtctcgaactcctgtcctcaagtgatccgcctcagcctcccaaaatgctgggattacaagcatgagccaccacacctggcctgcaactttgtacaactttctttctttcttttgagaaggaatcacactctgtcgcccaggatggagtgcagtggcaccacctcggctcactgcagcctgcgcccccaggttcaagctactcttgtgcctcagcctcctgagtagctgagactataggcgtgtgccaccaagcccagctacttcttgtatttttagtagagatggggttttgccatgttgcccaggctggtcttgaactcctgggctcaagggatccatcctcctcagcctcccaaagtgctgggattacaggcgtgagccactgcacctggccctgtttctttcttgcactgtcaaacaacacattctctgcagttattatcctgggttgtctggtttgatcatatcactcacaactttctattgcatatgcagaaaaaattagaattcctcaaccaggtatctcatcatcactgtcttcctctccatctcgtctcacctgccaaactcaaagccattgatttgactagtctaaatgtaggcctggacgtatttgacatggggactatttgaaatggggactatttgaaatggggactatctggcaaaatctgggatgggatgtaagatgatcgcaattgcacactcactcctagcctggtttctgttagttatatgtctaccccctcaactctttccaacctctttcttgtcactgtttcctctcacaaactctagcacagagttttgaatttggtagttacaccacaaaatttttaacttgtcagaaattcatttatgattatatgcaaatgacttgtgttgatttaaagcagtagttcccacaccttttggtctcaggacgctttgcacttctgaaaatgaggactatggagacctttagtttatataatgtattgggagttaaaaacagagatatggttacaaatcaagcatccacaaatacacattccatttgtcaccagagtgatgatgtcattacatcctgtagcctctgcacactcctgacaagtggagggtgaaaagggcaaataacatcttggtgtaattggaaaaatagttgtaacctcttgactccctggaccatactcgtaaagccactgatttaaatattatcactcctatgggtgtctactctttcattgggattaaagattgatgccaaatgaatacattttccaaccttgaattttcaaatcagtaagtaagatcagggacatccaggggaacaaaaacccttctcagtgtcctgggatttctctcccagtggctgtgagactgtactcctggaggtagggggcatcagtgagaccagggccagtttgaggacagcacagatgtctctaggtaactgacaaacagacacaggtttccctgagtgtcagcctctgccccctccctaacacacactcacattcacgtacacaataaatcaccctggagtgcgatggaaattccaagaacttcagcattgtcttaacctgtgttctggtgccatcctgagccttgaccacattgactggcttttaaagtaggtgccattgcattcattcttctgagatcaatatccctctgggtctccccagcagctatggtctttctgcttggccccaagacaattaagagaattaatggggagaccatgtccaaataaaagactggagttattgctttaacgtgcagcaactccagtatttgcattaaattattatttgctttgtaatatttgatcaagctagggttagggactagactgacttttatagaagagtgatgcactctaacagtgactactatttattgagctcaagccttaagttctattcatttattagctcactaaacccttacaacaaggggagtggggagggtcaatattaattagaatttgactgcagccagaataaactaaagctcagggggtttagttatttgcccgagttcacactgatctgctggccactggtggagcctgtttctgtaccagacctgtctgattttgcacctccttaccctttgctctctttcttttttttttttttttttgagacagagtcttgctctgtcacccaggtgggagtgcagtggcgtgatctcggctcactgcaacctctacctcccaggttcaagcgattctcctgcctcagcctcctgagtagctgggactacaggtgtacactaccatgcccagctaatttttgtatttttaatagagatcgggtttcaccatgttggtgaggatggtcttgatctcctgacctcgtgatccactcgcctcagcctcccgaagtgctgggattacaggcgtgagccactgcacctggccccctttgccatcttagttattgttctcatcccatattcctgtgtctaacattttggtgtgtgagtgtgtgtggaggactgatgtgcacatgtggagtggggagcattggtttgctagaattttctagagctttttattcaaagtgcggtacatgaaccaccagcattggtttcattagtcagcttgttagacatgtagaatcacagtcccccgaactgctggatcactgtgtattttaacaggacccccaggtgaactctaagtgtgttcaagtttgagaaacatggatcttgagcacagttgtatctctctgaacttttttgagagaattaagtgaagccattagtagggtttcctgcatagacacatattcaacacctttagtaaaaaacaaaaagcccgcttcttaaaagaatatgctttactttgaaagtttgcatttatgctatcttgtctatttaatgctatataatttcagacataatatagtaactctacaagacctccttccctgtataaaaagacgcactataagtttttgtagtcatctttgaggtctgtctgtagtgtgctttattaaaagcgagcaaatactgaaggatcccatttaagtatgtggtctgcggtggagtctaatttgtaccactaggcaaaggtcacacagaggagctcgttaatgcacttactccgggatgaaatcaatctccatacttcaccatattgatctgatagctcattggcgcttccctccgtgaactggttagctcacgtgtgaatggagagagatagatagctttctgggcctgagaattctagctggggtgccatccagggcaaaaggtggatgtttttacatcctcatttgggtggcccttttggtttctggtgttaggctcttgtgctggtatatcagttagtcagaaaaaaaaaaggttttaaaataaataagttgcttttctaccatgggtttattctttttcttctgtagtttttatgaatcatgtgtgctcaaaagtatggatcacatttatctgaatacaggcagatgacttgctttaaagtgtaacattgatattactaaaagacaggtcttttttttttttttttttttttttttttgagatggagtctcactctctcgcccaggctggagtgcagtggcacaatcttggctcactgcaacctccgcctcccaggttcaagcgattctcctgcctcagcctcctgagtagctgggattacaggcacatgccaccacacccagctaatttttgtattttgtatttttagtacaattagacttgtagttttagggatttcaccatgttggtcaggctggtcttgaacacctgaccttgtgatccacccatctcagcctcccaaagtgctgggattacaggcatgagccaccacacccggccaacataggtcatttcttaatgaaaagataacctgctcagtgcaatcttcaggactcaggagtctcccctatgttcctttttgtcaaaactcaatgctattgatgtatatatgtggtcatttaattgcagaaacaccaaggaagtagggcttggtgaatccggctcataaaacacacacatgggtactaattccttgaagaaatgggccaaaataattctagaaatgaggtagaaacaagccaacaagccaaatatttccaatttttaaaagatgtatagattccagatgcaaactggataaaagcagactcagatcccttctaactttgagacacggttttccagagaaactatgaatattgagaaaacagcagcctccaaagccgccaagacttgatattttcattacgcttggttacaagctcgttgaaaagtgtttccggttcatccttgaatctcttccaatctaagcacaatgctgtgcacatgagcaggtggctttgtagtctatagactcctcctagacttccttttcctagattttaagtcaaattttgcctcgaggaagagtttgaagctcgagtctgaggcaagtatctagcccaaactttcgcaaaattgaattaacctcattctttggatgggtatttctaaatttttaaaaatttcttggccgggcacagtggcccacgcctgtaatcccagcactttgggaggctgaggcgggcggatcacgaggttaggagttcaagaccagcctggccaatatggtgaaactccgtctctactaaaaatacaaaaataaaaatacaaaaatttgctggttgtggtggcacatgcctgtagtcccagctactcaggaggccgaggcaggagaatcacttgaacccgggaggcggaggttgcagtgaaccaagatcacgccactgcactccagcctgggcaacagagtgagacgctgtctcaaaaaaaaaattggtttttttttttctttttttggagacagagtgttgatctgttgcccaggctggagtgcagtgacgccatctctgttcactgcaacctttaagcaaggggtttaagtgagtctcgtgtctcagcctccagaatagctggggttacaggcgcgggctaccacacctgcctgatttttgtgtttttagtagagatggagtttcaccatgttgcccaggctggtcttgaactgctggactcaagcagtccattttttgcaacctccgaaagtactaggattacagatgtgagccaccacgcccagcctggatgggtatttctaaaatacacatctattaaatgccacttttttttttttttttttttttttttgagaaggagtctcgctctgtcgcccaggctggagtgcagtggttcgatctcggctcactgcaagctctgcctcctgggttcatgccattctcctgcctcagcctcccgagtagctgggactacaggcacctgccaccacgcctgacttattttttgtatttttagtagagacggggtttcgctgtgctagccaggatggtgtcgatctcctgaccttgtgatctgcccgcctcggcctcccaaagtgctgggattacaggcgtgagccaccgcgcctggccaaatgccactttgaatgtcaaaatatgactgttcttcagatgaaaaaatagcctttttagacaccaggcaccaaaataactttcagaaaaagtagtgttcttctagagttctcatagatagaaaagaacataaaggaatatgttaaacataacaagaagactggacatatttgtaagattccaaatcttaggatataattctgtccccagcctttgtgaagacagatggtcacaatgaggaagagggtatagtttacccttcaatcaggctccatctgacctcctttttaataaaaagaaaaaaaaaaaaaagatctcactgtttcccgggctggagtgcagtggtatactcatagctcactgcatcctcaaactcctatcctcaagcaaccctcccacatcagcctcctgagtagctgggactataggcatgtgccatcatgcctggctgagctctttttgagtaattgaaatagcaatgagatgcccagagtcctcagtttgaactgctgtgttcagcctagtgagaaatgcataggcacttcagataaagtggcatgagacttcagggaacaaatatagaacaatgctgcacaaattcacctgaccttgagcacctggctggatgtccattggtgaatgttgttagatactgtctcctacgaatgggttatgattactacttggtatcttctaagtaaaagtccttaaccatcaccaagtaatatattttttttttgagatggagtctcacactctcgcccaggctggagtgcagtggtgccatctcagctcactccaagctccacctcctgggttcacgccatcctcctgcctcagcctcccgagtagctgggactacaggcacccgccaccatgcccagctaattttttgtatttttagtagagacagggttttaccacgttagccaggatggtgtcgatctcctgaccttgtgatctgcccgccttggcctcccaaagtgctgggattacaggtgtgagcccccgcgcccggccagcaagtaatattttttaaaaaattttttggcagtgaaaagtctaatgagacataaagaaataataggaaaagtactactagatgggcctgaaaatgctttggttctctaacttgtgtgtaatggccaacatcattaagacaaggacatgtgacagactaattttgaaaatttattctcatgttactgcatttttgttattctagttatcaatctacacccataccacaatgctgctttattttgtttgtttgtttgtttgtttttgaggtggagtctgtcacccaggctggagtgcactatcttagctcatggcaacctctgcctctggggttcaagtgattctcctgcctcagcctcctgagtagccaggactacaggtgtgcgccaccatgcctgactaatttttgtattttgaatagagatggggtttcaccatgttggccaggctggtcttgaactcctgacctcaggtgatctacctatgtcagcctcccaaagtgctgagattacaggcgtgagccactgtgcctggcctgtgctgccttcctgacactcaaacacaacagggtatgagttgtatgatcagctatggaaaacagactgtggtatgtatgtatgactgatatgtggtaacaacccttctctaggcctgtatctgtctacacaagcagaaactgttggtcagttcaattaaaaaattaactgatttaatgagttggctgaattaccttattgtttgacatgagtcaaccagcccactccagcaaaacagccaaccaactcagtcactctgtagaagcagcgtgtcattgaacaaccaaacacacagtacatcgtgcacagcataacgatgcttcataaatgatggactgcatatatgatggtggtcccaacatattataataatgtatttttactgcccattttctagtaacacaaatacttaccattataagtattgcagtgtagaatagtaacatgctgtacaggtttgtagcccaggagcgatagactattccatatagcctaggttcatggtaggtgctaccatctaggtttgtgtaggttcactctctgctgttcacacaaggatgaaatcacctaatgatgcatttctcagaacatgtccccatcattaagcgaagcatgacctgcatgcatgagtaattatgtgtgtgagaagccatgagaatacctctagaaacacaattcttctttctctgaaaaatgctttccctcaaagaacagtgcatgctcatggaaaatgtaaacgatttctttctataaatatcaaacccattttctctgtgattcatatttcaaataaaacacacacaagatcaacacttaaattgggtattatttctttttttaaaataaacctttgtcagaatattatttcttctttttttctttttattgccactcctcctctccagaatattattcctactgtgtgaaatccaaaggcaatgggaagggatacagttctgtctctctcccttcttacaagggagacaaaagaactcccttcgtcactcacctctgttagaaatgcattcctttaatacaaagagtatttctcccattttatgatgagaataattgggaaaaagaaattcaatactttatctttcacttctcagccacctttggggaacttatattttgtatatcaggatggctgtgctatgcataacttcttacagatcttgatatgctatctttcatcattatattcagatataaacccaatagttgtagagattactaacagtgagtaaaggaaaggctatctagaaatatggaagacataaagggattgtcttgggactgacctacagagtccttgcctcatggggacagattcaacagggcaatgctgacgtcttaggaagggagtgtgtaggcggtgtgtatgttgggtgggaatgggaaaggcagtatagtatcatagcctgcatattcttctcctttaatctagaataggaagaatatgaaagtagaggtaataagaaatatgccataagacacaccctcttcagacagtgcaaaagagctaggtgtggttttgctaaaaatctagctaatgtgattctgatttcaaaatcattaccttgcagcttgtgtagaatgttttcccctgtttaactggccaggacaaggaaactaaaatatttgtcaaaacttgtgccttacaatgttgtaaatgatgtttccatgtccctccttttgagatttaagctatctagtgggagtgggtgcccatactccaccctgccgagctgtaagcaattgtaagaggggccactgacaacttcacctctgagtcttctgggactgagacccagaataaatgctaggcctcagttcatctcccaaacagaatcactttctcttgtttttcccccaaatcggaaggagtgtctatctagattttatgtccagataattccaaggttctatcatttggtatctatggttttgtattttgtaaacttccaaaggacttcatttcccaaatcacaaatttctttacatttgaaatagagaaatcaaattatcattaatgtatttctttgcaggaaagaaactgggcaatattatattttaaaaaaataacttacagaaaaaaataggaagattgttctttactcttatatgaaagaggcatagtgaaagagcactgggcttggattcagaacacctggattcccatcctgtttctggcacctgagtagccttatataaaccacagcccacctagcctgagtttcctcttctataaaatgatgtagttgaacgaaatgtagctatcagatactttcagcattgattcagcaaatattaattaagcacctgcggtgagcctagtaccagggtgtgattcagcatgtaacaggatgggggtgtccccagtccaggtaatgaaagggtagaccattcacagtgtcaaagacagaaaactagataggacctattactcttagcatgctatgtttagggcactggcataaatatttcccactaaatattctacactatctagaaatttttaacaaagcaaaaattgttgtttacctagacttaatctttctgtagtttagggccaaacttcgactgttggagctccatcttcaattgctactactttctatgaatccatttctgggaatctctgaaggcatagactgactgtacacttagcactgtgacattaaggggacatttaaattgtgtgaagggacaagtcctctacttgtccctggggaactgagcagaggaattctcccaggagcctttgtacccagagaattcccatcactgaacagtccttagggacctctcctttacctctgccctaatttcggttgtacttttggtgagtaatatttaggccactcgaattcttttctcctttctttggccaactgcctgatggaagcagccagccaaaaaggacccaaggacattttagcctctataagcctttttttttttttcctggctttgtaaagcaacctatgaaggaagaagttgcattaaatgacctcaagggagccacggagcatgccctctggaatatccctcaccttctccctttcttcttaatcctactatgccaaggaccttcattgtgcatctattttacaagctggagggcaaccaaaatcttccttaatttatgccataatcactgatatccagatgatgggtctgctgcacacctggatttcttttattttattttattttttgagatggaatcttgctctgtcgcccgggctggagtgcagtggcgctatctcagctcactgcaacctctgcctcccaggttcaagtgattctcctgcctcagcctcccaaatagctgggactacaggcacgtgccaccatgcccggctaatttttgtatttttagtagagacggagtttcaccgtgttagccaggatgatcctgatctcctgacctcgtgatccacccacctcggcctcccaaagtgctgagattacaggcatgagccaccgcgcctggccacacctggaattcttttttggctgatggcattgttgcctttaaggcggtgtctggaaaatgagaattacaaacataacctcattatgctattagaaaaatgaccatcatattcacaactgccttcttgacattccaagcaacccagaggaaaatatatcaagctgagaaggattctgtttttattacttgaatattatctgccaggttagacatgtgagaacattgctttaattatacataagagatttctaaactggagaacaggaaacaggtagtggtcataaatgaaacaatacccagaaagagaaggcactggaaaatatttctcattaatctactttaaaatatttcttttctagttcatgaacattttgcatcacctgaaatattttccttcgtacttcatttagcatctttcatattttgcctttatttatttatttatttggatttcagtttaagtatttttaacaggatgtctgctatgtggtgtttttaatagggtgtctgttaagttttagttctttgcccaaagttacctggttagtgagaataccaagatgggtgcccaggtctctgagctccaaagctatgcatttccttatagtgtttagcagccctggcatctgctataatggagcctaaaatatatgcattctctccatgtctgtgttgtcttggtttatctttgtaataaaacagaccattagaaagttgtgctctaggaccaaatcgtcttggctcttcttaacattgccatcagcgtacactgagggcattcaaaagaacactctctgtgaggctaaatattgtatctactgtggggatattgttagagccctgtttacataatctggaattctctgtcttggaaaaacccacaaattttgctcaggagtccagtagtaggagaagatgttttgcaaaaaagtgctttgattgttatctcatgtacaaaaagaaatcatgtcagtaatgggctctggctacaaggaaccaaattgtggctcatttccaacaactgaaacaacccttatggagcttattttggggctgatcctgatccttggctttgacttattttcctgcctttatttccctttatcctcatgtcttcatttatcccattcatcttatatgtgagtttattcatctcacatgtaaactgcttccaaatcttttcttaaggatgtgacattatccatatctatatatgcatacatacagatatttactgttgaattattgattccacagagtgtaatactttgtatgcttcctgatgcactaagtattttgcagggctatgtcttgttggtccaattcatttataagttccttgaggataacaactaggtgttatattcattcaagtcttgagagtccccagcactaatatatgttgttcgctttattgttgattggagtatatccacaatctgagaagataaatgattcctaggttaaacatgcccttgtacaaatcatcctttttcataccagtgtcaaaaaatcaggggctaggtaggctatgaagtttgtcaatacacgaattgctatgttctttactttgcaacttcatgaaagagtcaccctactgcactagctgaatcatcatgttgagcacaactcttaagggaagtatgggaaagctaacccaggagtggcagagacctccttttcctcctctatcttaacatgtgtacatgctttgactttgaagcaatggaatgtgattgattccataagccactttcaaaaatagtcccattacctgttagtgctcaccttaatcagatcatataaattatatgtggctatatatggaaacttaagaaacagaaaagtctaccaggactgcggtgacaaaattcctgagtccccagatatgatgaacttatcattagtttgtaattaattgatatttcaacaagaagctttttgaaacgtggttaagaggaagaataaaagctggccaaactttgtcctttggtttgataaattctgagaatgtagctataattctatgcaaaagaagcagactaagttacattatataccctggtgattatatgtttcttcacagtgctgtttaacatttacatacaatactgtaaacctcaaagatgtcactcacttatgtaattacctcacagttatataaatgaaaaacctgacatttaataagtgacactagcatatctttatataaagtagtgttacatttaacatccctggggactaggtatatcgtgtataccatgcggatggatgttctggatgaatgaaacttaactttggaaacattgcactttgaaagaatttttaaaatttttgataaagactctctaatacaaatcgcaccattccatgactttttaaacagaggatttgataagcctgttcccaatgacttgtcatggttgtgaatgctcactgttggaccctaggttacagagtggtttctttagcggttcctgaagtctaggcctctgacttcctgtactgagtgactctggattgagctgttcaagaagcagaggaccagcctgttttgctttctgtctaccccttctgctgacagctatcatgttcatttcccaactgctgtgctattcgttcactttacacctaaacatgtgaacgttgggcaggaccgaggaggccctgcttccatggagattaaggatgtcagcagaatgacagccactaaactccacccctacctctgctttacttccaattttacttccctttactcccattcccaatttatgaagttcccaaaatctggccccaagacaatgaaagcttattttgtacaatttaattttcagtctatatgcactcaagttttgaaccgcttactctaagaattttgcacaatccaaatccattaatgcaggttaacatattacaaaaggttacatgaatataggaatgatagtatgggatggagttgatcagggaagacttcctgaaggaggcgccttttagaatggtttctcaatgcattgatggatattttaggtaaggtataatgctatatgccttgttgctaggaccatgaactcttcagatattggctctgctgcttatttgctgtgtgacatttggaaagttacttaacttttctacctcagtttcctcattggtaaaatgaggattataataagttctgcttcattgagttgttgtgaagattaaatgagttcatgcatgtaaaactctttttttttttttttttttgagttggagtctcactctgtcacccaggctggagtgcaatggagtggtctcggctcactgcaacctctgcttcccaggttcaagcaattctcctgcctcagcctcccaagtagctgggattacaggcacatgccaccacgctgggctaattttttgtatttttggtagagaggggatttcaccatgttggccaggccggtctcaaactcctgacctgatccacccgccttggcctcccaaagtgctgtaattacggatgtgagccaccgtgcctggcctgcatgtaaagcttttaggacagtgcctgagagtacaatgtaagggtttcccaatagtggtagtagaagtaacaagtcataagaaagatgcctacagcaaagaggcaatgcttaccaaagaactaggatgtaataagagctgaagttgacatgggaaaggacatttaaagaaaaacttctccatctttttcattatatggctcatatttaaaaaataatatttacatgtcacagcagtatcaacaaagcgggttgctcgcagtctgaggcaactgccctcagtttctggctgctgcaggccaacctaggctagaggagaaggaggcatacggataatctattcccagcatatactgattagggagatctggtttagtgaagattttcgaagagaagtctagggaatttggaagaggtgattgtccaaaggaacagtgtgaccaaaacagatagttgtagtaactgtatatgataaaacagaacaagagggagaagtatggagatggtgtaggtccagattctgggggactattgggcgtgacgtacatgggagatgaaatgaatgaaaactggggtttggtgggaatagaaaagagagagtccagatctggcaaaaggaggttagggggaggtcctttgtgctgcattggagaaacatggaaaggggccagcatagctcagttatccaaggaagtgttgatagataggactttgtattatggaacagcagcagcacaattagaaagcacattggaatcacccccagttatctctgggcagggaagaacttctggttataaatctattgagtattgcaacaattgactagggcgttttactggctcttagttctcttgtacagtagtgtttttagtgcttgtttaatcattgttaatgtgaaatcattttttcttggactttgtagcagtttattatagaggttgcagataatcatcagtgttctttatgaaaacagtaaaggattaatgcagttgtgtgtctgtcctgcccagagcaggttctcattaagatatggtaagttgattttgatttgtttgggttttaatttttctctcccctcttcagaacaaacttctataaatgtcatcattgttacaaaaagagatggaaattcatctttagggatttttttttctttttgccagaaagaaaaaaagaaggaataatagctggacttaatttgtaatgattctgaagcatcttcaaaatcattttctttccttttctatttattttttttgagacagagtctcactccgtcacccaggctggagcgcagtggcgcgatctcggctcactgcaacctccgccttccgggttcaagcaattctcctgtctcagcctcccgagtagctggaattacaggcacgtgccactatgtctggctaatttttgtatttttagtagagatggaatttcaccatgttggccaggctggtctcgaattcccgacctcaagtagtctgcctgcctcggcctcccaaaatgctggcattacaggcgtgaaccaccatgcctggcctttttttacttttttgagacagggttttgctctgttgcgcagactgagtgcagtggcatggtcatggcttactgcaatctttacctgctgggctcaagtgatcctccagcctcagcctcctgagtagcttgaaccatatgcgtgtgccaccatgcctggctttttattttatttttttgtagagataggatcttactatgttgcccaggttggtcttgaattcctggatgcaagtgatcctcctatctcagcctcccaaattgttgggattacaggcatgtgggccaccttgcccagcctcatttttttccctacattatactttgttccaagagcattctaacaggaaacactgagagagaaaaaaaaagtgattctacaagttaaaacctgcttcagcacatccttctctgaccccctaggaagcctccccaagaaatggaatggtataaactactcccgttttccttgtgcatatggcattataataatggattcacacttctgtctcctctcattggagtgtgagtttcatgaaggcagggattgtattttaataatctgttttccctcaagtttctaacacaagacctgacacaccaaaattaacgatcagaaataagaaattagttcatatctacttaaaactaccagtccatattgtagaatgttttctttaaaaatctctttcttaaagtttaatcactggccaggctccgggggtcatacccatagtcccagcactttggaacaccaaggcaggaggataccttgagtctaggagttcaaaaccagtctgggcaacatagtgagaactcgtctctacaaaaaagaaaaaaaattagccggcatggtggtgagttctggtggtcctagctactcaagaggctgagatgggagaattgcttgagcccaggaggtcaaggatctatgacgtcaattttaaaaagcctctgcaataaggaaagtaaaataacagctcacttgctggactattaaaagggaaatgggagggggccgcaaaaaggttttgataggctaaatgtgggcttgacaaagatctacacatttttcttctaattgttggccagattcactcttctttttttttttgagacagagtcttgctgtgtggcccaggctggagggcagtggtgccatctcggctcattgcaacctctgcctcctgggttccagtgattctcctgcctcagcctcctaaatagctgggattacaggcacccgccaccatgcccacctaattttttgtatttttagtagagacggggtttcactatgttggccaggctggtctcgaactcctgaccttgtgatctgcctgccttggcctcccaaagtgctgggattacaggcgtgagccaccatgcccggcctagattcactcttcttatgaaaaagtacaagtttctaatgattaactttctgggttatgggaagttgtgcttcataacaatatgggacttgtattcctttacactctcatctataatatcaatataaatagtttctctgataagtaactaggtttctgagataagcccttccttttattgtagctgataacacacgattatatgaggtggtattgctaaccactagtgagaggttttgctatataatgtggaacttaaacttctttggtcttcttcccagaactgcctagatgccactctaaattgtttattgacagcattaatacctggagaatttgcttaaaagaagtagattatttttctccccttcctttttctacccacacccccataactctgtttttcttaaaaaacaaaaaatcttcaaaattgtcaacattgctcaattgttgagaacaagggaacaagccaggcatcacatttaccctattttttttattcatagagctgcgtaaaaactatgttatccaaagcaccatgaagctgcacactcaccaatttcaagataatataaaataccacataatcaattatggaaaataatgaaatggaatgttggcatagaaaacctcctcggagagtattaaaacaaggaatcaattgctcgagtggcgggggcggcgttgggtgttaaaattaacaatcagtcaagtctttaccaagggccagctgtgggtgcagacctgcagggcacgtgtgagaagggtcagatgcaagttgctgaggtagtcactgccctgtaaagattgtcattaattctacaaacaaacaatgaaagagttgtttgcttatgttgtgggctagatgcacaagatacacagaaaactgcagaagtgaaagtaattcagtcatttgttccttcatttagcaagcatttattaagtggctttttttttttttgccaggcaccagggaagacacttgggagctgtagcttcagaatccgtccctgccctcagggaaggcagaacaataagcaaacaatcataatactttgcgaaagcagggagattataggagatgccgtgttagacacaaaggaagacaggataatgtgaacagcacagaatacaaaacaaaaatgaagtactaattacagaaaacagacaggctcaatttcacctattcctgcaatttttagagaagcagaggaacagaggatatgcagattttgaagtgtgtcctcagcatcctaaaagaaaagaaatctaggaaaagtcagactgttttttgcttgttttgagacagagtcttgttctgtcacccaggctgaagtgcagtgacacgatctcggctcactgcaacctctgccctctgggttcaagcaattctcctgtctcagcctcccgagtagctgggattacaggcgcctgccaccagacctggctagttttttaagagacggggtttcaccatgttggccagactggtcttgaattcctggcctcaagggatccgccagcctcggcctcccaaagtgctgggattacaggcataagacatggcacccggcctcagattgttgtcttacaattttagtatggcttaattgtggcaaggtcttgttaccgtaactatttctgtcaagttatatatgaaggacaggaaccatcaaatgcaaatgaagaggaagaccccttgatgagatggctctagaagacatacgtgtgtgtgtgtgtgtgtgtgtgtgtgtgtgtgtcagggtcttgctctgtcacccagcctggaatgcagtggcacagtcatgtcttacttcagcctcaacctcctgggttcaagcagtcctcccacctcagcctccggagtagcaggtgtgtgccaccacacttagctaatttttacatttttttgtaatctccctatgttgcccagtctggtcttgaactcctgcactcaagtgatcctcccacctcggcctcccaaagtgttgggattatggctgtgagccaccacacctggctgacatacttctcttaattttcacccaccttttctccttctgttcatggccagaagatagtctcagttcttccatttttccacctgcaaaatgggaataataaattttcttgtataaataggttcttaagctggaatcctttttaggtgtccataaatagactttggggattctacagtcccccacccacttagaaatttgatgcaacattaacatgtatggtaattgtttctggggagccaatttcaaagtaaagtattttgggcttccctgaaataagtgctaaataaacaactaatacttcacatcacagaacaacataacaaaaccaaattaccatcatagactaataaatctgaaataagatgctgatagtgtatgagaatataataaaacccagagagagcaaagtacacctggctttgaaatcactccttagcacctgagaggatcagttcctggaatctgctgtgtatgcaatgacatgcatattgctaggacgttaggccacagctccttgggtcagctgtgggcagggaacatttgggcagatctgcataagctgctgcccaccacctggattgtaaaaccacatgccattctggagactttccttcaaagaaaaatgtgaactctcactgtccactaaaccactaaatactgtttgggtgaacattctcccgcaccagaatcattttcaaaaaggcagtgactgcgtttatcttgtccacccttatatgctagggcctggcacttataaccaccaaagaattggctctcaacaatagctatttacttaatgaatgtaactgttttggtcagaacatactggtttgaaacatttctgatggagatgtgctgggggatgccttttcctgatcacagagcttgattatagcttcaatttctgtaagtaatttctttttctcttctaaacagcacttacatgatcctccagttgggagccttctgttagttgttatttctgcatttgtgtgttgctttacacttcacaaagggctttcccatccattatctcattgcatcttcacaagacttgccccatatatttttagccgagaaaatataaggctggagaattaagtagcttggccaagctctcatagctagaaagtgtggaactgtgcctcaaatccttgtttttgctctgtgtttggtggtttcttgagctcactgtgtcctgaaattgtggaaataaagttagccagaaactcttatcactactaatatatcagtgacagctattcagagtcttatggaatggccacataaaaatgaatttgataaagtgaattaaatgtatttgttttataaaattatagagcctcttgatataatttggagacagcctagattgtgagagggagaatgagaattcttattttgagatggaatcttgctctgtcacccaggctggagtgcagtggcatgatctctgctcactgcaatctctgcctcccggattcaagtgattctcctgcctcagcctcccaagtagctgggattacaggtgtgcacaacgatgcccagctaatttttgtatttttagtagagacagggtttcaccatgttggccaggatggtctcaaactcctgacctcaggtcatctgcccgcctcagcctcccaaagtgctaggattacaggcatgagccattgtgcctagccaataagtctttagacatacccctgaacctctctgacacccctgttttctcatctgaaaaaatggataccagttctgctaacttcaaaggcatgttttgcatgtcaaatctaaaatacacaaaactcttaaaaatattacacaacatataaatggcagttgctttttcaataatgtatagtgtatgtctaaatatggccattgcatttgggtacaccaaggtttttgtccggtaaacatcacaaaacaaaaagtaaactgatacaaatagctatagaaatggataaatatgctgtccatatttaaatacgaggactggacatgagacagatgtgcatttgtcattgaagaatgcagttccctggcggggaaggtggaacgtgcataagatccccattataatgtagcacttttcattgtaatcctcatagcaaccttgtcaggaagatacttactgttcttgggcccgtttttcagatcagaaaactgaagtttagagagtttgtggcaaaattgtccaaattataaaagaaattccagttagcaccgacatcatgcttggtgagtgttctcttcagtccagcacaatcggactttcagttaacactggttacaaaacgggctgtgtgtctttgtctccaaaagtcctatgggctgtaatgctaattttcttttatatgaattcttttggcttggcagtttgctaatatctgtgtactatttcagcttcactttaatgtactgtattcacttttagatacataagcataggcaatctggggtcattctaatggagcctactcaggacaacctgaggcacctggacctaactctaatagctctattaatgttaggtagaccagtttaatggagtgcattctcctagcagttcattgattataaatacttagcttaagtacctacgtgtgtcctaaaaaaactatttgtccgaatgaaaatcctgattttcaggagcagtgatatgaattctgggcacctgtgcttcagtgaccatgggtggagactttcttgtttatatgtagtcctcttatgttgaaaattacacaaaaacaaaaaagtagtgaataacagtgtcattttttgttttttttgtttgtttgtttctatttcttttgcaggttgatgaccaaatgaagctgcttcagaactgctggagtgagctcttaatcctcgaccacatttaccgacaagtggtacatggaaaggaaggatccatcttcctggttactgggcaacaagtgagtgtagagaccaaaaaaaaaaaaaaagcatctttttattaagcatgttcagaatggccggaatttaactaggtcagaagcactcttgtgctttgaaagggagagattggctgccaataatttagaaaagatgacttggtgcactctgttcctgctctgattattatagttaaacttgtaaaagcaaacataatcatgaacattctgctgcttccagtctgctgggactgaaagtcctgcttacaagggtccgaagaactggtaaatgaaacgtaatgattagtacccaggttttctttttcctcgagcttctgctttaacccaagacacttgtttgtcagctgttttaaaaccttataacttgtggagtccttactattttggaaaaatattggtgaacgagatggatttggatgtcatgaataattgaaatagttggtataaaggcaaatgagaagggaggggaatttcagttttcaagatccagtcattcaaatgaaagatagagagaataaaattactgttaggtcctacacctttctgaacagatgtttgttcgatcaacaaaaatttattgagcatcctactctgtgctagttactttttgggggctttggtgtatattagtgaacaaaataaaaaggttcctgcccctgcggaacttaatgttgtagcagggagaagctgacattaaacaataatcctaagaaacaagcctgtaatatgttaaaggtcaaagtgctactgaataaaagaaaaaaaaaaaaaggaaagaaccaatgaaaagaaaatcaacactcatccacagacatgtgttgcagtgtgacccataagttgcactgtgaaataggaatggttggtttggctttattggaaatgtaacatttgagcaaagtcttaaaggaggagagacagctttgtgaatgtctttggagagagtctacttaatagacctaactgcaactttacaggaatttaggcaagtctctccagtttcttaaccctccgttctacaactgatgtgctatttaaataaatgtgtgggacacagtgattccttcaatcctttgggtcatacctattcagggtcccactgcattgttcagcaatggtgacttcagtactcggcaccatgatcttttatgttcagccataaatgtttatgtgctgtgaaaccacagcaatgctatttggaaatgaagggctgtctccacatcatttgctgtattattaataaatcaaaatttcccaatcaaattaaaagcaagcactatttcagagtttttgcaaattgggtcaattcaagcatctccatcactatctggtccttgctatctgcacctctcaggagaaaagcgttgcagaggagaaaataaagtctcaatgggtttgacttcctgtgctttcaaattttttttggcattttcattctgggacccaagtctttggagaaaatgtacccattttcagagtctaatcattgggtgtgcctcccaccttcaccgaactaggagctgcattggaagtacaagactgggcccactaattaatttgatttcatttccttctgagtttcagaaatgaaatgggtttgtgccgttctttttctcaaagcacttccattcctgctctttagaaatatttcttatttcacatttcattttgccttaagtgctgcccgtgggtgagggtaattactatttaaaaaatagagaaaagtgcatttcttgctgtctgattttcaaaaccaagaacaatcaaggaatggatggtattatagttttttggatcaattactggtgctttgtgttttgtcatcagaactgaatgaggaactccatggtggagaaatagttatttccttatatgtttcctgcagcctggattcttccagctcccctccccactctttaaatatgtttcctgcagcctggattcttccagctcccctccccaccctttaaagtgtgccacaggtctgtcagaacccctcccttcacttttttcatccagtccagtggctaccctagtaatgattaattgtaatcagacattctcatttatggcaattatggtagacatgtttattttcttttgcggaatatctagacaaaacgttttgaatttatctctgtgcttcttgcgtttcataggatggaagcaaaagtgctgcaaaggaagacttcaaaagcctgtaacctctctatcagaatgagacagatatcttaaagcagggtcatatacatgtacttcttttatatcctcacagtacctagcacaaagctgaatatgttgggcacatgatacatattacctgattgaactaaatgagaactattgtatctctcctggttgcttgattaaaacaaattaagtataatttttttgagaattataaatacttccctgagtgtaaaaatgggaaaattagatttttgctacaacaacattactttgtgtacacaaattttaagaaggtagttaaaacaatgatgagtggaaggaaaggaatatattaagtataagagtaaagcaatatgctagaggaaaagaggatttataaaaaagaaaagaggccgggcacagtggctcacgcctgtaatcccagcgctttgggaggctgaggcgggtgggtcacttgaggtcaggggttcgagaccagcctggcgaacatggtgaagccccatctccactaaaaatacaaaaaaattagcctggcatggtggcatgcgtctgtggtcccagctacttgagaggctgaggcaggagaatcgcttgaacccgggaggcagaggctacagtgagccaagatcgtgccactgcactccagccttggcaacagagcaagacgccatctcaaaaaaaataatagaaaagaggtggaagctagaagatatatatatatatatacacacacacacatacacacaaatatatctacatatatacatatatatacacatatatatacacacacatatatatgatatgaaagttgaaggaggcagaaaaaaaagaaaaaaagaactgcttcctgttatgtttataatccaataacaattgagctgtggttagagtatattttcttcactagtgcagaccatgtgctctctggtgtgtgtgtgtaaaattcacacatacaggtgtaatttagaattggaacaacctgttttcgtgtctccattccaaaacttcctggctgtgtcatatttagcaagtcgctttaccttttgaggttcagtgtcctcacctgtccagtggcaactatgatgttatctaccagagagaattgcagtaggaattacaggaagtattctgtgaaatgctgacacaaaaattagaagtcatcaaaactaggccagcgcaagggtgacatttatggagtcaacaaccccacgaagaaaggactattatccctctttggcagatgaggaaccaaggcaaagaaagatgaagtggttgattcaaggtcaagacccatctagtaagtggcagaacagatggtcagatcgaggccaactagtgctagagtttgtgttctttaccaacatgccataccgtttatctgattaactcacagatgctgcagagcttgccttcacgccggcatttaatatggtcttcatgtgtaattccagtgcatgacagactctatggaaattccaagcaaaacaaattcatttccttttttattgagactaaatggatatgctttttttgtggtttagttagttagtagtttgtttttgggggaattttctatatggcattgtaagcacattgttacagtagatttaagttattcacaagcaattttaatgtgattgttgcttagtgttatgaaattattttaatattaagaaaaaactaaaactatgaaaaaatcactcataatgccaccacttgaatcaactttttgttgaattctcttccaatctttgggggaaaacatgtatcttaaaagaggatttttctcatttttctaaataaaataactcgcctgccccagagacatattgacctgctatcatggatttgtgtggaatgtgaactttcaaacactgctagaagtgtgtttccatgaagcactgtattgaggccatgttgttgatatcatgggaaaaagtaaatggtattaccccaatacagcatgcaaaattcccctaaaggcagcttggtactcacttgtaggagataaatacattttttaatttagttaaaacaaatgcttctgatggcctgataaatgaagggaaatcaaagatgtaaggggaaaaacattagacacagctctgcagccaatagtgataagaggcataattcatccacctaattaatgactgccctttgcatagtgcttttcactgtgtactttcacaggtaagccccattacacagggtcagagaaagtgcggggaaatttcagaggaggaagtgcaaggagaataagatgggtgttctaagctgtccagatgattcagcttctataaggaagtgccttacccctaaagtgaggatatttgattgtactctcctttgtaagttgaggaaaacaccattgcttaaaatccttctaggtcagaggaacagtgacaggcaattactagatgaaactttaactaaactcgccacctttttcagcctcagccagaagaaatacaattcactcattatagatttccaggtttacttacagtattttctcaactgccctgttgagaaaatgattacttctgaaacaaatgaaaatgtttatactgagtattttgagattggcaaataggaatattaaatatgcctcagtccacaatatcaggaatgaagtcccaacacaaagggaacaccagacagtgattttgtttcaccttgaaagcatgtatgtcatgtctacacattgctttatagtgaccctttggacagacagaggaatgcaagaccccaggtgttccgtagcccaatcttctggctttttcttactaaacacagctcactgtaaataatgtggtgaatttgtcatagcagagaaaaaagaaaaagactagcctggattttaaaaaatgagtgactatccaggaaattgctccttggagcttgaaaagagaagaaatataaaatagcacagcctttctcttaagcccagtggctcacaagtttgcttaataaatgtttgcagaattgaactatgtctgttcatagttcattcagaactagagaaaccaaaatagccccactgcaaagagcagcccaggacaccagtacattgtatattgaaatgaggattcagtgtttcacttaaccctgtaagttagctattatgttttaattgcgtctttgaatcaggcatctacataaatgtatattaaatagccttgttaagcaaaaaggaaattatgattatcagtaatattaagcacttcaaatgttctatatagtcgcaacttagttatgaaaagaattatttcctatccaatattttaaaaactacacacgcacatatgcacacatatatctatgtatgtataaaataataatgtactttgaagtggggtcaggttttagtatttgcatattgttgctaattaacagccactgtaacatcatcctaagggaaaggtctactggcaacttattatcttctattattgtgtatcatattaaaatgacaggcatcttataatatacaagtcatcaaaatttcagtgattagaattaaaagcaatttaggtaaaactgttttctactttttcatgatgagtgaaatttatctaaaggggacatcagtttagagtattgcttcaatatctcccttgaatttaatgacacaaagattacatgtaagagagcaaaaaattaattttactaagtacataaaagacaaggccaactgctcctgaaatgagcacaaactctgcattcaacaatgaaaatataattatgtttgtaataaaatgtaaggaagttggagatctgaatgttgtttcaagaataaatcacctatccttctttagagctgtgcaatttgataaatatccttgaaagaaatgttttctaagcccccatttaataagcatgtttgagctttcaaattagcatgtaaataaatgtatagttataaatttgttggtaaaccaattgattttttgaggtccatctcactaaaggtctctcactaaatatataatcctatgaaacagattcctttccgttatagtgtactacattttcacatatgaaattcttgtatttgaacttattattatacacctgttagaactatacacaacaatatttaattaactccatcttaataatggaaaattaataccaacatatttgtgtttcattttagtatggtcttcctgattcaggccttaactagtgatttttttttcttttcttttttttttgagagaagtcttgctcttgtcccccaggctggagtgcaatggcgcaatctcggctcactgcaacctccgcctcctgggttcaaacgattctccagcctcagcctcccaagtagctgggattacaggcacttgccaccacgcctggctaatttttgtacttttagtagagatggggtttcaccatgttggccaggctggtctcgaactcccgacctcaggtgatccacccgtctcggcctcccaaagtgctgggattagaggcatgagccgccgcacctcgcctttttctttttttttttttttttgagacagtctcactctgttgcccaggttggagtgcagtggtgcaatctcagttcaccgcaacatctgcctcctgggttcaagcgattctcctgcctcagcctcctgagtagctgggattacaggcatgtaccaccacgcccagctaatttctgtatttttagcacagatggggtttcaccatgttggccaggctggtcttgaagtcccgacctcaggtgatccacccacctcggcctcccaaagcactgggattacaggagtgagccaccgcacctggatcttaactagtggtatttactacaatatactttgtatatattaagctacagctacagcgcattccgttgattccaagcttaaattgttaatcttgtcccatctatgattcttgataatcatagaagtgagaggtaccttattatcatcacctaacttaactgccttacttaaagataaggacaccaagggatggagatttatacgtacttgtccaaggctcttcgtttgtaagaggcagcattggctcgggtctcttacctagtctctggcttttgccaccactgttgtaccatcaggccttcctgctctcattcactcatctatcccattagtctcagtaaaatttgtattattattatctgaagtagttgactatgtgcagtttttaaagaatttatagcataggcacctttttaaagtaaggactttccttgaagtagaaagttcccctgtaagagaactggcaaaatgatagttgagacgtcactttgtgtgctctgcaaataatcccaatgtgccccacagagttcaacagtgtgtcctgcctccttccagctcagggttcaggttgcccaggtactgacccttctttcacacattctgaaacagaaaccacaggagttcttacaacacttgatgtttaaatttagtgcgtagatgccagcacctggctaaagcaggtagacagtgctgtacatgatgcaagagctttcctctaacacacattaactgtggctttttcatgcatagttgactctatataaactgattgacacctttgggggtcatctttcctctgactcataatttttctcactcttgaaaaaggtttctgtacacccagtattctctagttaaagctgaaaattcaactcatcatatttacacaataaaaaaaatccattctgccttgtttttaattgcaaattctactcaagggactagttctcctgcttaggaggcagccctgtgccttctcctagagaagcaagtgcagtcaattatggtaatgaaatgtcaataaatataaaaatttaatacagtctgctctgggtgagtggcagatgaggacttgcctcccagacaaatttgctgctgctgcaaatattaaatgcacctaaaagagtatctggttgcctgagagctctccagtaaaaaaaggatgggagcgtcaggtaccaactgggctttcccattatgctgtaatcgcagcagcaaagccagtgctatcactgacagccatcccaacatcttaacttgttataaattgaacttcttatgtccccatgaataatctaagattggtgcctagcaacacttttttttttgagacggagtctggcttcttcccccaggctggagtgcaatggcacgatcttggctcactgcaacctccgcctcccaggttcaagcaattctcctgcctcagcctccccagtagctgggattacaggcacatgccaccacgcccagccaatttttgtatttttagtagagatggggtttggccttgaactcctggcctcaagcgatccgcccacctcggcctcccaaagtgctgggattacaggcatgagccaccgtgcccggccagcacttttttttttttaatgaaaagggaaataagccttttctttttttgcttccagacaacggaattattctcctaaataaagttattgctgtctttagagagaaacacattaatctgatgtaatctaatgtaatcatctgagaatagcagttttatgtcatgctttttaggaaacagaaaactaaagaataatttatttgtatttattttaaatttttaaattaacacttctgctgttctataaagaataatttaaatgtgattctttcatcatccacaaacatccaatcttgaactatgattactttaaaatgtagtctcataatacaagtagaaatatatctgcctttattttcctcatgcactagttaatattgtatatacatagaacactctcctggattcacttttcatggacagtatgtttttctttcaccttattcatgagagttaaaattttttatcttatgtgatgatgtaatttcataatataaaaaaggcatatatacttgaaaaatttaggtagccaaaacctctttcctacaaagcttatcaaaagtgattatatttatcagacatagtaattctgatgcattttagaatcatggaatgtgcctcaaactacttgcatggggaaaatcccttctgttatcaatctgtattgtggccaggcatggtggcttgggcctgcaatcccagcactttgggaggccaaggccagaggatcacttcagctcaggagttcaagaccagtctggtcaaatagtgagaccccacatctctattctattttaaaaacctgtattgcaatctgattttacccatagttcttacgactcaggtgaaatacatattgctgattctgatagtccttaaaactgtgattctgtattgcaggtggactattccataatagcatcacaagccggagccaccctcaacaacctcatgagtcatgcacaggagttagtggcaaaacttcgttctctccagtttgatcaacgagagttcgtatgtctgaaattcttggtgctctttagtttaggtaagaaatccttttctcatgctgtgctcaaccaacgattgctaaatgatgttgaagttcaaatatcttgtggtccatgtatgtttttgttctatcaatataatgcccttcctgtcaaattatgaaatcttcaaacgtgaatatattttcatatatatttctgcatgatgcatagcccttcagtggatacgttggggaatggaaaatgagttattcaattgactcattcaaatgagtcctggtttttcttccataatatacagataagcaataaccaaataaagctatgacaaaggtttaaaacagacagcttaggaaagatgtatggtatcaaattttagccatctttctcccattggtaatttctatgtgcctttcgtttcaacttgctatttacttctgtttttattcttctaaaatatgaatcgtaattaaaaacctgtatttaaatctctatcgggattaactagagaatgtttataaccagatgcaccactatgcaagtacaaaagatgacagttgtcaaggggaaaggatgattctttaggaaagctttggaaaagaaagataactaagcaagacagattagctaaatcaaggttctcagtgagtcagttgagaaaaatcaccacagcttggaataaaaaaaggattaaggagatggatttttattgacttcaaaggaacagattttcctgtctgtcccttacttgatttctgtattttgttggcttaataaagccaacttaaataaactttttgccaagtccatttattacttattggcagacagctgagggaggcaacttcccttgaatgaaaaaaatgcagaaatcagattcaccaacatatgttttttctttagtcttcagttataagatagttgtgaattcatattctagggaataaaacaataaaacaaactgcaaagtaaaacagatgtgtctactctccaaatttggtactttatttttaaaattcttcttgacaggactgcacaactgttgctaataaaggggtagtttgaagtaatagaaccagagttaatttttcatgtatagtcaacatttaaaataaaaagagcattttcatattttggaaaatgtgataaatacagcaaaaagaaatgttactgaaaatttaaatggacaacagaatttcatggatgtaacgttcaaaggtttacaatgccaagactggatcctgtgtggtttctgtattaaccacaataaaaaggaaagttctgttcaagtaagtctgcatcttttacccgagaacagtgtttagaatgttaaaaaggaagatagcaagcatacgcctgcttgctgtaatcgcacaaattattctggtttatgttaagatcttagtcttttaaactagtgcatttgatcactaattaaatggaaaatgtggtaatatatgtataagaaactgtatagcatcttagtgataaaatatttacagggtcatctcatttcaatggtattttaaattagttgaagaaatgtattacatttgaagatgtacatattaaccatgagccatctttagttttcagcacttttaactttccttcatcatcttccaaaattattatattctctgctaatactataaggagggggttgggctagatctgagatgctttcaacttttgaacctcaaaaattatcttcctgaacaactgggccatgtatttaccagaactttagtcatacactctgatgtttaatgagcacttcgattgtttcaggagcccagtacaccagtgaatagctggcctaaatgtccattaaatccatgtctatttgttgcttaaggaagaaaggaaagcatggctttcagatcagaggcaaatagaattctggccgagagtctatttttttagagaagcaggagaaaagtaaccagtagtaaaattcaagtagtttctaatttgtgagtggaaaaactttttactctgtagaaacagtggctaatcaattttttgaatttcacctttattgaggtatatagataattaactttaggtgcctcagctagccccaaatgctggttttacctgtgattaagggtgaaatcataccagagtcactcttgaaagttaaggccaagtcctaagctggtacctgctgtcccagatgctcctcctgagcctcgagtcccctgagtctgaagcctgctatatttttgtctcagcccagccttgagactctttggtcctggagaaaaatgaagattctgtggactagtcagaggccagggtctattctgagagatgactgcagcagtattctcctgtgagagatgaaacagtgttttccagatagatttggtgagagaaggtgggatgtggtcccaagcgggtgcagcgttccaagctagaagcactaccagtgtgaaagcttaaaggcaagagagagcaaaatgagtttggggaactgttagttgatggatacggcttgagggaagcagcagatgtggctggagacatagacaggagcctggacatggacatgaaagccacagatgcattcaacacatactcattgagtgcttactatgtgtccagcactgaagaaggcactggggctatagtggcaagaagaagtaagtgccatggctttcattctctagacaattaggaagtatagcagtgttcttaaggcgacggggatgcggtgaataacttaagtcgatttgcctttctggtagcagcatggaaagtggactggaccaagaacagtgctagaaaccctgttttcagaagttttatttttattttacttatttaatttttttttttttttgcttttattcctggcatgctgtgatttatttttagaggtggttttttttttttgaaacggagtttcactcttggtgcccaggcgggagtgcaatggcatgatctcagctcaccacaacctccgcctcctgggttcaagtgattctcctgcctcagcctcctgagtagctgggattacaggtgcctgccaccacacctggctaatttttttgtatttttagtagagacggggtttctccatgttagccaggctggtctcgaactcctgacctcaggtgatccacctgccttggcctctcaaagtgctgggattacaggtgtgagccaccacgcctggcctagaggtggttttaatactccatgtggttggactgagatgaaggatacaaaccagttataggtttcaagccacaagatgtggcagagttgagagggaaaagtctagggtgtgtttggggcttctggatgtctagctggaatagaaacatctacaggaacagtaactgatcagttgattcaaagcgggtcccaatagcagtcatcactttctaatctaaaagtcattcttcactaaagtttgttactgctgacacaaaaagctcatgacaggactcaaaagaaaagtacagtggactcaagtccttctagtttgctctctgacgtttcccccctcagattgtatccatgagcagacatcagttgggtaagctggtcaagaaaggaaataagtaaaaaatgccctctcagcacatttctctgtgtataacatcatagattctgtaggcccaatctctgttagttgttagttttaatgttttctttacatttctagcacaatgcttggtacatagtagggacttacaaaatgtttactgataaaaataaataaatgggccaggtatggtggctcacacctgtaatctcaccactttggaggccaaggtgagagaactgattgagccccacgggtttgagaccagcctgggcaacatagggagaccccatctctacaaaataattagccaggtgtggtggcagacacctgtggtttcagctacttgggaggatgaggtgggaggatcagccaagatcgtactacttcactccagcctgggcaacggattaagatcctgtcttagaaaattaaaaaataaaaataaacaaatagtttgaaacttaaagcgaagcctttaccgaagcaactcgtgataggtaataggaggtggtttagctaaaagccgtattcaaatacaggttatttttcagagaccactttttccaaagaactctctaataaataactcctcaaaattaaattatttctgttatcagtttgcattctcccagtttatgagaggagatgtttattcataagctctttgggaaagctaacgtgaagaaaaattagaaagaatattactgactaaaaccaggtggcaaatgcatttctgttccaagcaaatgcaagatgataggctttcagcccatgttaagtaatagtagttaagacaatgttgtacaattctttcttggcattgatacaatcctgtttccagcaaaatgaatggagaaaatgttatatttgttcatcatgatagctctttgcttcatactaaacttccaaattttgaatgtgacatttgattatacacatcccaggtaagttttgtcctcatggagacaaacaccccagggaagatgggttatggttgcctcagggaatgactcaactggcccagacagaaaagctactgcatgctaaatgtcctcaccagcctgtcacctgatcctcatctgcagagaagcaacgggcataattcaagaacaaaactgattgaagagttgcttgtttcatccacaggttcagttcaggcattctgtagtgtctagtcatgatttctttatcttaaaataattaagaacattatcttaaattataaaaggtcatctaagcaagtactataatgtctcagaataaacagtattgtttattaataaaaaatgtgacttgaacacaagttgaaagggattttcaaaatggatgggtaagaccttcagggcttgaaagaactttattttattatttattcttcttaattttagagacagggtcctgctctgttgcccaggctggagtgtagtggcatgatcataactttctgcagcttctaactcctaggctcaaatgatcctctcgcctcagcctcctgagtagctggggctacaggtcacactcattgcctggctaattttttaatttttttatagagacagggtctcactatgttgcccaggctggtctcaaactcctggcctcaagcaatcctccctccttggcctctccaagtgctgggattgcagccatgagtcacaacatctggccctcccttgaaagacctttaaaatcataatttggaaggaaaaaaacagtatttctaaggcagagcagaacatttttctctttgttgtggctactttaaactgtataagtctgaccccaaacaaagttgggggcagggctctatggttgttctggttttctctttttattcttttattttttctgtgctaagtgaaatgttcttgttttcttagtgaagcaaagttcttttatctgtcaaattaataaactgtaaggttcatgaacacagtgtatgttttactcctcatgtactgcctggcatataggcttttaataaatattgctttcatgaatgaaagaatgcctttcctcccaacttctagattaaaaagaaaaaaataatgggaattgaaaataattagctaaaaaaaatgcaagcacaaaatttgaagaaagagagactagaaaacagattctatggataactattagaggatttggcatcttcttttcccctttagaaagtagggagataagtcttcacattatgaaggggatttttttttttttttttaatttttagtacagacgaggtctcactatgttgcccaggctgaactcctcaagtgatttgcctgcctcagcctcccaaagtgctgggattataggcatgagccactctgcctggcctatgaaggggattagtataagtaatgtagagactaaactgagtccctcctctttgcaaataaaataataaatgaaattaattactgatgatcagcatttaggttctatttgaagttgtaacactaacagtgtcaaacaccaaaatgagccatagaaggaagtggtggtgatgcttttcttcagtaatgttaataataaaatgtcctcaggtgaataaatcacttagtttctctcttacagaatgaagagacctaagagaacattctcctccagttttgtaattaaaaaaacaaaactagatgatttatccaacattttaggttcagatccaggtctagaactaataaccccaaatgacagtcagtactttttctgattcagcctactttcctcttcggagacattggatctcatcaatgagcatattaaaaatactgtgtaaagaagacctttgaagacacaggtttgaactgtgtgggtccacttctgctcaaaatttttttttcaataaatacagtcagccctctgtagctgcaggttctgtgtacaaatgcaagtccaaaatacagtatccaaaaggccgggtacagtggctcatgcctgtaatcctagcactttgggaggccaaggcgggtggatcacctgaggtcaagagtttgaaaccagcctggtcaacatggtgaaacctcgtctctactaaaaatacaaaaattacccaggtgtggtggtgggcacctgtaatcccagctattttggaggctgaggcaggagaatcacttcaacccagggggcggaggttgcagtgagctgagattgtgccattgcactccagcctgggcttcagagaaagactctgtctcaaaaaaaaaaaaaaaaaaaaaaaaaaaaaaaaaatatatatatatatatatatatggtatccatcagatgcaaaatccacatatacagagggctgacttttcagatctgaaggtttcacagggtagatggcaggacttgagtatttgcagatttgagtataggcaggggtcctggaactgatcccccttgtataccaagggaggactgtacttactaagacactatttatttatttatttattaaggcaaaatgatataagaaattaggacagtcatctgaagaatgtggacaaaaataaaagcaatatctattggtagaagcagagaaatacttcacctgaatttccaatttttattgaatatgctaagtaattatatagctcttaattcactcagtttctaaataccgtcatccctcagtatatgcagggaatcagttccagcacccctgtttataccaaaatctgcacacactcaagtcccgcagtcggccctgcagaacccgagcatacaaaacattggtcctccatacaggcaggtttcgtatctgtgaatactgtgttcttatctgtgtttggctgagaaaagtctgcataagatgtggactcacgcagttcaaacctgtgttgtgcaagggtcaactggatattgtcagttttgtttttctctatgtgaactctgggtttcagagctccagcaagctcccagaatgcatttgcctcacagctttggtacctctttcttaaagacttcctccttgtagctgattgtcacctcttaggtatgacgttttctttggaccattcactagacattaggaaagccaaatgatcatagctttcgttatatatatgtctattttaggatgtattttaactgcttgtgatggtaaaaggaaaaataataacaaaacaaatagtcattcttttcccctctgacagtcactggcattaaaaatcctaaagtagccaattgcatctctaagatttaggtggacgagctccctggggcagggcagggtggagtgggggtggtgggcaggcagagaggagtgtagtaagtttgtacattctgttttcaagtacagccgtccgctttcctgaagggttcaatcataactcggctcttgcaatatgacactgacattgttaatagtaaataaaatgtttactagctgaaagatttggataaaagtcttttagatagggaaatttatttgcagtggttagttttccaatagtctttagtttctgctataggaatgtttttcttatttgaattttgtccattatttcttctgctttgacatttaaagaaatatctaatgcttcttttccctttacttaagtgtgtgccatttgtcctctggcattcaatatcagaacctggcagaggtttgctgtcaaagctccctatagagtggttggtaaggcaacatgcaaatagggagactggccccataccccaggcccagtcaggacctctgcccagagcttataactccagcacaagccatcatatatgggaactctgtctcatcacttttgagactctctctctctctgaatatatacacacacatacatacacacacacacttcatttgaaaatgaaggctttataaacaagccaagaactgcagagcaactactgatctcacatctcacttaagagacaacagagatttgtaggaatagcaaacattcagccattaagtgaggcatacaaaaggctgctgtgttaacatagcccagaaaaccacggcacttcaatcagaacgtctttctccttgtctgtttttctttaaaagaggacccttcctttttgtccgataggaagtactattctgaatctaccagcaaggctggcatgtgctctcttataaaaggaaaagacttcaccatgcatagcctcttcaccctaactgctcagttgtttgctacccctggcaaggatgttctaattgtgcagtggagggtgtgaactcgttgctttaactgcagttccattagctaatcggagtcctgatgtcagtgtgacattgtggtgtaaatcatgaaggggtttttctgccacttcctgtggagagaaaacagttttgcaggatcacctgatgattggccattgtggggttgtcttcttgaaaaagaaaagttgttctgacctgggctgtgctcaggatgcctacattttgcctttgctaagcgatgaaccccccagaaaggaagtgtatggggggcactgttggagtctgagtgctcccttccctcagcacttctggagaagcctggaaatactgtagacacagttttggagaagagaattcaaagggcttacaaaaggagagtacttttttgtccacttctctagaagaggcacagcaacttgttgagtttgtgttgtgttgtgttgtttttctgccaccaaattaggtgttcctattgtgtgggaggtgaaaaagagagcacaaatctattaataagtaaagcaactgaaacaaagggaaaaatgaatccccattttgcttttttgcaacattacatccagttaataaaagaggcttacaaatccaacagagatctgcttgcaggaactaactaggaagaagaagaagaagaagaagaagaagaagaagaagaagaagaaaaaaaaaatccaacagagaaatttgatcactgatttaaattgtgtttgcagtgcctaaagcaagatgaacgattcattcactgtaagtcagaaggtgacagtaccaggtgtaccatttgctatatggcaaatctacagctgctctagaaagtgaaatagcagtgcctgttcttatcccttagttgactacctcatcactggaagtgctgtaagagcttcagaagggtggaaaactagtaaaaaatgtccaattgtgcatcaaaatttatgcttattaattctgaaataagcattatagtctaaacatcataaaattctttttgcttggtagctgcataaaagttggttttgaaacagcaaaacctgattttcctattatgtggcaattctccttcctgaagctggtcacaatatttgctttattgctggcttcctctaaatatgattacatactcacccacacacacactgccactggctggactgcaaagcctagtgaagcagaacatttacctcacatctttacccaagagcattggttaaattgttcttcatgaagtcagataagcaaaagaaatatcccagggttcttcgtacaattagcattcattctcagtgtttaccttttcatatgtaatattctaatttagaaaaacactcactagacacttgtcaaataactgcacatatcttcatactaatgccttgctgatatatatgcacctgagggtaatgctggcaaataagcatttcctaaaatttatgtaatcatttgaaattcagaaaggattgattagcattcaagagatgccactgttcaatatttacaccatagagatttggcagaagcaaataatggcatataaagttgatgcttgtcttaattaaatgcagtataataggtgttgtggattttttttttcttccagtgagcaaagcagtttagcaatgaccagatgtaattcattttggagttctaagtttgaacttaatcaatatgaacttacagccatggaagaagtgattatcatttgttatttgctggcacaagaatataattgcctaaatagcatttatttaagcatatttctgaataccttatgcctaaaaatatttgtcatattttagctgttaatgcttatcttgtcattttgctaactactgctatttagtgagatgatttttcagagacatattggccaggcaagctaggaataaccagcaagaaaaatcaagtgagaatgccatgtgctcttggttgatgtttctcgctgctttagctgtgtcaaccactctgttcaaatctcagaatagagtggctgtcttagtaccagctcagaagagcgtagttggttaacgtggttagcccagatgctgcactctagtggactctggacaccccagggcctcaggtctgttctacaatggaccaaatcagtgactcacatctgagtcttgcattagatcttctttctagtttactgataaaaatctgataagtcttatcttgagttgtggctgtgtttggttaagaaggttaaatttcaaacagaccaatccaaagccaggagagaagaacaaatagaagtacaaggcctctcatcagtattgaaacattaaatcacacaaaatatattgagtggccactatgcagaaccattgtactaggcaagctatgaaatgacaacatagagtcttttttttgtttgagatggagtctctctctctccagctggagtgcagtggtgcaattttggctcactgcaacctccgcctcctgggtttgagtgattctcctgcctcagccgcctgagtagttaggattacaagtgcctgctaccacccccggctaatttttgtatttttagtagagacgggatttcaccatgttggccaggctggtctcaaactcctgacctcaagtgatctgcccaccttggcctcccaaagtgctgggattacaggtgtgagccaatgtgcccggcaagaactggcaatatatagtctttccaaagagaaggaaactcctgtgatacagagctgcattttggatccccaggacactgttctgaataaggcgtggtacaccaagcgaagagtccaaaacatgccatgccatcagcaatgctgcatgcatctcttgtctttctttctgttccttgttttcactgaactaatgcacgttccacacacatgctattctccttgattacattttattaatcagaaagcctttgtcaacccccatgttacataaatctcacagcaatcagaggcttcatgcctcttcagtttcccaactcctctgaaaggagatgatttttcagagacatattggccaggcaaactaggaataaccagcaagaaaaatcaagtaagaatgccatgtgctcttggttgatgtttcttgctgctttagctgtgtcaaccactctgttcaactcctctgaaaggagttgggaaactgcatgggatcacctccaggagccttagcaaggggcactgtccctaacacccacatcccaagttacccagattttggacagcaccaatgtggcctcagccctggaggaactgagtcccagaacatcagcatggaagagaacctatgctgttgctgaatacaaacacgtcttatttctgagtaagaaaatttaagctaatggaggttaagtgacttgtacacagtcatgtagagtcaggatttgaactgaaatttttgaactccacacgcaggaaaagagcacagatatggatttctatattacagaaatagtgcttttgcatttgtttcaaaattagacttactatttcttggccatccttttcaactaaatctaaaattttcattgtgaagtgtaaaagtgatttcccagaaacgtggggaatgtacattgccttttgctgccttaggactcagctgtgcatgctgcatgctgggtaccctgaactttggagggcagaatctctcctacagtcactcacactttgactctctccactttactctgggtacatggagctctgtgccatccataaaggtcagtgtgtcctgagtggccatgctggactcaaattgggcaattctgcctaatccctcagcaggaatgatcatattcattttgtcctatcttggttatacagtcaagcgttatataatgatgttttggtcactgatggactatatatatatatatatatatacacacacatatatatatatacacatatatacacacatatatatatacacatatatatacacatatatatatatacacatatatacacacacacacacacgtatatatgtacatatatacattatatatatatggtcatatatatgatagaagactataatggaggtgaaaaattcctattgcctagtatttaccctactatatactttgaagttattttagagcatattctttatacctatgtatataaaagaaaacttactataaagtagcctcaggcaggtccctctgggggtatccagaagaaggtattgttataggagatgacagctctatgtgtgttattgcccctgaagaccttccaatgggacaagatatggaggtggaagacagtgatattgatgatcctgaccttgtataggcttagaggctaatgtgtgtgtttgtgtcttcatctttaacaaaaaaagtttaaaaagtagataaataaatttaaaaatagaaaaaagcttatcgaataagcatataaagaaaattttcatacagctgtacaatgtatttgtgttttaagctgtgttattacaaagagtcaaaaagcttaaagaaattgaaaagtttataaagtaacaaaggtatagtaagctatggttaatttattactgaagaaagaaaaatattttttataaatttaatgtagcctatgtgtacactgtttataaagtctgcagtagtctacaggaatgtcctgtaccttcccactcactcaccactcactcactgactcacccagagcaacttccagtcctgcagtctccacctatgataagtgctccatacaggtgtgctattttttatctcatagactgtatttttactataccttgttttctatgattagatgcacaaatattcactgtgttacaactgccttcgatattcagtacagtgacacgctgtataggtttgtagcctaggagcaataggctttaccacatatcccgggtgtgtagtaagtttgtgtaagtacactctatgatgatcgcgcaacgaaatcacctatcagtgcacttctcagaatgtatccttgtcattaagcaacacatgactgtgtatataagaattgatagcacacctgaaataatcctttctctgtaccatttatcccaagagaaagtaattattatagtagtgttaatactgctaacatctatgtaggaatttttaagtgcagatttatttaatttttaatttttaaaattgtgataaaatctacatgagatttaccattttaacaatttttaagtatgcagtttagtggcattaagtccacacacattgcaactgttaccaccatttgtctctagaacttcctgtcttccaaaattaaaactgtgcttatgaaacagtaaattcccaattcacccactgctcagcccctgcagccgtcattctgttttctgtggagaacattttatttacaaagtaccctattcttataacattatcctttacacataacacaacattgaaagtttagtgattttataatacaaaatgtgactggactcagcatggctaacgtgctcatgaccacacagctaggcatctgagagagcccatgctccaagccagggccactgattccagatctgctgtcgtcactcacaggcaaggaagtcttttgacttggggcctgaaataataaagcatgaggccaggtgcagcggctcacgcctgtaatcccagcactttgggaggccgaggcaggtggatcacctgaggtcgcgagttcgagaccagcctagccaacatggtgaaaccccgtctctactaaaaatacaaaaattagccgggtgtggtggcatgtgcctgtaatcccaactacccgggaggctgagacaggagaatcgcttgaacctgggaggtggaggttgcggcaagccaagattgcgcccctgctctccagcctgggcaacagagcaaaacttcatctccaaaaaaaaaaaaagaagaagaagaagaagaagaatgcatgaatgaggaaaaagagaggcgttcatgacaagtttcttactattgaggtgatatggcctaatggtgatgactgcaaacttgaattcagattcttgttctattgtatccttaggaacgtgtatcacctcacttttttccatctgtaaacttgaaataataatgatctacctgaagcatgattgtgatggttacatgcaataattattaggaagaacttaccataatggctggcacatagtattaataagtgattattactcaaaacatctgtgaaagtcatagaaatgaaggctgcttatcgggaaatgcctcttctcagatacaatctttggtttacagattctgtgaaaaagatctttctcacgtcagcaataactgatacattaattcagtaccaagccatagtttgaaatctttgatctactaaccaaaggcatcattattatccttgatgttttggaatatgtcagagtaagcagactcaagccgcttcactttaattcatctatcataaatcccaaaatcaagccaaggtctaataataaacaattaggcctcttcctaggttggtgcaggccctagatgatgagaaagtggaatggctaggctcacacctgccctctgggaatgcctatgctaggaagctcttcacttttttctttcttttttttttttggagatggaatctcactctgtcacccaggctggagtgcagtggtgcaatctctgctcaccgcaacctccgcttcctgggttcgggcgatttgaacacacacaagaaagagcacagataaggatttcacttaacatcatgcctggaataaagttcatattaaaaaacaatactcagtatgttcgattataatagctacatcttattgtcctgtatgagcagagtacattatacctgttgtttctaatcttcataagcaagccttcgatgaaagtatcatttgccattcctgttttactgtctttccctaagatcagagaagtcaaacaactatacaaaattgctgagctagtaagtaatagaactgggatttgcacactttagtcatcaaagtctaggttttctccactattcactgctacttttctggttcattgattaagtatgtagatcagaaggcactataccagtgcttgtcatttatgatgaagctaacccattctaaatctgatccttctagatcctacttgaaagtacaagggctgagtaacaatcctgccttcttaaatgcttaataattccccctcatcaacatgccatggtttcagtcagagctgctttctattgatcggtttcaagaagtatcacagcttttatcaccacggtcagaagcactgctgaaattatagggtatttaatcccttatgctggcctacttactctaagcagattttcttttctttatcttttttttgagacagagcctcactctgttacccaggctggaatgcagtggtgtgatcctggctcactgcagcctcaacctccctggttcaagcagtccgccagcctcagccacccaaagtgctgggattacaggcatgagccactgtgcctggccagattttattttatttatttatttatttatttttgagacagagtcttgctctgttacctaggctggagtgtagtagcacaatctcggctctctgcaacctctgtctcccaggttcaagcagttctcctgcctcagcctcccgaatagctgatattacaggtgcacaccaccacacctggctaattttttttttttttttttttatgtttttggtagagacgaggtttcaccatgttggccaagctggtttcgaactcctgacctgaagtgatctgcccaccttggcctcccaaagtgctgggattacaggcgtgagccaccacacctggcccagattttacttttaatatgaagaaacatctgctgtctaaattcctatcctcttacaaatatttactgtgaacagaatttgataattgattgaaaatcattaccagattattagcctagattattagcagattctccctttcctaatattgccagcatcaaactcaatggagtgaaagaagaaggaatgaagattaaaacatgaatttgtgtacgtttttaagtattttaagaataccaaaataaaagtgtcatatgaatttcttagtatgtttctgatatagacaggatagagtttagtaattagcaatttcttctaattttttttaaaaaaagtttattgttgttacttgctacaagaaattatgggacaaattggataaccacatgtgctggcatttgtccaggacagcccatatcaaaagggattggggtccatgatactgtaacagtatcatttctaattataacttcaaggaaattcctctctcaaagaggtagctaagaaacttattcttgtcttacaaaagaatagggtttttaggatttaaaaacaggttgatgtgccatttttcctccaacttatgtattttagattctattttgattttcactgatccatggtatttcgttatataatgtaccccacagtttattgattcattctccgattggtggatatttattacaaacaatgttaaaagaacatttttctccatgtcttcctgtaatatattgttggacaatcactctattgttggacaattacttgcaactctagaaactgtcaaagtgttctccaaagtagctgtaccaaattacatttctaggcgtagtaaatgagagcttctatttttccatgtcatcaccagcactataatacagatgctgtcattattctgttttaatttgtatttctgattaccagtgatattgaacatctttctgtttctttgaagtacctgtttatcaatgtttttccatataatttttgctttttaaattttcttaagaaatccttcccaaccttggaggtcttaaagtacattctcctttaatttttttccaagtgtattaaggccttgcttttcttaatatgaatctttaatgtccagaatttaattttgtgtatggtgtgagggggagatctagtttttattttatttttcttaagggtagtcagtttttcccacactgcttactgaatcgcttgtctttcccactgtttttaatgccacctctcttatgtattcaagatctgtatatgtgtgggtctctttctggactttctactttgttcctttggcctatttgattatctcagtgctaatctcacatgttttatgcatttttataataaatcttaatatctgcttgagtagtccctccaccttttatttcaaaatagtcttaattagtcttaggcttttgcttttccacatgaattttaggtttggcttgctgttgttccacaaagaacccagtggggtcttgagtaaaattgcattgtatttagagattaatttggagaaaaattattttcttgggagtattgagactttcccgttcatgaacatagttcatctttcctttagtcaggtgtactctgatgtccttcaataaagtcatacaattttctccacagaggtattgtacatcatttgttactaatttattctagctattatatagagttggtttttataatgcaaaccttttctgtagttaatatccatgtggctggatatttttatattgcatttttatttaacaaatctactaaatgcccttattatttgaaatggcttttctgtaatttatcttcaaccttctgtgtagacattcatagtctgaaaataaatacagatttatcttttgcttttctggattccatttctgatcttattttgttggttagacaatattgacttggtgtgataacaggtactcttgtcttatttcagtcttttataggaatcattctaaagtcaaatgacttgatatgaaaagtgttgtctattttagtagtcttctttttagtagaaaaaagagaagaagctattgatcttggagagagatccaacagctattttttctttgccttttatttcaacaaattattctcttatcttttgttattttattgttctggttctagcttcttcagttgacgattttattcatctaattttcagccatacattttcattgttcttttgttttgttttgttttgtttctcatttgatgaaagcatttagtattagaaagttgcctcttggcacagccatagttgtatttgtggaagttttgatattggagacagacattcaaggctgctgtgggtttatgcaagtcactgtacagaactctagggggcaccactcacactatagtatatatcaatgcatccctaagagttgtgtggtacacaacaccagtagccctgtctggtagccctacgtccagtgctaaatattttgtcatctcgattgtaatcgagatttatttcacaatgggttttaaaatttccaaacaaatggaggttttgattatctttttatttttggattataagatgatttcactatgaggttatgcatattactgaaactttcttttgatgtgatatttagttaattttaataaatatggcatatatgacacagtctcaattttagatgtcagtatttatttctttatatcattattgataaatttgttatatcttctgtgtagattatttcttttattattatcgtgtgcttcttattttctttctttcttttctttttatagagacaaggtctcactatgttgcccaggctggtctcaaactcctgagctcaagtgatcctctcgcctcagcctcccaaagtgctgggatcacaggcgagcaccaccacacctcgccacttattttcttttaatgttttgatcttttaaatctgctttgtctgatattaagaatgttttatcagctttttaaaattaagattgacatcttttttcccattctccttgttttctcctgttcagttgatttagtggagtttcttgtgtttctgtgatttaggtggttttcctgtaagcagcagatgtctatattttatttggcttttctttaatctagcctacaatccctttaaacttttaaatttgagatcattttaaatctacaggaagttggatgttaagatacatataggggagtcccaagtacccttcatccaatttctccaatggcaacatctcacataactatcctcaatctaaaaatcagaaaggcagggcgcagtggctaacgcctataatcccagcactttgggaggccaaggtgcatggatcacctgaggtcaggagtttgagaccagcctgaccaacatgcagaaacccagtctttactaaaaatacaaaaattagccgggcatggtggcacatgcctataatcccagctacttggaaggctgaggcaggagaattgcttgaacctgggaggtggaggttgcagtgagctgaggtcatgccattgcactccagcctgggcaacaagagataactccatctctaaacaaacaaacaaacaaacaaaaccaggaaaatggcattggtatagtctgtagactttaccaattattcagtttgcatatttcaccagtttaaatgcactcgtttgtgtgtttgtatgtgttggggggtgggttctggcaatgttatcacatgtaggttcatgttactaccaacataatcatgatacagaactttttcatcaccacaagtttcctttgcgctagcccttttatagcacccacccctccctccattcttaacacctgacaatcactaatctcttctccatctctgtaattttgatatttcaagaatgttatataagtatatagtatgtaaccttttggaattggcatctttcactcagcaatattcccctaagattcatccataagtgtatcaatagtttgttcatttttatgattgtgtagtgttctttggtatggatataccacagtttgcttaacccttcacttattgaaagacatttgagttgtatacattcagttttggggtactacaaataagctgctatgaatatcatgtatgggtttttatgtaaatataagttttcatttctcttggataaatgcccaagaatgcacttgttgggtcatatgggaaacataggtctataatctattttttaagaggtgagtttgatctatttactaataaaccatcctagtttttgtatgtaggaaatgttttaaatttggccacttcttggaagatagtttaggtgaatataaaacttgaagttgacaatatagtctcttaacacttgggaagtcttttggaagtctactgtcttttctttttgataatttttaaggtttttctttattgccagtgtcttatatacttttactacaaggtgtctgagtataccggaagtgcacatccaattagagggcactgaagaattctgctattctcttttcatatgtcacttctatgcaaatccctctgctaactcctatcaggcatatgttggagcctcacagtctactgtgtcttctagtttttaagcttttttcccccttttatctcactgtgctgctttttgcataattccctcttcaactatatccagtctagcacatataccatcaacttagtgttttgaataattgttttttgttttaaagacttctttttttttttttttttttttttttttttaagatggagccttgctctgttgcccaggctagagtgcagtgacacgatctcagctcactgcgacctctgcctcccgggttcaagtgattctcctgcctcagcctcctgagtagctgatattacaggtgcctgccaccacgcccggctaatttttgtatttttatagagatggggtttcccatcttggccaggttggtctcgaactcctgacctcgtgatctacccgcctcggcctcccaaagtgctgggattataggcgtgagccactgcgcccagcctaaagacttcttttttttaaaaaaaaattattattatcattattatctttagagacagggtctcactctgtcacccagcctagaatgctatggcatgatcatggctcactgcagcctcaaacttctgggctcaagcaatcctcccacttctgcctcccacatagctgggactgcaagtgcatgccaccatgtctgtcttgctttaaagatttctaatagacctgttttcccattaatgtttaaatttggcttctattgtttcattacgtatcttttaaattttttcattttttcctttttaattaatcaatttatttattaagatttttttcttcttgccttgtcttatggcactgatatctttctttttagatgaataatatctctatttctctcttaaacacctcaagcaaactgattttgaggtttttgtcagattcttccatagaaataatttcttctggagtgagttgatgttttatttttgctgactttttccttagcaatatatatcttgctgtatatgctgtatgtaaaaagtgtgtgtgtatgtgtgtgtgtgtgtggtttttcacattattagttgcagacttactttgagtaagacttttggtggctgctcttgtttccgtctctttctcctgtcttgtgttttctttgctacacacactgtgctcactcctctgcatttagcatttctgtattagcttctgtctgactctatgagatcctgagtccagaggcaagtcctatatggtgtttaggcttctgcactgtggtcatactgaagatactttagatccagtcacagaggcagtgggggccctgctttaactcccagtccggggatatatttttgccctgctaccttgcctagttccacagcttaccaaatctatagcttgggcagtaaattaggattagttttgttttttttttcccccttctttcattccttctaatagcctccttttacaaaaggagtggaagtttggaactcctgccccagccctgcgccatgctttactttaagcaagacctagctctggttgccacatgcatggttgccacactttaggccccaacacccttcagaagctggactccagctactgttcactggactccagctattgttcataattttttttttttttttttttttgagatggagtctcactctgttgcccaggctggagtgcagtggtgcgatctcggctcctgcaacctccgcctcccgagttcaagcgattctcctgtctcagcctcccgagtagctgggattacaggcgcgcgccaccaggcccagctaatttttttatttttagtagagacagttttcaccatgttggtcaggctggtctcaaactcctgacctcatgttccacccaccttggcctcccaaagtgctgggattacaggcatgagccaccatgcccggctactgttcaccgtttaaatcctggccactgctctgcatttctgctctgtttgtgacagagatgttgacattgtttgagcctagctatgtccttttctctccctttgtatttttctgtcattgatatgtttgtaacaggaagagtgcaccaaaatgagaattcaccacaatattttgacaagaagcacagcataactcttctgtttccaaagagcctgaaatgtttgaatcctcccatcaccaccaaccaccaccgccaccatcatcccagcactgtttctctctctctctctctctcacacacacacacacacacacacacacacacacacacagaacaacactcaaggccaggatctcctaaagccttgtgccgtgggtctccggtctgcctttccaagtttgtgtctcaccattctccttgcccatgtcagcacactgttgcccaacaaactgagcaatttgatcttcctggagcctattctatatcttactactttggggctagtttgtgttctgcctctcttcttgaaatgccattcaaaacaacccccagtctttcaagctcagacaaactcttcctctatggaaagacctatcaaatctgccatttgggaaagaatttccctcttctattaacccattacattgtttccaatttttattacatttgccatgatcaaaataccattttaaaacatcttacccagtctcaaacacttaacatagtcttatactgaagatgttaactgtttattaagaaactcttgtgtactagatgctgtccaaggcctttttagatacatcgttatctcatttaattccttcaccaattacggtatgaggtgaaatttgctcattttacagataaggaaattgagcgtgagtaagtcttacccaggtccttatgaaactagcagattcctaagacctctctgagacctactaaataggaattgctaaggatggggcccaggaatctgcattttaaccacctctttatatgatgctctagcactcctactgtttaaacctcgttgctcatcagaatcatctgggggttgagggaggtggcttaaaaatattcagaactgggcgggcgcagtggctcacacctgtaatcccagcactttgggaggctgaggcaggcggatcacaaggtcaggagttcaagaccagcctgaccaatatggtgaaaccccatctctactaaaaatacaaaaattagccaggcgtggtgtcacgtgtctgtagtcccagctactcaggaggctgaggcaggagaatcgcctgaacccgggaggcggaggttgcagtgagctgagactgagacactgcactccagcctaggtgacagagcaggactgtctcaaaaaaaaattttttttagaactaccaaattggaatttccagagtaatggcaattttttttttaccagtttctcagatgagtatgaagcaggtggttcaccaattcctgtgtgaaatatacctaggcaaatgtcagaaactggtaggccattgatagaatttgtgtgtgtgtgtgtgtgtgtgtgtgtgtgtgtgtgtgtgtgtgtgttataaaggtgactcaacatttaaaatcaagagaatccacataaaatatgaattccagtttctttctaaaaaattagaaggtcgggttacactaggttcttatgttgcaggtttgtttgattattttttaaaggcagggtcttgctctgttgtccaggctggagtgcagtggcaatggccatagctcactgcagccttgaacccctgagctcaggcaatcagcctcagcctcctgagtagctgggactacaggtgcatgccaccacacctataggctatcatgttgcaggtttctaggtgccttgatactttgatgtccctaataatgaaagtaactgcaagaagggcagtcagtttatgcctgaacataaggaaaaattcatatattaggagaacactgtacacagatataagtacaccagataaatgaatataagctttactaaagattcattaccaaatacaattttactcttcaaaaattttacttatcaaaaatttattgaagatacctcataatctcttccctttaataaaaattaaaatgtaaatgaaataaaattataggattcctaaatattaaagactactaagtacaagaaacaagattagtaaatattaacaaggttactaaatatcaaccatgagattcttgagtttctaatttgccattcacttgcagaagttcacctgtgagttttgcattggtagataaagaaattcatctacctgctacaattggcctcagattctaggtgaatctgatctgtctacagcactccaaatataaagaagaaataatgatagtttcactttctgtaaccctactcagtggattctgttgctctacttgtttagctgtaactactgtcagaaattttctgtggaggccaacacaggatagtcggttttttaatgtgatacagttgtgattgtaacaggctgtataaatagccatcagtgggtaccatggaaaccacctggaattctttatctctgtcctagaaagtactggagcttttgtacagcaactgaagacatatttaagatctttccaagtaataaaaaaggtctttgtgcattttaaacattaaataaaattaaatcacaaataattattaaatagcaaattactaggttaggccctttctctagctctctgggaatcatggttttcagacctatggttctcaaactggggctggaagtcaaaattaatgaacaaattaccccaaatattcttagtactttcaaaaatttatttggaaattacacatttgtctgctataaagttgcaaaggctaaataagtttttactgattaaaaatttacataataatttacttatcaaaaaattacataatatgactcatattcccttgtaaggatacataaggatagagaacggaaaatgtatccttatgtatgtatccttatccttgtatccttttttttttttctggttccactttgtttttattcactgaaaccaataaaagagttgaacacagcaaaacttggaacaacaaggaattaactgggtggcagcaaagggcaccaaaagaaaagataaattgcccaaaataaataagggctggtgaggaaaataaaaaatgtttccgaaaaaagtgggctgtgatgcaaggtactgtgagataaagaagcaattgtttcacgcaaaaaatagaggggggcacctcgctgaagccagcgaggccgctgcaccacgtggtgtcaggagaccttagcaatggcccaggttcgctggctgcatctgctgtgccaggcgcctactgtgcgctcctctcctcatccagcaaagctcggcctacatggaggtttgctgactcccccaggccaccttagttcctctcggagtctgtatgggtctgggcgagatgcaggcagcttatctgtttatggggctgcctcctccagtacacggagagctctttgaggcaagggacaatttgatctgtttcttcatccttaaaatttctgctgcttttgctgtttctgtgatttccttggtttctccattggtgtgcttaaagcgatctcctctacacgaacgctagggcagagcacattttcgcacaggcagcgccgcagcttgccctggatcttgtcgattgagttgaagtcggacacgtggaagacatgggtggacttgggctccgaggcgatctcctccagctcctccctgagcgcctctcccacgtccacggtgaagacgcggatgccggcgcgaatgccggcacggatgccggcacggtgggcagccgccgtggcgtccagcaccaggtcctggctgcagccattggtgagcagtatggccacctgcttgtaggcgcagtccccggagcggtggccggcgcgcggggagaagctgcgggctgtgatgtggtgcagcgcttcgccggtgttggtgttgccctgtggtaggcgatgcatcgggcggccgccttgacctcctcccgcgagccgaaaacgcccagttcgaaggccacgttgggcaggtcgctggagcgcacggtccccatgcagtcggggcccgcctcgaaggtatccaccaggttgactacccactgctgcaccttctcaaagtcctccttgcccacgctggaggaggtgtccaagaggaagaccagattgtagtggacgcttctgcaacctgtccgttgggcctatcagccgccgccccgactccacagcggcagcatccaaaggaagccggccacagcattccctcggagggcagccatggctctcctgttcttggggacaggcttttcttggccatttaggccaagaaagacgcagttagggcctactgcagcatggcctagcagggaggcactcgggctgccagcaggagtccaatcctgggcccaggcccactggaagcagcagctgggagaagacaccagccccaggcagccccctcctgggggtcacctgccagcaactcgcccactctccccccaataatctcacaaactcagactctagacaagacttgcagtaagtctggaggctttccccaggccagggggccagagaggatacatacataaggatatgtaggggaaaattagtcaaaaataaagaagttaagtgaagcgcaaatttgagggaaaaaaacttttaaataaaaatctccctggtaaacttcaaattcactaaaatcatttctatgtggatgattttctcttttctttaatatattttagtagctaaataatctacacaaatgagatttaaaaattgaactccagacaaatggaaacgtgaaggatcctatgagcatttcctgtccttataagggtggaggttttttcttcttcatctttttgtctccaactcctagcccagtctttggcatgcggtacttttttttttttttttttttcctttgaaaccaagtctcgctctgtcaccacgctggagtgcagtggcacaatctcaacttaaaacaaccaacaactcttgggttcaaacaattctcctgcctcgacctcccgagtagctgggattacaggcacctgccaccatgcccaactaatttttgtatttttagtagagacagggtttcactatgttggccagactggtctcaaactcctgacctcaggtgatccatctgcctcggccccccaaaggctgggattacaggcatgagccacctcacccggccacacgcagtacacttttagacagagtctactttgcacttcttggtgctgtttactggcacacatattcaaaagagtgaccatggctgatgagtgtgggtcgcaataactgatgcgtggccaaaggtgtttcccacaacagttggctttgattcaccgtgtatcttctgcactggctaccgtgtagttatgccttgcccttcatgggtcctgggattacttgactgctgccgaggctaacagcctcttttttattctgattgtgacccattatattagtctgttggccactgactcactagtacttggaagcaacccacagctatgttgtcacatccacgtattcccctcaacacgcagcaaattggggtgagaccaaggaaaggcccatgcacaaaggaacctgacagctgtcagcagtagcacctgaggccaattgtaggcggtaatagcacacactcagaaaaccatacgccagcagtgtgtgtgcatcacaatgccgggagtgcacatattgtgggctcctcatcaacagggaactcatcctgcattgcttttatatcccaactgtacttagcacaagactaaccatacagtaggtatctgtgcctataatgatttcaccaatatttctacatatgaactactattcatcatttagggtctcactaaatgttgcttctttgaagatatttgcttgaatcccctatggcattttgtagttacctccatgcagtaatgataatatccaagtcattcgttccagagtttatatcacttatgtaaagcgtataactccaaagctttgcaataggtgttcaagcagcatataatggatggatggatggatggatggatggttggttggatggataaacattaattgcttagaagccaagtggagcaatttgaaggagcactctctcctatacttcttgttttgttatgtcaattcatgaaatccccagaatgacacataaaaggaaaccaaaatcaaattaaaacttatgaacctaaaccatcttgtgtcatccttggtagacatttagtggaggaaatatgaaattgtactattcattcaaggagttaataggtaaaccagtttatccatcactaacttgtttttatagcatcaacatggtgtaaagacaaaaacaatcttgaactctagtaactatcatctatatttaatgcctctatgctacaacagtaagactctggatgattatcagtaccacttagaattagagcttcttgttaaataattcatacatttgatggggaagagcttcaaacaatgctcaaagctccagtaattaatgggctaattacgagatgcttgtaaaatggcttaaacactgaaagttcagtgtaggtataattgttttagagttaaccctgtgtatttaaatgtcaaaaaaaatattcagtgaagatgagtagagggttgggagagagaagagagatcataagatatcacaccagtttagaagtcttcactattgatttaagatttctaaaaaggctctggaaaggcagaatgcaggccttcctaatgccccaggcattttccaaccatgtctctaatcacataagaagaacatcacccatgagtcataggactctgggtactcttagaggtcagaaaccgctgcagtgcaagtcctttcagcctaatcgcctcttcactagcaacgcccaggttccacaagagtgctctgtttcattccaggacccgtgggagttaagaattgaaggtagttgattttttggttggttcatttgtttgtttttcctccctgttgtttgctgttctcagaaatgacctgctctctgagctttcttggagtgtaaggcatttcaattctagaaaggtggggctgggaggaaaatggtctccttgactgcaaaccatctagctgaaatgtctttcactcatcccactggaagggggaaaaaaagccttctttagaagatgaaacattgtcttgtgtcttttagcatcgttctgggcagtcagtctgttaggacatattgggcgattataggactgtctttttagagaaagccatgggtttcaagttagcaggaaccatctatcaattcttaagattatgccatgatttactgtcagagcatcatgtattctgattttctgcctcccatgaaacattgtgctttccttttctattgatgtatcaactataatagttacaagcagctacagaaaaatcaatagcgagctttcattactgtgtacatcaagtaaagagccccccgctgcaagagcacaacttgttagatgctcaccatggaaggtgtacaacactcaactgtttttttcccagactgcattagaaaaatcaactatagaaaaattataaaatagtatcatattctacatggaagcacagagaccctataaaatctctcaaagggaatggacaggaggcattatcatgtttcaaaatgagcacagcatttccaaagtgaatataaaggtatttaatgcgattcctacgtggtttttgtttctggttttcttttgcatttgtcttcttaaggtcatcaggatagtgggaggaaatactgaattagtatttactagattgactgcgtaagcagaaagtcaccactggctgaagtgcatgctgcaatagtcatgcgctcaacacccagccaagcaatgaggaccctaagaactgtgtgaatacagagtaatattaccagggtcttaatcagatccaggagtcccagacatacatatgcaaagttttattctctttccaagcacatgttggaaaaagaaaaagacttaggattttaaagcaacaaatacctttatttgcctttgggagcacattagctaccaattagtgcatgtaaattgagactgctgaaaaagagaatgtatgaactgatagtctgggtgggggactctcaaggcctcagaagttctctagcatttcagcatcaatttgggcaacataaagagatttccaaagcaaatcctaacaagtcctgaatctgaaccatgtacaaatcataaatcccatggaattcccaatcttaacatgtgcaatgaatgtattcagatctatatatttaagtaattagttcattactttctgatagttatgatctacataaaggttttccatatgttactgttatgatccaagtccaaactccagttattttttatctttagagataatatatttagcaagaaggcaaaaacgtgcctgataatttttatgttcatataagaatgttaagaaactacaaaaatgtgttttgaaatattacagtaacaaacaggaaacaaactaaaaccttgagtaccaggttaacttccccaaaataccattttaaaatactgatgaatttgaacaagtggtttgatttttgggcatctgttttgttttaggggaagggaggaatatttaaatgataaaattttcaaatatcccatttttttcatagttttcccaacttttgtggattttttttctatttcgtttttctatgcacccaaaaattatgtgagaattttgcatttgcctttgacattctaacaacagaatgaactgccattcagctatggtcactacattgagagtttaatgctccaaaaggtatgctctgcaaggactgtgaaaagattaattagtctttgctggtttcatcagaggatgctgagaaactggcaacaggctctctcctgcaccacagcccaagaggaagatcctcttttccccagcaaaccaggtagcaatgacatctgcaaggttagcctttctatttgccagtgtccctgacaattaaaacagtgaaaataattcatgcattgccaatcttaattacactcttgctttcgtttattccttttgctactttcctggctggtgttttgcatgttacttatatgcagtagtacttatctaaagcctactttagagtagttgtccttacaagaaatggaagtctaagtagagtggaatagcatttggatgattacagattctctgtgaattcagctaacactttcctcaaggtagcactcatgctcctgttaaaagtacattctttccacatgcttttttcacatagttaaaaagaaatccttccatgacatactgaaccctaataccaaataagctggtgcttcccctgagccacataggagaatgttggctctgagaatgtcgcagcatccctgcactgctgtgatgtgcagtcaacagagggtacgagctctggcagaaaacccagaacaggatattatgcacagtaggggctttccaacccagctgttccaagccctatagggtcaaaatgatggggaaatccagaatgacagtaattatgccatcaaccttacggctccctgccagagaggttgctggttagacatctatacatctagtagctgtttaatacattttttaaaacaggtatagtgaaagaatgcattttaagcaggaattgaaaatgtactaagaatgagacaataatgtatgagcaagtacttactttgtttcttactttaggtaagaaaaaataaaaggaaggaggaaaggtatggagggggagatagagggatggagggaaaagaaaaggaaagagaagtagatagaaaatcaaacacagatgaaagcaaagacaattatgattataattatttcattccctaatcatgtaagatttgaattttctaattaagaaaaaagaacaaaattagttcatatgtcaaaaagaggattctaaaattgcactgacataaatgttattctgtgattcagttgcattcttaaattggtgtgttatttatgcaaattatggtaagaaaaataattttggatatttttgttttacaaatatatttttcactttcaccacattatttccagaagtatctttccttccacaggggttccctgtctgctcttgcttcctccagctcctcaatatatgtacctttcagggttgtttcagcagtcctgaagttgtgtgtgtgtgtaagcatgattaagagtacttttgtgggagtgtgctattgccagcctcacagatggtgttatttcctgtgttagacttcctacttactgatagctgggctcacacttgacatcctctcttaactgcctctagaccaaaacatgcaaagtcttgcagtgtgggagggaacctgtggctgtgcattgggttcagttgataacaataatcaccagccctgatgagtcaccagagagcaatggggtgatactcaagtaccagagagatggtggtggtctctggtggccccaccactgtccaccacttgcaagtagataaactggtcattaaaggagctgtggagagccagatgcagtggcacatgcctgtagccccagctactgcagaggctgaggcaggaggaacacacaaggccaagagtttgaatctgacctgggcaacatagtgagacccctatctttaaaaataaagaaataagtaaatttttaaaaagaaaggcattatgagagtttcagcagaacatttaggaagggtcttctagagataatgatggacaagtcagtaagctgcttgttcacacactaatgtccagttcatgttgactgctatctacccacgtcttctcttctggcacctgccttagtggctggaagctctctcagaagcttaaaaagatgcttttattttacctacccaacaaggtttctacgcattccagcctccaaggaggggtggttcccctttgtgaactgagatttaggaatatctatgtttacaactccgggactaagattcaataaagcttcaggagggtggaagtgcagcttgtgagggcaaaactttagaatccagtggacttcttaaggtcatctgaacagtgagagtaagtactaggctcttatcccacttccaccaccaaccaatgcagaagtgggattaagattgataatcctgagatagcattaaatgttttgatacaggcatgcaatccataataatcacatcagataaacagttgttctgtgcacacaatctaacatttatgcattttttctttaaaaaacctttctgcatccaaatggcacattcattaagtttaaaatgaagcacaaaagatagagataaaatgaagcaactctataattatataaattataaatcttactgtaataattatacagtagacttggagaaagacaggcctttcaagaattggtttttagagatgtgtctaatgccttaaagaagtgtttgctttaaaatcttgaaaaagcctcatgtagaagtgagatgttgtaaagtcatcattggctttggccactgccaggtcgactaccagtttgctatttgtgatgtatttcactattttggaacttacaaagctattcctgatttccttctgttaatggaggattaatgacaatgctgaatccacagataataataaaaaaattttttttttttttggacagtctcactctgtcacccaggctggagtgcaatggtgcgatcttggctcactgcaacctccaccttttgggttcaagcgattctcctgcctcagcctcccaagtagctgggattgcaggtgccagccaccatgcccagctaatttttgtatttttagtagagacggggttccgccatgttggccaggctggtctcgaactcctgacctcaagtgatccacccgcttagtctccccaagtgctgggattacagaggtgagccaccgcgcctggcccaaaaatcaaattttcaacagttacttaaatccactacttcccaagatgaaagctttattaccaactgaaacttagagaactatgagtggtcgtgggctgcctctgaacttgctgtgggtatatttactgagccaccatgggggtcatgtgaagagtctagggttttgttttacatccttaacacttcagttttgaaaatccctataagacagtaatagttctatagggtaaactccaaagagggcttctgtagggggcataggagtggcacccacagttgtgggaacgtcagcaaacctgcatcctccctcaggggagaggtcagagcaactcagaatattatgactactgaaacaactttttgacttcacgatgctgcaaagcaatccacatccagtagaaaccatacttcaagtacccatacaaccattctggtttttctgagacggagtctcactctgtcacccaggctggagtgcagtggcgtgatctctgctcactgcaacttctgcctcccgggttcaagcaattctcctgcctcagcctcccaagtagctgggattacaggtgcccccccaccacacccggctaatttttgtatttttagtagagagggtgtttcaccatcttgaccaggctggtcttgaactcctgacctcgtgatccacccgcctcggcctcccaaagtgctgggattacaggtgtgagccaccgcacctggcccattctgttttttagtttcagtacagtattcaataaattacatgagatactcaacactttattataaaataagtttttggttagatgattttgtccaactgtgggctaatgtaagtattctgagcacatttaaggcaggctaggctaagctatgatgttcagaaggttaggtgtagtaaatgaatttgtgataatattttcaacttacgatgggcttattgagacataaccccatcgtaagttggagcatctatattgccgacatcttaacagagccgctctctgtatatgctgactgatacattaggcttgggataaatcatatctgacctttccttataatagcactgggtggacttcaaaggtggaagagatatttcttgttcaattaagtcatcattgcagaaagatgaaacagatgatactttataagccaggcactgtcctaccttgtggtaattcctattaaaacacatttaaaagattaggaaactgaaacttagagcaatttactaatttcaatgtcttatggccagtgcagtgttcacggatttaaaatcacttcaatgcaagtatcaataattctgctaaataatcaggagttgactataattaatctgcaaaaaccaaacaattttccccacttgaattaatgatttctgggtgtgaaagggaatggtcaccacatagtcttagtttccttccatgcaaaccttagaattgagcatagcacttacgaaaccaatatgatcagataataagatatcttactattatcactgtcttagcaaaatctgtcattacactgaaaaaaaaataggatagcttcttttgcaaatgtttcaagctccaaaagttcttagaataatctttcttgttattttctctgccacatggttacacaaatacaaaacaaattggaaatatggattttctgtctttcatatacaaatacatatccctgagcaattgaatgaattattaatttgttttgtccaaaaatggataagtatttggctttaatgatcttgttaggcaactagtttcccttcccttatagttctcaactccagagaccctctcttttcatttttcaagcaaataattcagaatcagtgttgatccactgcatgatttttcccccttcatttcaacctctgatcttactgagcagaattttaatagctaagggaaatgatgtaataataagtaacaagtatatctagctcttaaagagtagctttaatttaactctacaaactcataaaatattggatatttagaatgaatgtagatagtaacagttctcatatgggcataaaattgcaagaattttactgattgtgatgtattacttttagcacaaatagaatgtaccaagtacaataaacttcactaattcaggacatttcaacttggcaacaaaaagctcaatttatatgtacttaaagaaatgcaattttagtaacctcagtctaatgcttaattaaagtaacatgttaacacagtggggcacaattaaaaaggagttgggagcatcagctataatattcaaatacctagtttttttccaatccaattaatctattttgtgtgtctgtctcagaaaggatagtaccagacctgccaaaggtgttggcgggagtgagataaagtagatgcaaggggtttaataaaaattcaaagaatgacataaatataaagtattattctcagagattacaattcacaattagcctgcattttataaaatacctctaaaacatcttcaacatttaaaaattggatgttaaaattggtgatacattaataatactcttcattccttgaatttctgattctgttgctgactttagatagaatttatttttcatcagttacatactcaaaggctaaaacaggaaggcattcttttttgagacaaagtctcactatgtcacccaggctggagtgcagtggcgtgatctcagctctctgcaacctccacagaaaggcattctttaaacttcttatccaaaataaacccaaatacaatttccgaagtagcatagagttcaagttgctgagtcttacctagtgaaccatcagccaacactgtagaacatcatggtgctgccatatagtgtatttcttgctgttaggaaagcaaaattccctatcctattctgcattctggtattgacctgaccttaatatgtttgattctttttttttttttcctaatagggacagggtctctgtcacccaggctagaatggcccgatcacagttcattgcaacctcaaactcctgggcttaagcaatccccccgcctcagactcctgagaagctgcatgccaccacacccagctatttttttttttaatttttaaattttttgtcaaaatgggatctcactatatcagactggtctccaactcctggcctgaagcaatcctcctgcctcagcttcccaaagtgctaggattacgggtgtgagccacttactgtgtctggccatgtatttgattcttttaaaatcatgaatacttgttctttcaaacaacaaatatattatagtcatatcttggtttccaatttctgtttaaattaacaagatgagaattgaggcccagggaatcagaggttctccagatgtttcccttcattcacatctaatcctacccctccacaggaggtatgaaaccaactcattgcaaagatgtcacccagggccacatcacccagggatactggggttgggcgagagcataacgggacagtagagacctcacctaactttgccttcgtgcttgagcactaaggtcaagcaaacgttttatgaagtttcctgcccagtcaactgctgagtaatatacattataccaaataaactggttattttgtagagattgttgaatgctttcgttcaacattttcattttgaaaagattttttaaattatttattattattattattattattatttttgagacagagtctcgctctgtcctctaggctggagtgcaatggtgccatctcggctcactgcaacctccacctcccaggtttaagtgattctcatgccctagccttccaagtagctggaattacaggcgcgagccaccagcacccggctaatttttgtatttttagtaaagacggggtttcaccatgttgcccaagctggtctcgaactcctgacctcaggtaatcctcccgcctcagcctcccaaagtgctgggattagaggcataagccaccatgcctggtctgagaagatttttttaagagtgttctgctgctctttagtttcatgtaaacttattttccccatggcaccctcctcactgtcatccatgtcccttttctgcgtgagctggtatcgcttgctaccctctaagacctaggggatagaaaacaatgggctctagcctgccttctgcagggagcaaagcctagaaacaggaagctgctacaagcaatcccaactgcactgtgtccatggagtatcatgaatagtttacacgaagaggatttctttaaaatgctgaattatgaaggagtattgattgtgtgagtagaaatatctagaagactacatcttttgtcttctagtctaatgctctgacatggagaagtgtttccagtcaacggtttattctgaagatagcaccttgtccactaaatgcacattacattctcaaatttacctttttaaagattctctttgaaataatctctccaaaagtcagtaagaaacatgtcgagcactaccaaagctgagaaagtggagctgaatcgggctcttagcctcactcacacaaaataatattttaattggctaagctaatatttgatccaagttcataaaagtttgaaatcaaataattaaatgcaaatacagtcttcatcccaaagacgataagaatgcctttaagctaatatttttaacaagaactgttccacagcgctctcttgtaaattttatcatacctgaggcagttttcctcattcgattagctggaaagctgaatttatcccgaggcaaaccagacatctagtatgggctaaattcaacaactggagcttaaatttggcttaatatatccccacttggatctgcctgtttaattctctttcatatgataacgttggtttattcatagtcttgacttgccacctgaacaaactgaacctcatatcttattctaagagaataaaactttgcaaaaaccaccaaagtttctgaatggaaatcaaatacaaagtgatgctcaaaaactgtttcaggacgtgagtacaaaaaaaaaaaaatagtgaagaggttttctctgagggagggctgctctttacgaatgtggatgtttcctatgctttgggagcagatggtctttagcaggataaggactaagacctccaagaccagccaaggcagctgcaattgtgtctcaagcttgaaattctgcatgctacctattttatcaaacaccgtatgtatttggccttattgttaaatctattttaaatacaactttatttgaggtttaggggcaaactaggaaattgcttcatcctatatccctttaaattctgtttcctggctcagaatatcccatcgatttccagccagaggccttatttttctttgattttccgtatattttaatgtagttttcactatcatctgatatgcagaagttgatacaatgtacgatctgtttcataaacccctttagtatagcattctgtcctcatttttatccctaagaattctagaatgcaaattgcaaatgtgtatacagagggaaaatggaagtgttctatgcccgtgatgtggtccctaacacagctcacagccccaaaatacaggcttcctgaaaatactcagattaccacttcacaacatcaaacatatcaaatggttttccttctactcattgagctcaattacttcaattttgaatcaaattacactttttctagagacacattataggaaaagagctttgttatatttgaaattggttaggaatttaacaaggtgaggaactttaaaattgcttaagagtctaatagctgggggtattgatacatagaaagtgctcaatatatttttattgaattaatttgcatatgctttgtattcatgggcactgaatacaaattagccaattcaataataaatgcattggttgtcttttatgtgtgtggtgctatacctgtgtggtgtaggaaataagaaacataagtcagaatctctgccttctgagagaatgcaatctagcaggagaggcaaggcataaaccagtaaccggagaatccagaaaagcttgcctgggaagatgcaattgcaaatatgtggaagatgttccacagacaagcaagcaagaagactggcgtgtgaaacaaaacggattctcttattcgacaaatgtgaactgagctcctcctttgtccagacattatgctaggcctgggaaaggttataattaacaagagagacatatccctgtcctcataattgacagtgaaattaccatgtaatacccaatgccctgcatgatgggcaaatagagtgtgctgtagactcacagcagagaggacttcaaggaggcttcctggacgtaatgatatctgcgctgaggcccaggagattggtcaaaattatccaaataaaggttaggggaagaaagttccaggtactggccaggcacattcaagaaactgaaagaagttggtgggtggggtgaaataaaacgggatagataaacaggccagataaatgtgtttaatctttaacccagggtagtggggtgccattgaatgattttaagcagagggaactagaggacataattggattcacatttaaagttatcactcatgctgttgtgaggaaaatgcatttggaggcggggacaatattggaggaatcagttataaggaacagaggcgagttacggttgcagcaatggagaataaaggacagattcaagacgcaattagaaagcagaggcagcaactcggtgatggctggattggaaaagaagaggagagggaggagtcatgaatgaatctgggtctcaggcttgaaatcccaggtagatattgggtaacgggatggattcttagtccaatcattggtataagaaaagcaggagaaggagcaggtttagaaagccagacagattgagctacattttagacactgagtttgagatgtcccctggctatcaggtagagacatctagtaaatagtaaacagtcatatgtacagaaccaaataaagttatatgctgcagtcttccacatgggtcactgagtgagctggtgaaagcattgaacacactgaaataaaatgttcaacacatggaaaagtccaaaggatttgagaaaaacaagcaggcttggcactacaagccaaagcacccagccaaaaagtcctctttgaatccatttcccaagaaagtacaatctataatggagtttgtgcttttcacttgctgttataaaacaattctacacaaaataaaaataaagttggccatgaatttgatatggaagaatagcagcatgtcaaaggcaaaaaaaaaaaaaaagaagaagaaagaaaagaaaaaaagaaaaatgttggtttagggcaagaatttaaacaaaaaagcttattctcatatttcctgaggatctcctctgtgctgagcactggccaggcactaggaatacagctgcacataagaccaagtctctgcctacacggctttcattctagcattctagtgggggtgacgggcaattttgtttattgtttttttttttttgagacaagatctcactctgtttcccaggctggagtgcagtggcactatcttgcttcactgcagccccaacttcctgggatcaagtgattctcccacctcagcctcccaagtagctgagactataggcgcagaccatcacactcactaatttttgtatttttgtagagacagggtttctccatgttggccaggctggtcttgaactcctggggtcaagagatcctccagccttggcctgccaaagtgctgggattacaagcgtgagccactgcacccagcttggcagtttttaaaattagacaaatgtatgcataatgtaaggtcagtcatgaacaagcaataataagaacacatcatttagggatataagaaaacaggtgatattgtttggatccttgtccctgcccaaatctcatgtcgaactgtaatccccaatgctggaggtggggcctggtaggatgtctttggatcatggggtcatgatccaaaacaccaggtccctcagggcctggtgttgtcttggtgatagtgagttcttgccagatctggtaatttagaaatgtgtatcacctccctacacatactctctctctctggctcctgccttcaccatgtgatgtgcctgccccaccctcacccgccaccatgattttaatcttcttgagacctccccagaagctgagcagatgccaacaccatgcttcctgtaaagcctgcaggttcatgagccaattaaacctcttttctttataaattacccagtcttaggtatttctttatagcagtgcaagaacggcctagtggaaatacagaattctggattatgatcacctctggggcatcaggaattcgttcttgggaggaacacacagatagcctgaagggctctgaccatgttctggtcttcctgatgagtggtggattcataggtattcactatactatgtttaaaaactgacatatacattacatttaaaacattaattatagtaaaatatgcacaatgtaaaatttaccatcttaaccacttttccatagattttaatagacttttttttttttttttgagacagagtcttgctctgttgtccaggcttgagtgcagtggcatgatctcagctcactgcaacctccacctcgtgggttcaagtgattctcctgtctcagcctcctgagtagctgggattacaggtgccagccaccacacccggctaatttttgtatttttagaagagatggagtttctacatgttggccaggctggtcttaaactcctgacctcaagtgatccacccgccttggcctctcaaagtgctaggattacaggcatgagtcaccgcacctggccaactttattttttagagcagtttttttttttttttttttttttttttagacggagtcttactcttgtcacccaggctggagtgcaatggcacaatctcagctcactgcaacctccaactcccggattcaagtgattctcctgcctcagcctcccgagtagctgggattacaggcatgcaccaccacacccagctaatttttatatttttagtagagacagggtttcaccatgttgaccaggctggtctcaaactcctgacctcaggtgatctgcccgcctcggcctcccaaagtgctgggattacaggcgtgaaccaccgtgcccagccctggagtagttttaagttcaccacaaaattgagcaaaaggtacagagactccccacataacccctgccccgctactgtcagcattcccctaccagcacaagcctcccctactgtcagcattccacactggagtgaaacctttacaatgaatgccgctacattgacacatcctcatcacccaaagtccgctgttcacattaggtaggtagggctcgctgttgatgttgtacattctatggatttggacacacgtaatgacatgtatccaccattacagtatcatacagagtagtgtcactgccctagaagtcctctgtgctctgcccagtcatccctccttctaccaactactggcaaccacccatctttttattgtctccatagttttgtcttttccagaatgtcacacagttggaatcatacaatatagagccttttcaaagtggcttctttcatttaataatacacatttacgtttcctccatgtcttttcatgggccaacagctcgtttcattttagtgttgtgcaatatttcatggtctggatacaccacagtctaaccattcacatactaaaggacattttggttactttcaagtttgggcaattatgaataaagctgctataaacatccctatgcatgtttttgtgcagacatacattttcttcataaccatttaaacgtatacagttcagtagtgttaagttcatttgcattgttatacaaccaatatccaaaattcttatctgacaaactgaaactctatacccatcaaacaacaacctctgttcctcattcctgccaaccaccattctattttctgtgcctaacaaattcatttgacacaggtgcctctaggtgcctcttaaaagtggactcataagcgtttcctttttgtgactggcttatttcacttagcataatgtcttcagtgtgacagagaccagagtagcccaccattccctttgaacattggtattgtaccacaaaatcaagtggttttcaaacatttttgatccgtgggagctttttttctaaaccatgtatacaaaaaaagtcaaaagtggagaaattcttatttcttagccttggcacctgtacaatacaattggaaggggttggggtggggcttgtccagagaagtccccacaaaggtgccccataacactagactgtactcagtctccatcgtgagactattatttataatagtgatttgtggcatttaagatgtgaaatttccttcaaaatctcaaacattaagttgtgttacatgccaatttaaatgtcaaatgtatattatttcattcaaattatctgaaaaccattcattcgcatatcatgagaccctttagaaacggaactacttgactaaccagcacttcccattctccaactccagcaagtgacagaaacttgcaggcattgacacaataggggaaaaaaaactccaggactttaaaataatgagccctgcagggttcagattcctgctccgcccgagggaagtctcatggtagagcatacaaggactttagagtgagacaggcctggtcataaattcaagatcttcttactagcattaaaatcctagatgagcttctcaacccctttaagcctctgtttttccactgggaaaatgatattaataataacttccccataagattcttaagaggattaaatgagaaaacatatgttaaagacacttgtcacattaattggtgtttggtaaatgttatttcctccctcattcttactgactttgagatcctgggaaagccatttaatccctctgattcttaatttcatcatacctataacaccttctaggatagaatcctttacaatttagcttatcctgaatcccactcctaggccagttttctacatactctcactaactcctgggatttcacccatcacccatcagctgtacactgataagtcccaaatctatacctccagcccaagcctttctcttgaggtctagacctttatgtctggccatttcctggacatcttcacccaatattccatgtgccccttaaattcaacatggccatacctagactccttaaatattgcttctcaaatctgctgctcctcttggtgacagccaccaccttcttcccttaacagacacctggaagccatccaggaccctcactctttctctctgtctctcctattttttattaacccaaggccagcaaaccctgttgcatcaaccatcttgatgcctttcaagtccctccccacctccttggccgccgtatttctcatctgtgttcctgcagcaggatcctggctggtctccctccatgagcctgctctcccctcaccctcctgcacacactagtcccttctacacacttctggcagaatgctttctttaaatcagaaagctgaccatttccctctttcctaaaaccattcagtgtttctgccttgcttttggaacaaaatccagaccatctgacatgcagcactcttcacagtcttaaaccttagggcccatcttcatcttgcccacctattccttctccacaaaggctgagctgtttaacagtgtaccaaagacctctctgttctttccttctctagggtttgtatatagaccactgtctgctaggatgtgcgttctcttccacgcgttgctcagctcattctaactcatctttcaaaactcctcaggtgtcaccttccccagggacccctcttttctcttgaaccctgtgttagctgcccatcctgtaagggcactgcttatctgtatcacattaattgagctactgtacacagagactgtgccttttatttccatatctccaacacccagaccagagctgttaagactgaatgaataaatgaatgaatgaatgaatgaatgtgtatacattgtgtatacacgaaggtatgaaataataaataaagcatgttaagaatgttttgtaaactacaaagcaccaatcagttgtaagggcctgttatttctgtgtacatatatagtatatacactttatatctactttttttttttttttttaagagacagggtctcactctgttgcccaggctggagtgcagtggcacaattacagcctactgtacttgaactcctgggctcaaatgatgctcctacttcagcctctcaagtagctgagactacaggcacacaccaccacatccagccaactttttatttttatttttagggggagacaagggtcttgctgtggtgcctaggctggtctcaaactcctgggctgaagcaatcctccatttttgtagacagctcctgccaagggcagcattttcttattattaatttgcctatgaaagcacaaaattatacattctagttggtaaaaataactcttgggttagtgtgtgtgcatgtgtgtgtgtgtacacacctatattattctaagggacttatgggaatgaatttaaaatcttgagtttcagatattgctggaaactggagacagaatctcagtttaggtgtcagcaccaaaattatcctgccctcccctccccaatccctaaacagccctgatttctttttaaaagtgaactttgttcgtatgaaaagaacgaacatgttctgcaacttccagaagttcttacaaaattagttatgcagattatccatatttagccctttaaaaaataattttgaacattagctccttacagaaaatctattttctttctccttttctagaggaaagggccttctgagggcaaatcgtgtgacagtttatagattgtcatctctctaaagacctcaaggaaaagaagtattttctatgtgcaaaacggtacctcttttttccacctttatgtcctttaaaagattagataaaccagctcgcacctgtaattaatcccagataactcccagttactgggaccgggagtagctgaggccagaggatcgctcaagcccaggagttcaaggctacagtgagctacgatgtcaccactgcttttctgcctgggtgacagaacgagactctgtccctatttattaaaaaaaaatcagacaataatattagtaatttttaaaaaataaaaaatatttaaaatctttaaaaagacaaaaaagactaaggaattttttcccacttttgaaaaattaacaaagataattaccttatcagcaaaagtcaacacactccatgtgagcctcacagcccccagccccctggctcagcagaggacccatttctgaaaaagtgtgttgaatgacaaggtttataggctgcaccattatggcagctaccagggaggcagagaagagtatcttcctcttcagagagagcctgaatgttgtgtgtgactgaaaagtcagtactataatatattcaagaagacctaagggtttactttccaataaggatggaaaaaatctgagcaccccactgtgagcttatcgtaatgctgcttcatataaaaagttggtaattagtccctgagtgaataaagtagaatagatgataacagattgatactaagagaagcacaaaatgctctcgccagtcatcaaaatttaaaggctatagagaaagggttggggatgcctctgtctgtttacatactatttccaactcagaatttgtaatgatagggtttattaactggtgtttttaaattgtatgaaaatgaagcttatataaatttcaaaggaacgcacagagtgccaaatgcaggagcctttgcaatccagcctaaaatgccacagaagaactggtggaaatttttatctcatatccatctcttttcctccagctgggggtcttttgctaaaatccagatgtgggacaatgctatttaatatgagaaccaaacagcaaatttcaaaaacatgtatttctgggaactccagaacatgtaatcatttgtctagattttggtttttttaatataatttaatatcaattcacttgtatatttctgttgttagagactcctgctatagatgagttcagactcccaagttgccagctactatccattacttaatatggaataggacttgatttttattggagggacattccagagaaaatggaaatcaggacgatttcagtgtttacatttgggccatagctttgcattaaacatgctttccctttccatccccaagttctgagaatttaaatttctatttatatgggattcatgttttaattttcatgaaaaagtatgcattttcatcaaaactaattccatgagtaccgaggaaacacacttaagtttctaaactcttcctaaaaagtaaatacaagtgaaccacataaatgagtgaaaattccaggtcttctgggaggtgttatcatttgtattttggcacttaatctcttccattgcttttaggtccttgtgaactatctgtgaactacctcaattacagtggaaaatccagggtctacctgtctgtcaggtccagtccgcagcatcccagggactgattccagtccaaatgagaacataagcacgtttcccttaacacaaaactgaccagtgaaaatcctcatttgcaaaacatgtaaattagaacttgattattcagatcacaaaaggattcatcacaggactttttgaatagaaaagactattacatgtaaagtacagtattttatttcagggagagatccattacatatatgccaaatttttgaaaatcagtttctagttagaaaaaggaaggaaattggcttgtgaaataatttaacaggtcaaattcacaattgtatcaatcttggacaaatgcaccaataatgtgaagcaaggagttaccggtgtattccctggggatggctgaactaaagcatatcccttatccccaggagcttacggtctgcatagggaaacagacagttaaatagacagaagccagcatcaaggcaggcagcagagcaatgatcctggaatggcatggtcagtaaatgagaggaattcactcagaacttcttcaggatcattgccatgtgtatagatgtagaaacaaaatagacattcggcaagtaagaatctttgggacaattagcagcatatgttttattatttcatgataacattcatcaaaatagcttaatgggataattaactcaggcatgtggattcaattctgatcagctttagcaaaaaatagtatatttagccaaaatatgagacacctatatattttcctgccagaaggaaaattgcacatatttcccaagttttgggggaaaagggtgtcagtttggaccagtattcatagaaattaaccatcgaggctggacgcagtagctcacgcctgtaatcccagcactttgggaggccaaggtgggtggatcactggaagtcaggaatttgagaccaccctagtcaacatggtgaaaccccatctctactaaaaatataaaaattagctgggtgtggtgacacaagtctgtaaccccagctactcaggtggctgaggcaggaggattgcttgaactcaggaggtggaggttgcagtgagccgagatcgcaccactgcactacagcctggcaacagagcaagactctgtctcaaaataaaaaaaagaaagaagttaaccattgaatgctgagctgaagactctaaattatcattctataatagtaagtggataaaccaaaacttatgatctagcctttgttttatgtttgttggtagttttctttctttttgtttttccttaacagagcagcatagtttatcacagaatgttaaaactggttctcaaaaaaatacaattatcaaaaaaggaaagtttcaaacaactttctaaaaagggtattcttcatttttcttacattttacattcattctatgcaaatttctacatcctctctattaatctctgactgttactagctttgcttgctggtgagagtatttttcactgtagcgtaaaataatactgcatttcaaatttttaatagtcatgttttaatcactataatgcaaaacaaatgtagatttttctatcatgtaccaaggtaggacatattgaaggtatttctgattgtttatattttgcaattttgaaccaagtatgactctggatacatagccatacttataaatatttttaagtaacttaaaatcatttttaaaatatattaaataagacaggtggaatatgctttactaactgtaaagtgccgcatgggtaaaatgtccagagcacaccaatgtggttgccaatttaaatgccaccggaagactcagagctccttattgtgtagtatttatgtttgtacaactcatcaatgaataatcaactatgtttgagtctgccatctcactttgaaagagatatggtaccaactcactacataactatttcagtactaattcctcactgtttttaatttgggtcagagacttggggatggaaaggggaagcatgtttaatgcaaagctatggcccaaatgtaaacactgaaatcgtcctgaacacacttcaacagcgaatgtatgacagcccagtgtaaagccatttagaaataacaagatggacatgtacacatatgtaggttaagttcaacagtatataatgcccaaaacagtatatagtgggtatgaattacttgaaccgagtttagtatctttatccttttagtcatagtactgtgtggttttctccatattctctttcttatttatttttgtccaattagaaaataaagcagggcagggtggctgcatctgtttactttctgagcatgggtgtatgtaaacacacacacgtatctgtctattttttccagaggcttctatgtacacatcatataaaagtcatactgttaacataaatcaaccccagaagagaaattccagcataccgttttcccttgcctattgtctgtgtgtgtgtttgtatgtcagtctgtctttttttattctggctttctctcttattcagtatttataaggacctttagggcagatgtctaaaaacaactgcatagtcatcaggagttaggcggaatgaaatgcctttgctcatcttctctacatgagtgaccagaagaaaaaaaagaaacacagagtatcagactttagaaactacatgcaggttaaagggcactgaccatcctggcttgtgttctgcctaaaggacaaggctctcatttgataaagatcattagtcaccaagatatatattttagagagttcccagtagcgaatattctgttggcagtcactggagtgtaccagatggttcattagcataggctagacaagtcaaagactttcagaatcatttagaaaatgtcaaacagaaacaagaatcctgtcactttttattagaattaactacatcataccctggacacagatttcaccttgggtcagaaaaattaatacagaattatatgaattgtgtaatatactgggttaagataggtctttctccagggactcatttgctggcaatatattaagatccctctactttaggaatcctcaatcctttccttttgtaagatatgaaaagagttgaccttgctcaaaatccactggtgtctaattgatttgaggtatatgcagaatttcaacaagacattcttctaaagctcttttgtgatccttttcccaggaagtttggtgagtggggtttactgaatattcagcagcatgtaaagtatgtttatgtcaaaaggaaaatacatccattaattgaacacattgctttagtaaacaggaattgaaatgctattgaaatgttgctttttttttttttttttttaatgcagatgtcaaaaaccttgaaaacttccagctggtagaaggtgtccaggaacaagtcaatgccgccctgctggactacacaatgtgtaactacccgcagcagacagagaaatttggacagctacttcttcgactacccgaaatccgggccatcagtatgcaggctgaagaatacctctactacaagcacctgaacggggatgtgccctataataaccttctcattgaaatgttgcatgccaaaagagcataagttacaacccctaggagctctgctttcaaaacaaaaagagattgggggagtggggagggggaagaagaacaggaagaaaaaaagtactctgaactgctccaagtaacgctaattaaaaacttgctttaaagatattgaatttaaaaaggcataataatcaaatacttaatagcaaataaatgatgtatcagggtatttgtattgcaaactgtgaatcaaaggcttcacagccccagaggattccatataaaagacattgtaatggagtggattgaactcacagatggataccaacacggtcagaagaaaaacggacagaacggttcttgtatatttaaactgatctccactatgaagaaatttaggaactaatcttattaattaggcttatacagcgggggatttgagcttacaggattcctccatggtaaagctgaactgaaacaattctcaagaatgcatcagctgtacctacaatagcccctccctcttcctttgaaggccccagcacctctgccctgtggtcaccgaatctgtactaaggacctgtgttcagccacacccagtggtagctccaccaaatcatgaacagcctaattttgagtgtctgtgtcttagacctgcaaacagctaataggaaattctattaatatgttagcttgccattttaaatatgttctgagggttgttttgtctcgtgttcatgatgttaagaaaatgcaggcagtatccctcatcttatgtaagtgttaattaatattaagggaaatgactacaaactttcaaagcaaatgctccatagctaaagcaacttagaccttatttctgctactgttgctgaaatgtggctttggcattgttggatttcataaaaaatttctggcaggaagtcttgttagtatacatcagtctttttcatcatccaagtttgtagttcatttaaaaatacaacattaaacacattttgctaggatgtcaaatagtcacagttctaagtagttggaaacaaaattgacgcatgttaatctatgcaaagagaaaggaaaggatgaggtgatgtattgactcaaggttcattcttgctgcaattgaacatcctcaagagttgggatggaaatggtgatttttacatgtgtcctggaaagatattaaagtaattcaaatcttccccaaaggggaaaggaagagagtgatactgacctttttaagtcatagaccaaagtctgctgtagaacaaatatgggaggacaaagaatcgcaaattcttcaaatgactattatcagtattattaacatgcgatgccacaggtatgaaagtcttgccttatttcacaattttaaaaggtagctgtgcagatgtggatcaacatttgtttaaaataaagtattaatactttaaagtcaaataagatatagtgtttacattctttaggtcctgaggggcagggggatctgtgatataacaaaatagcaaaagcggtaatttccttaatgttatttttctgattggtaattatttttaacagtacttaattattctatgtcgtgagacactaaaatcaaaaacgggaatctcatttagactttaatttttttgagattatcggcggcacaatcactttgtagaaactgtaaaaaataaaagtatctcctagtcccttaattttttcataaatatttctggcttttgagtagtgtatttatattgtatatcatactttcaactgtagacaattatgatgctaatttattgtttcttggtttcacctttgtataagatatagccaagactgaagaaaccaaatatatgtgtttactgtagcatgtcttcaaattagtggaacttagttcagggacatagaagagtcttaatgaattaaaatcattcacttgattaaatgtctgtaaatcttcatcattcctactgtagtttatttaatatctattgtaaattatgtgacttgtagcttcctctggttttcaagtaaactcaacaaggtggagtcttacctggttttcctttccaagcattgtaaattgtataccaaagatattagttattacttctgtgtgtacaaagaggattattttattatgtttattaatcacctctaatactcatccacatgaagggtacacattaggtaagctgggcgttgactcatgcgcagtctcagtcacccgtgttatcttcgtggctcaaaggacaatgcaaaatcgccgatcagagctcatacccaaagcattacagagaacagcagcatcattgccctccccagctgaaaaacaagttggctagaagatacatggagaggaatggtgtggtcaacagttaatgaaacggttctatcatgcatgtgtaatgtggatggagacaattataagatttgactataactatttggagggtctttaacattgccaaaaaaacaaatatgttgatttttattttattttattttttattttaagaggcgggatcttgatctcacatgttgcccaggctggccttgaactcctgggctcaagcattcctcctgcctcagcctcccccatagctgggactaggggtgcatgccagcatacctggctacgttgactcttaaaatctatgttctcttattttaaagatacagtgctccccactgaaaattaaacctaaaaaatgtcacatattggtatgttgttaacctggtagattaaatcatgagaatgattagaaagacgggcaacacagcgggttacatccacactgctgatcacaccaacgacaggagctgataagcaagaaagcgtcacagccagcgtctgttcacccaaggttgacaagtgaagtttctctaatgttgattgttagccgatttgtaacctggcatttacttagcaactgccttatcaattacaggatttgccggtaaaagcagactcaaatataaaggtttttggcttaacttggtttattatagttgctctatgtttgtaaacagacaatctctaatgtctgattatttgtatcacagatctgcagctgccttggacttgaatccatgcaatgtttagagtgtgaagtcagttacttgttgatgttttcttactgtatcaatgaaatacatattgtcatgtcagttcttgccaggaacttctcaacaaaatggaattttttttttcagtatttcaataaatattgatatgcccagcctgataatttttaaaa

SEQ ID NO: 649 - DNA, 22439 bp, Homo sapiens
ccgaggggactggctccgccacgccccgcccctggctcccccgggagggcggctcaggggcggggacgggggcgtggtcccgccgtataagaacggagggggcggcggcgggacggctcactcggtgccgctgcctaggggctgtagaggtcgcgccgctcctgctggggcctgcccacgccaaggacctgcctctgtcgcctcctcttctattgcccaggtgagtccgcgacccccctcctctaaaggtgcggcgatgcggcagcagccccagggagccgcgagctcacttagtgggggtccgcccccactaagtggtgctcaggtctttgcccagcctggtagggggcaggcggacccgaggggagctgcggacaggtgccgagacccggtgctcctttcccctcctgctccctcgaggacccccgcccctgacacacccgtcccaaagggccagaagagacgctccgaaagggagctacaactttccagagacctggggcttggcaaactccagcgagttcctgctccgcgcgtcctgcaggctgcgcgctggccaggcgcgggcagggcgtctgaagagtgtgtgatcggcgcctccgctcctacctggatcagacggcgccccccgccacccatgcctcccttcctggcttgcagtccctcgggctcgccccggcgctcccgcgggcgcgcacaccttcgccggcccgccgagtgtgaattcgaattcggcggtttcactaggcgcagctggagacgcagcggtccggggcttggatctggttggggaggggaggggcgcttcctaggctcattgccaagtcctgagttttaaggagaagggcggagatccttaaatttaatgcgctcacatcagactgtggacaccatgagcagcaaagggatccaagccagtgacttgtgcgctgcgcgtctctcagaaacttcttgggaatgcggtgtctgtgaaacctgcttcctctccttttgaaaatgaaacttgctttactgcgtaggtgaaaagccacggcaagtgggtcgactcggacggataccggtgcggctgccccgggaggtgtcgcagttcggggactcccttcgcactggtcgcgaggcaggagggagcagggtgggaggcgagtcagaggagggtgacttacctgaagaatacaggttggtagcctgcacacctgaactcaacgctggcgggcgagaaaaccaagcagcgctacctccaagtaagggcgctcccctggagaaatgaatgcctggcgagcttctggagaacccactattagggctggaccctgcgggagggatagtgtcagctcccttccccttcgcccttttttgtccataggtaggcttttgtagggctctaaccagttccctggcttaattaagtaggggcctgcttcctttttaacatttttgctttcttacggagatataaagtgcatacaaatgaagtgcttaaaatgcacttatagtaagaaagcttttataaatactatgtgcataattatttgtattgtgacaacttggtcttcaggttactttgtaggtgggttaggagactgaaccagcccaggaaataaagttagggtgattagatcctcccaaagtacacttctggctggctcagctgccctctgcgtgcaggaaagagggtgaccgttgttggcgacagcaacctttcaacgtgagtaaattggcaaggaaatgagcccaggaagtaagttgggcagccgcaagagtggtaggagagcttacccagaattttactgtcttaaatccccaagggtattattgagggtgtgagaccagccacgttaggccctgcagtggaaaagggggagggggatggggagtaaagaatgctgacttttctctgggcttttagggaaacctctgagctgggctgcaggggttctgtcctttgacattcttgtttgtgaagatggaaaatgatctctggagtcaagcttagtttatttcagataatgaactttttctcttaaggtatacccatagctttagagtacatatattctcaataaagagtttttaggaagattttggtatattgtatataattgttcaggtagctatgcgggggtagggggctcccataacaaagtttaaaaaaaaaaaaaaactctgccaggaggcctctaaattgttaccaaaacaaagatccctaatttcataagcagcttcagtgagcacatagaattaacagccatatttcttacgctgttttttccacaatacctaccttgtatccagggattaaattcatgtaattctgaaggaaaggatttggctcttagcctgcttgtcagagtgagcatgacttagttgtgcacctgtggctatctctacctggtttcttctcttgtaccgtgagcacaagtagccactgaaatctcccgagttccagaggcccgtcccccctcagctgtatctccccatagtgcacacattcagcccacattcccccgtgttcaaggccagggcagatcatgcacatcttgcgctgccggtcagagaacagaattcctcatatttctgaaagtccaaggaacagtgcagcagtaaaaataacttaaaagtgggctgtagtgctcttgttttcacagtaccattaaccagacacatttgatagaaaatttaaaaacttcatttaaaaaactttttttgttgtttttactgctcaagtacataggaccttgtcttcatcttttgtctctgatcaatgttgtgttcatggagttacctactaaagaaatggaaacccaaaggctctcagtggatgagttgaaccttttttttttttttttgcattactgagagaagtcgtggaagcccaaaactagtttcatgagttaagctaaacttatgttttggggtttcttggtttcacacctgtctctgggtgtatctgctattttgtgtgcatgtgtgtgtgtttaggagttaaggagtaatgtggaatgtgaggttacttggaataaaacattacttgggttagataaggtctgttgctttttgtgttgtcattgaggtaaacaaggcactgtaggaaaatgcttcctgccatcttggtgttttgactatagtacattaaaatggcataaattgtattacaatgaagcagacacctctgtgtttaaagaaatgttcatgtgtttaaagctgcttgggtacattagtactgctgatttcttgtgatgttttcaggccataagatctctcaaaacgtttttacgctttcattgcaggccgcataaagaggcttgcatttggaattcaaatagtttagaggaagcatctttatatagttcaactaggtaaggaagccttaagaattgttcagaattaatagattttgtacagctggcccccacagtctgttctagaactgtttgaaaacttcttggaacaacagaaaaaaaatatgaaaaaataattgctgatgttaagcaactctctccctgtaggatgttttttagtgtcggagcttgagactaaagtcttggagtcttggtcacaaaactgcatggagtgttgtttatttcttggagaaccgtgattgagtcagtaagtagttaagtgcttcctaggcagtagctagtgccaggtgctgaggacgccaaggcagtggtgtttggaaatgcctttggaagagctctggatgcgagaggagctgggctggctttatcatgcagtcgaggcactccgatttctctcattagtctcagccactggcatatgagcgccggaaagcggaatctgtgctcactgctgactccccagtgcctgcttatagagctggcctggcacacagaaggtgttctgtcatttggatacatgttcggttggcggcttgcaaagagggaggcgtacttgaagtgggagttctcttggtggaccgaggcaggcaggccaatggctgagtcctcttttaagtagaggccacaggggtataggtttggagctgaggggcagtgactagctaattgaccaacagctgaaactcctcaagctgagctccagacccactcccttaagcacttgccatccttcccaccctccctgacaccagcctcacatggctcactcagccttttctctctctctgttcactcagttgctagttctgctgattctttctcttttttattgtttcccactgtcatcactgacctggtttaggggcccgtagacaggaacttgatgagggcagtaagtgagtccgcctcccctgcctctggctagttctacagtctgtgcatttggaactccatccaagcgcacagggactgcctgcacctctggaagctgaacctcctcttcaagaccgtgcctttctgactctttactcttgacccaccctccaccccccatggcagagtctccctaactgcccttctttgcctcacagaacagatactcatatctgcacaaaggaatgatactcctttctcaccaaactttgaatccagcttcaggcccttcccacaggcttctgactgacattattccatctggggacccgctcttttcacacctcgattcattaatactttgttgttgtttgttcttttgagacggagtcttactctgtcgccaggctggagtgcagtagcacgatctctgctcactgcaacctccacctcgtgggttcaagcgatcctcctacctcagcctcctgaatagctgggactacaggtgcacaccaccacacccagctaattttttgtatttttagtagagatggggtttcaccatgttggccatgatggtcttggtctcttgacctcgtgatctgcctgcctcagcctctcaaaatgctgggattacaggtgtgagccaccatgcccggccaatactttcttacagttcttccttctaccttcttttctagttcttaaatttttatctttgattgaataagcacaaagtcccatactgttaccatacttagcctcctataaaaacattttgagaagaaaattatccatgaaactgcaactgcccacaccctcttccgttgccgtaagcatctctcaacttgtttagcccttatgaagatagaagaggtaaccctccacctttcctggctgcttgcccctgatccccaaacacactctgtccatcgttgccctctgctcgtcgtagttagagatgggcattaggatctccacagctagccagtgctatatggacttgggcagtttcaatcgtcattcctgtggaataactgcagcacagcagtagcagaaagaggactgatccagaagcagagatgacgcgtacactcatcaagtgcctgatatgtgtctagaggcttgctcacagctgctcagctagagctagcaccgctgctatctcctgtgcccaggctgtttgtcatctttttacctcctctgcttctgaggctgactttagctgtggggagacctgggctctggtcctggcagagcctttacctcttcagccttcagcttcttcattataataaggacaataaattagatcagtgctttccagtaaaaatatgagagacacgattaacttcctagtagtcccattaaagagtagaagtaggtgaaatttggccaggggcagtgactcacagctgtaacctcaggactttgggaggctgaggcaggaggatcccttgagtccaggagttccagaccagcctgtatgacacagcaagaccccatctatataaaaacaattttttaaaaaattagctgggtgtggtggcacgtgcctgtggtaccagctactcaggaggctgaggcaggagaattgcttgagcccaggaagtcaaggctgcagtgagctgccatcgaaccacggcactgcagccttggcaatagggtgagaccctgtatcaaaaaaaagtgaaattcattttaataagtgtatttaatctaccatatcaaatttcatcatttcagtatgtaatcaatataaaaaatctaaatgagatagtttacattccttttatcatactgagaccttgatatccagtatgtgttttagcatttacagcggtacctactgtattgggcagcacaagtctagaccatcagcaaaaatgtttcactctcaagttctgattctgcatgtgtgggaggcaagatttaacaacccaaagttatggaaggagagtaggaagcaggatatcagctccacagggccagggatctttgtctctttcttcccagtgcatcacaagctcctggagcagtgcttgaaacatagtaggcatgcacatttttgaaagagtgaaaggaaagtcagttatggccaacttactgacagtcattcacactgtgcgtcagacttgacactaaaacacatggtgttggattcctagcccggtgctcattctttttttttttttttatagtttcttagagaataatcataaggcaatagaatttcaaggaactgctgataaaatcttctgagactggcaggggaccaggactcagtttatcaacaattaagttttatcaacaattaaaatttgagtgaaattgcaagaggaagtaacattcaagtcaagtcaaagtgtttgagctgtctggtgacagcacattaattacttgatgaacgctaaacatgagctgctgctatgcgcagtacctggaggcccggaacctgcaacttgaatgccaactcctaagggaaggatccatgcaaaacaaaaacctggatggaactatgcacgtaattagcatctgctctgaaatggaggtcagctcacacttagacacttgtgaatggggtgtgtttatggtctaacgtatgataagggtggcatttgaggaactaagagttgcttgtccctttcctgataaggcctgggcagggaagctgctagtgattagacaggacttttagctgactgaggtcttccttttggacaactgtttaaagctgtaggctggagagttagatggtaaagtagcctgtggaagcagcctttgatgaaacccggaggctgtcagctcttaaaccctgtggattacgtgtaagctgagtcattcttacagtaagcagtctcctccttaggaatcatctcatttttctcagtctgggcaatctctaaaacagaaaggcaggctctctttggggagctctttaaatgaattcagaccagtaacacctctgatctagaaagaagcagttgatggtgggaaggtggttaccaagtagcaacaaggattatttccatttcaagttgtgtgtgtagcacttaatgctgacaccttggaaaaaaatcaaggcttttatgccctgcttccatctgaagatgtctgtgtcctgaccttgttaatatttccatttgcaaccacgtcagagtatacctttcaacacttgaacttgtgtggcatccctgctgtaatatctaggccagtgttttgattctgtttgctgttttgcggccacagcattagttcttccagcgttatctctccacccacacttgcccaagcatcctattttcaaaggtgggaaagagctttctgtttggagttgtcgttggtgggtgtctatggatggagcccagtgataaccattcagactgtgtgttggcttctcacttcttagtgggaagtgagaattcatggaggccccttaaacagcggagatcacagcctggttctgtggcctgcctgggtttcagtccagggctgctttccacagctcatgtgggaatctaaccacattttttgactctagtaaacatcattggtaaatggctggaggatgataataaccttaagaaaatagaatgagacgctggctgaatgcaatggagctgagagtgagaaaagaccaactgtggggtttgttgcgtcactgacttagaaatgttttctctgggcacagctttgtggcctggggcagttacttctttgaactcaggtagaatgtgttgcgggcatttaagtgggcaactgtaaaaataacatcttggaaaaatagtgagcataggatatattttattggccttttaaaaagtaaagcattattttatctgtttttattgcttcaggccattcataatctaagctgctattccatgtacatgaaacactcgagtgtctgttatctgtaactttcatgtgtttggggctgtggaggagtctccagaatgtggccccctccctatgtggggggtctggccctagggaggagctggcagacaaaagccttccttagactgcctccaaacccttcctagataacttctggccttcatcccccaaggaattcaaggagtaagagaggaggatttttttcagaaggccatatccatgttgaccctggtttttctcgtttctgcccggttatctgctgctgcacatgccaagcaaaatgaccaaggtccatggtcattcgaagcgcctggctcttttcttatgggtgaaagaatctcaagggtcaaactacatgcaggtgggggaagtgacggtgtccagtctcaggttcagcattcatgaggtcctgtgtacgttccagactttctgctttcagttttgttccagctctccttcctgggctggccctttaagtcctggtcactgcctgcaaatttatcagccatttctctgtagctccagttgggttattggcttctttgatctgagaaggttgccgtctcgactgtagctagtgtcctgttctgttgcttcatcagcctatcaacactctgatctcccagccatcagaggagtctcagtaattgttcctttattccatgagcaaagcagcatgccttagttttctggatcaggatcagcccattcctgataatctccctcctgtgccattaatttttcctcttattactagttcagcaaggcgactgtgcagcaccttccactcttgggttctctctctcttctggacttggtttctctaaaatcaccactgttctgcaacgtagcaagcatcttggagctccctgggaagttaggatcctaggccttcatctcccagccattgttcctttaaaacaaacagtagcataacgattagcatttctacacttaatcacattcagttctggtggctccagcctgcagtttctatgctgacagttgttagatacttcagttctaaatgcttctcccttgctttcagaatttgccatctggccttacctcactcaggtggccttagcggtctagccaaacttctttcctaccatcttattttttaaaaatctttataccttccttccttttctttctacttactgtcatctccttcctctgaccatctaagcacaaccagctcttcttcaagctccctgccccaccaaagctatccaccttttaggaagactcttaaattccatttctgctactcaccagcagtgcatccttggacagtttacaatttgcacatcctctttgttctccagttttcccatctgtaagtgggggagtaggaggaatggtatctcttttatgggttgttatagaaatcaaatgattgatccaggtagagccctgaaagcactgttttactgcctatttgtgatgttgtaaaagagttggtggctcattagggtacctggctaaacatctagtcacatgtggtgtcccctggccatggctgtggctgccgccatgtgaagagcccttggagggctctgcatgtattagcacctgccagagaaaaggatgtgggcagaagcagacgtttatgttatgaaacaatgtgctcccccgctgataagtgggatttcccacacactatggcaatatattgtcttccttggtgtctctgtggcagggggcacctctaagccacctggcatcttttgcttaactggaatctgcacaaaagcagagagtaaaggctgattccagctttttgctatctttggtgtgtatggtggggacggggcaatggaaagactaggtctcacggttacatagtgaacagaaggttgctgtgtccttttttgttaggaccaataacgtctgttttagaaaagatcactttaatggctatgagaactggtgatcccagtgcacatgtgggttgtgacatgtgcttgtcactccgtgtccacctcccatccaccatggcagaccttgagcttggtggaagggagtcagcagttcccagacactagtctcgcagttgaggacctggggtcaattcgcttaatcttttctgaaccttattacttaatttgtgaaaaagggatagttgtagattccttagagttcctatgaggattagatgggaattgaagtgaagtggctcatactaagtactatttcatttgctttgacacacacctctacacccttcatttcacaagcaaagaagagatggacttggagtcgtggttgtcattcactcttgttaagggaagaagtgggataggatagtatgaagtgtattgccaccacttttatttctgcttatgttctctaggttttcatatgtaatggaatggtctctttttgtctaaagtgtcctcttgtacacgggggaggagtttgtgtggaagatgtgtgggaagagccacaggtgcacgggtcccctgttggccaggagccagggcccacaggtgtctttgttccaggtacacacttctcttggagtctgtcaccaggcttggcgcattgcccaagattccagctcttaccttgggttagaaagttttactgggaagaaccacacatttgaggtaacatccagaaatagtgaaagagaatttgtccccaaaggaaggctgaaatgtgtttgattttcttttgtattcataaaccctcaggagggtcagaagaaggtaacacttagttgcctctggactgctgaaagccctcaatagctgagagcctcagttcaagcctcagcattttcctgaaattttctagacaatcacttccatagctttcatgttaaaggtcacagacctagacttagatatatgcagtccttaacttgatagatgtatgtctccacacatactaagaaccttgtggacggtttctgtgtctaatgccaggcacaaaataagaattaatgttgctttgaccgaattgactgtgtgcaaatgttataaatgctcacagttacctcccctccagctcatgcacctgcctctcccgctcgcccaccttgggttcctcacactttcatcgtgtttctggagttcactggctagtccagagatctagataagctatgaagcaggactagaaatagcttttttttttttcttttcagtgctcaaacataggttttcagaccaatctgcgttgagcagctctgtcctgggcagtgggaaatgattagatcagacatcaaactttttctcagggaccttggtttaaccttctggcctagtttgttttttcctttcttttgctgctatctctgcaaacctctttttttttttttcccttcagtgtgtgtattctacctttactgcagtcagataatagaagaaaagggagtacgaaagtacctgagatagttggtcatcttgaattgtcaaaaacaaaccctgaattctcaaatctgcaggaacaaattatggtttccacctttccccatttctactgtataaatataatgaatctgtttctcaaacagtaaaagggaaatgaaacactttaatttgaatttactaggcttcaaattaatttgttctctattttgttaattctgctaactagaatttgcctttaaccagggcctttcatgaattgggaatgtgtgttccacgtgattcttttatatggggattatatcagtgttgatttaacgtggttaattaaaactaaaaactgttggactaagcactgatgtgttacctaaacactgagggcctatgacttggatgtattctagtaataccaatgtttgtctaagtaactttaaaatgtacttttggtatttgaaattgtttggacgagtgagggacaatgaagaatccctttctaataggcacaagtgacttattttatgctcttccaatgagctaagcacttagtatgaactcagcttaaatttgtgtcttcagtggcttaaactcctctctatgtaaatcatggtaaattgagaaagtgaaaaactacgccatggacttggcatttgtcatgtcccacactgtgcttttatacagactttttcccctagaatttaactccaatattcatatatgtatgagaagaagttgtcatggaagatgctaaccacaggcatattgtatttctgaaaaaagtgtttgttaaagtttttgcagctgtagccagcaaccaacttaacagtatcacaagggtagctacatgtttgaaatgagaaatagcaattctgtgaaactgaaaaaaaaaatttcttttggttaacatagaatgagatgagaggagatggatttgcatgaattagagagtctgaggtttttttttaatgagcatctttttaaaaagtatatgagtagaaacttgatagaaaggcattctaaaggaaaagagtctctcttcctctgttcatccccttatctgtagagatcagcatttacatcttggaggtgaagcttccaagtgtacttaattttgtcacatggatgtgggaatgcagaatgtggaatgtagagaggaggggtgggaaggaaaaaggggattgaagaagttaaataaggcagcaggtgaatagaaggctcctaagggagaagctttaggatcataaggttttaatttttcttcaactaatacatatatagattccaaattcaaagggcacaaaataagttttcttcttctaactttgaatctacttcccctaaactagaggaagtatttggtacagactaaaactactacctgcatatgtttccagagactttatatgcttgtgtaagcacagactttaacagttttgctgttagcagttttgctattaacttgtttttctattaatgagtcttgataagcatttcacagtcatacagaaagaacagctgtcttgaattgtcatctcgaattgttgaaaacaaaccctgaatgctcaaatctgtaggaacaactgcatgcgtttctgtattgttttatacacacatcagatcatttaaccatcttctattggtgaatacttatagctttataaataattctccaatgaatattttgtgtatacttgcaaatatactaaggatataattcaaagtagacttaccagaagtagaatccctatgtcaaagagtatatctccttaaaattaagtgtcttgtgtccggagagagcccacaagcagtatactagagggtgtctgattcccacatatcagacttagtgatctttgcccatttgatggataaaaatgatacgttgaggttttaatctgcccctctcttaagtaaggttgtgactgtaataggtgtttgagatgtagtttgtgtcctttgtgtcttctctgttggggttcttctggtatttctgatttgttgaagctccttattcattatggaaatgagtactttgcctaatgttacaaatatttttcctacttttgccttctgactttatggtgtttttgaattatatagtcaaatatagcaatttttgaggcttttagattttatgtgacttatttaaaaaaaaactacccactctgtataagtatatataaatgcatttccacctcagtactcttagagtttcatgcttttacattcagtctttgatctgtccaatctagatcttagtttggcatgaaatagggagtccttcatttttttctttttgataatttagataaccatccagatgtttttcttcactttactattctgaaatgcctcctttaattatatactaaatccctttacatatctgattttgtttctagatttaaaaaattttgttccattgatttgtctttttgggccaataacatgctgtttcaattattgtggttttgtgatatctgttacaggctagtgcatatcattcctatttttcacaatgttttctggctgtttctgcctctcctaccatatgaaccttacaaattctgtctaaaacaaattctaactttgagtctactagaagttcacatactttaaaatatatgaaaactctcaaccctgtgtacttccccccaccaaaaaaaaggctcatagcttccaggctatcactagtctcagatgtccctcctctaatgttcagaaccaccattgtagcgtaggcattgtcctgactttaatcctacatgacgtctttttgaacaactcctttaaaaaagacttgagtcagaatacattcctacagttattctcctctgtaacattattgaggttcttgctggagattttaaaaaaattgttgcttgtatctcaagtactgcttgcattacagcctctggtttccgtgtgacttctcatgcctgtgtcataaagatgagctttgaaagcacaacaggtgattcacactagcaagtgagttgtatttcttcaggtagaccaacatacctgaaatctataaaacccatgccaccaaaccatagtctagctctggtcacagtaaagccagccccgtaactttctgtaattattagaacttaattgtgtagctcagggttccccacccccctgaccacgggccaataccagtccgtggcctgttaggaactgggccgcacagcaggagatgagtggcaggtgagcgagcattaccaccggagctctgcctcctgtcagatcagcagcatattagatgctcctaggagtatgaaccctagtgtgagctgagcatgtgagggatctaggttgtgcccttcttatgagactctaatgcctgatgatctgagggtgaaacaggaacaggttcatgctgcaactatcattcccctcttccaggtccatggaaaaattgtcttccacaaaactggttcctgataccaaaaaggttggggaccactggtgtggcacatacagtggacacaaatgtactgtgtgctaatcatgggagaccacaaagaactgctaagtgtttaaagggcatggcaaaaagagaactctactatcccaaatctgccttgaaaccaaatgccagtcacagtaaacattattcgtcacagattttgcttgggatccataacctaggagtgctttgtaggatgatctagatagcctaggactttttaacgctgttcagaggcacttttgtcttcccctccacgagtactctgtagcgagcaatagagcgctcatccccagattggtcctgcagagcctgctgtgatcacatactcagcccgctgctttctgcctctcggccccaaccaacagctcatgttgtctttctgttggcttgtgtcccctctccataagtgaactccgtgaccttcctgttcaccccaaccagggacaccctttcttctacttttatattacattttatttccaccactggagttgtctacacaacacactgccttgtattgatagctcatattttcaccttcttcttgatgggagagcctgaagagctcatctccatgtacccagcaatgccctgacaaccaagtaacaaccataggagatccctggcaccggtgcaaggccagaaatccatgttggaaccccaggagaatgcatgccgatgtgtattcaaacacagcagcttccaaacaatgaaactgcagaagtcattgggatgggttttatgtgggtctagcaagtcagaaaggcggagggggtgggaaaactgtttacagtgaaatctgaggacagcgccttgacactttgttctgggttttacatccatctagcaaatattcgactcgtggctctacaggcaccttgacattttaatatatgagtatttgtttttatatattaggatttccagggatccattgtgttttattttttggtaagtataacatagctgaaaattacttgggaaactttgtggtcctagcagatgaagtggtgtttttctcctagtactcattgccaactttattctcctcgggtagctttaaggtactattgttttccaagtacacttgaaggcgcacactgcccgggggaagttggccatgtcctgtgttgggcatccttgctaggaagagtggttccactacataggtgacctaactttttgttgactcgaaattttgtcataaaaaccactccttggttctaccctagatgacaagtacttgttaggatagacttctcctataaatgaaaggaacatgggaattttgctaagggaatatactttattctagtagaaggggatggattcccacttattggtgagattgtagcccaaagttgagaatccatctacttgtggagtgaaggaagtcgtgtgtgtgtgtgtgtgtgtgtgtgtgtgtgtgtgtctgtgtctgtgtgtgttgtatattctgtgtatgaatgttgtagcctagacgaatgtagacattctctttttcactataagacaccttcagcctaggtgtcaaccaggtcgagatgtggttagggagccagaaagctggaggagtaactaattctactgcggtcctatatggtttgctcacattctgttttcagaacatttgaaacacactccgtttcagcacactccacccttacccagaaaaaacaaaacaaaactatgaaataatctaaagtaatagagaatgagtttgtgtgtttttgtccttctctgcagtgtcactgttttttacatatttaactcattgagtcctcatggcaacactgagcagtaagtgctatttatcaccattttacaggaagatgttcagagattaaacagtgtgagttcctcgagctgctttgccatgtagaagtgaatcctaactctgcttctcacccctcactttcagtttccccagccagaacatcccctgaagatggcagaggagagcagctgtaccagggattgcatgtccttcagcgtgctcaactgggatcaggttagccggctgcatgaggtcctcactgaagttgtacctatccacggacgaggcaactttccaaccttggagataactctgaaggacatcgtccagaccgtccgcagtcggctggaggaggcaggcatcaaagtgcacgacgtccggctgaatggctccgcagctggccacgttttggtcaaagacaatggcttgggctgcaaagacctggacctaatcttccatgtggctcttccaacagaggcagaatttcagctggttagagatgtggttctgtgttcccttctgaacttcctgccagagggtgtgaacaagctcaaaatcagtccagtcactctgaaggaggcatatgtgcagaagctagtgaaggtttgcacggacactgaccgctggagcctgatctccctctccaacaagaacgggaagaacgtggagctgaagtttgtcgactccattcggcgtcagtttgagttcagtgtggactctttccaaatcatcctggattctttgcttttcttctatgactgttccaataatcccatctctgagcacttccaccccaccgtgattggggagagcatgtacggggactttgaggaagcttttgaccatctgcagaacagactgatcgccaccaagaacccagaagaaatcagaggcgggggacttctcaagtacagcaaccttcttgtgcgggacttcaggcccacagaccaggaagaaatcaaaactctagagcgctacatgtgctccaggttcttcatcgacttcccggacatccttgaacagcagaggaagttggagacttaccttcaaaaccacttcgctgaagaagagagaagcaagtacgactacctcatgatccttcgcagggtggtgaacgagagcaccgtgtgtctcatggggcatgaacgcaggcagactctgaacctcatctccctcctggccttgcgtgtgctggcggaacaaaacatcatccccagtgccaccaacgtcacctgttactaccagccggccccttacgtcagtgatggcaacttcagcaactactacgttgcccatcctccagtcacctacagccagccttaccctacctggctgccctgtaactaaccttgagacctgagggtttccacagtgggaaccccaatagggctagggctctcaggtaggggagcctccttctagatgtaggcatttggcttttaaaggggaactcagctctgattctgcttttttttttttttttcctttgtgtacccattggaatgggtctacagtgtatcatgagccaaccctcaaaggacccgtattacagtgccacgttggaaaacgctacaggaagcatgacctatccacatctttccaagatagacactaacatgtcatgtcccaaacattagcacgtgggggttgagctctgtgcagtaatcgagattgggagaatttgggcagcgcgtgagaagtgctaagctacttgttttctcacttgagcccgggtaggctgtgttggccctcacttgggattctcagcagttacatgaaagttgtgctgataatctcttctcttgtaccaattttagtcaggcagaaaatggtaaacatgagggtgctcttgtgacttaatttttgttcaagggactaaattgcttatgtttattccctgtcagcggagtggagaatgtcattcatcaataaaccaaagccaatagctggagaattgagatctggttgaaagtggtttatggtttacatgctgtactatcctgaggaattgcgagatattgctgaggggaaaaaaaaatgaccttttcttgaaatgtaacttgaaaacaaaataaaatgtggaacataatgtttaattagaattgtggtggtggtagtggaaggggataattgtaaataggaaacatgaatgttcatttttttctttaaagaattcttattaaatggctccctgccttttttttcttttttcctcatcagctctttcatggctgaattttgttttattcttcctaagactgaggattgtgctgagtccagagtcattgtggtaactgacatgagggtcttcccatgttttaactggaaacccactttggtcacattccaagtatgacacagctgttcttctggagtactttagctattttttgtttttgttcttttcgttttttttttttccaaaaatagtgacttccttctccaggtgtgtttgacagcaactcaattcaggaatttcggtagaactgagtgacctgtggaactgctttagaatctaacctgctgtcttcgtgctctgtgtgaaggggaagctggggggttagcatgaagtctggccttgtgtgcattggagcttccaaggcactttgaaatcattccagtatatttgggaagaattgagtgaatgagaatgctcttccttattctggtagatttgacttgtttataattctgcactttagaagaaaaacagtgttaatctgtagttgaaagaaagcttagtagatgagagagttctaggctactgtggctttttccagtagatttagatgagattatgtgttttgaaatgttttgtgggatcccttagaaagcatcacttcagggcagagacactcaatattgccagccagcttgggttctaaagtgatttaatcaaattcatgctcctgatcttttttttcccccttcctttggctatgaaaacccaaagcccggagtgattgttttctccttgctttaagcagtgaagttatcctaatgcaaaagagcttagtagaaaatgagtggtttacctttttttctaaaagtatattttcaagtttattctggaatgtgatgtcttggtcctcttaaaagcagatcagccatgactgaaactcaaggcttagctggtatctatgttgtgctacattaggtgactagaagccacttcttagtgtaatcagctcctgtttccctgtgagccttagttatattttaattcagtggctttgagtcaaggccggttctaattgaggggacccagtgtgcttcagtgttaagagtggggcaatgaagagtgaaccccaatgaagagtgatcccaactttggaaactatctggtcattcatgaccttaaaaagctgccatggtggtcaaatggcatgtgtttgcacaaaaatgaccgatgtgtttaaccaaagctttgaaatgtgatgaagccaccaacataagcacttgcctaacagaaatcagtatttcttctacttagaaggcttggggcccagggtaatgaggcaccagatgaagataagatctgcatcaaggaattaaatttccagtttgtccttggggttctttctgcttatgttttttcccccccatctggtaatagtcctcttctgagaatgaaaggaggcacagaagttgcgagaaagacccagtccccagtctttgccaccattgcaccatggttgtctcggagtcccttcacctgacctttttagtcagctcagatctttttgtagtttgagaatagacctattcaagagctatcagggttaaaagctgcactgaccaaagctgtacttttaaaacacaacccctgggctagtgatgtctctacttgctctatgagccttttgccagcctcagaataggcgaggtaaccttgaatttcagggccctggaaactctagctgaaacctgcctttcctaatgctcacacaagcaccaggtaccctgagcttatactgagtccagtggttcctattttatgtgtgtgtgtatgtgtgtgtgttgagtaacatgaaacttggcagtagcagagagcactgaagttcacatgcaagttctaatctaaagttaagcagtctcttatttgtttcgggactctgatttgactctttttctgatgctttcggcatgtctgcagcctgttctcctagcctgctgcttggagtcaggttgagcatcagtgagatgaagacagtaccttttcctctcacattggcagaatagcacgcactagatgcctgaccttgagctctagtctcccctttaaatcttaccttggcagtaacacattattcctcattcaataatttcaatgctgaaactgaactctattactaatgccttccaatcagagttcctgatggggatgcctgtgggatggcccacacctgggggacctggcagatggggtgagttgggtaaggaagatgatgcttagttcctgatagatgctacagatgtagtttggcatttcagtttttgtccagtttgattttcactggggtttgagtcacagcaagctgtgtatgaacttgtgttttgtggtgacacattaataatcaaattgctaaaaccctgaatctgcttattcttcagcttcacctctgcactaaccccttacccttatggtacgtcaggattttaactagtactgctttgttgactttgggaaatggtgccactcaaaagcaacttcctaacttgaggaataactcctttgtagtttactttctggtactggttggtgccttgtattgggatacagctatattcttagctcaaatgtcctctttttgagagcaaagtagttatccaatggtgagacgagaccctgacgctcatagaggccattccttcctgggtgtcggaccagggctctgtgtcagggaaaaccttctgggtggactttgtaagaatccagtttccaaggttagattcacatccttaatcttgcagagactagaatttcacagctcgctttggaacatattccaattcaaccagttaaaatcagaggaccaagtcgtgggggaggggggcggtgttgaggagaggtatttttaaagatctggcaacttttcaggattatttgtggagaactctaaggttaagatcaggaaataaaagactgtgtgtgtgtgtgtgtgtgcgtgtgtgtgttcaagtgcctaaatcttgtttacctatcactttaaaaaaataattgaagtgtaagctaaataaaatgcttggagttttgcctgggctagtgagagttggtgcaaattcttgtgtgtgtttgcataggaaggtgagatgaccatctactaaagaggaagtagctaaatacagatctgtgggtgtttttaaaaaaactcaacctatctggtgttttattttaatggataaaaatgtaatttttctaaggtagcaacttatttccaaattaatatagatgaaaaatagataccaattagactaaattgaaagctttttgttctatatttgcatagcctttgaaatatttcttagtgcctaggaggtctggggattcctctttcgtggtggtcactaaccttacttgatgcagataaaatcacttgtcaatgcaaaatgtgttagaacttgataaagctttgagtttgagaaataaaggtatatttaaaatttaaataaaa

SEQ ID NO: 650 - DNA, 4408 bp, Homo sapiens
ccgctccacctctcaagcagccagcgcctgcctgaatctgttctgccccctccccacccatttcaccaccaccatgacaccgggcacccagtctcctttcttcctgctgctgctcctcacagtgcttacaggtgaggggcacgaggtggggagtgggctgccctgcttaggtggtcttcgtggtctttctgtgggttttgctccctggcagatggcaccatgaagttaaggtaagaattgcagacagaggctgccctgtctgtgccagaaggagggagaggctaaggacaggctgagaagagttgcccccaaccctgagagtgggtaccaggggcaagcaaatgtcctgtagagaagtctagggggaagagagtagggagagggaaggcttaagaggggaagaaatgcaggggccatgagccaaggcctatgggcagagagaaggaggctgctgcagggaaggaggcggccaacccaggggttactgaggctgcccactccccagtcctcctggtattatttctctggtggccagagcttatattttcttcttgctcttatttttccttcataaagacccaaccctatgactttaacttcttacagctaccacagcccctaaacccgcaacagttgttacgggttctggtcatgcaagctctaccccaggtggagaaaaggagacttcggctacccagagaagttcagtgcccagctctactgagaagaatgctgtgagtatgaccagcagcgtactctccagccacagccccggttcaggctcctccaccactcagggacaggatgtcactctggccccggccacggaaccagcttcaggttcagctgccacctggggacaggatgtcacctcggtcccagtcaccaggccagccctgggctccaccaccccgccagcccacgatgtcacctcagccccggacaacaagccagccccgggctccaccgcccccccagcccacggtgtcacctcggccccggacaccaggccggccccgggctccaccgccccccaagcccacggtgtcacctcggccccggacaccaggccggccccgggctccacccacggtgtcacctcggccccggacaccaggccggccccgggctccaccgcccccccagcccacggtgtcacctcggccccggacaccaggccggccccgggctccaccgcccccccagcccacggtgtcacctcggccccggacaccaggccggccccgggctccaccgcccccccagcccacggtgtcacctcggccccggacaccaggccggccccgggctccaccgcccccccagcccacggtgtcacctcggccccggacaccaggccggccccgggctccaccgcccccccagcccacggtgtcacctcggccccggacaccaggccggccccgggctccaccgcccccccagcccacggtgtcacctcggccccggacaccaggccggccccgggctccaccgcacccccagcccacggtgtcacctcggccccggacaccaggcgggccccgggctccaccccggccccgggctccaccgcccccccagcccacggtgtcacctcggccccggacaccaggccggccccgggctccaccgcccccccagcccatggtgtcacctcggccccggacaacaggcccgccttgggctccaccgcccctccagtccacaatgtcacctcggcctcaggctctgcatcaggctcagcttctactctggtgcacaacggcacctctgccagggctaccacaaccccagccagcaagagcactccattctcaattcccagccaccactctgatactcctaccacccttgccagccatagcaccaagactgatgccagtagcactcaccatagcacggtacctcctctcacctcctccaatcacagcacttctccccagttgtctactggggtctctttctttttcctgtcttttcacatttcaaacctccagtttaattcctctctggaagatcccagcaccgactactaccaagagctgcagagagacatttctgaaatggtgagtatcggcctttccttccccatgctcccctgaagcagccatcagaactgtccacaccctttgcatcaagcctgagtcctttccctctcaccccagtttttgcagatttataaacaagggggttttctgggcctctccaatattaagttcaggtacagttctgggtgtggacccagtgtggtggttggagggtgggtggtggtcatgaccgtagggagggactggtgcacttaaggttgggggaagagtgctgagccagagctgggacccgtggctgaagtgcccatttccctgtgaccaggccaggatctgtggtggtacaattgactctggccttccgagaaggtaccatcaatgtccacgacgtggagacacagttcaatcagtataaaacggaagcagcctctcgatataacctgacgatctcagacgtcagcggtgaggctacttccctggctgcagcccagcaccatgccggggcccctctccttccagtgtctgggtccccgctctttccttagtgctggcagcgggaggggcgcctcctctgggagactgccctgaccactgcttttccttttagtgagtgatgtgccatttcctttctctgcccagtctggggctggggtgccaggctggggcatcgcgctgctggtgctggtctgtgttctggttgcgctggccattgtctatctcattgccttggtgagtgcagtccctggccctgatcagagccccccggtagaaggcactccatggcctgccataacctcctatctccccaggctgtctgtcagtgccgccgaaagaactacgggcagctggacatctttccagcccgggatacctaccatcctatgagcgagtaccccacctaccacacccatgggcgctatgtgccccctagcagtaccgatcgtagcccctatgagaaggtgagattgggccccacaggccaggggaagcagagggtttggctgggcaaggattctgaagggggtacttggaaaacccaaagagcttggaagaggtgagaagtggcgtgaagtgagcaggggagggcctggcaaggatgaggggcagaggtcagaggagttttgggggacaggcctgggaggagactatggaagaaaggggccctcaagagggagtggccccactgccagaattcctaaaagatcattggccgtccacattcatgctggctggcgctggctgaactggtgccaccgtggcagttttgttttgttttgcttttttgcacccagaggcaaaatgggtggagcactatgcccaggggagcccttcccgaggagtcccaggggtgagcctctgtgcccctaatcatctcctaggaatggagggtagaccgagaaaggctggcatagggggaggtttcccaggtagaagaagaagtgtcagcagaccaggtgagcgtgggtgccagtggggttcttgggagcttcaaggaagcaaggaacgctccctccttcctctcctggtctttctctatgggacctagtaaataattactgcagccacctgaggctggaaaaccactccaggtgggggaggagagagtttagttttcttgctcctattttcctcctcctggagacctccctctctcggctttacaaagacacagatacaccccgccccccaaaacacacacacacacacacacacacctccttaggctggaacagcagagaatggagggacaagggggctgattagagccaagaagagggagtgaaggagagcagagggaggagggcagccctgtttacagtcacctggctggtggggtggcaggtgctctctctgaattaaccctttgagagctggccaggactctggactgattaccccagcctggggtggcatccaggggctctaggaggtaccttttgctcctcaccctggatctcttttccttccacccaggtttctgcaggtaatggtggcagcagcctctcttacacaaacccagcagtggcagccacttctgccaacttgtaggggcacgtcgcccgctgagctgagtggccagccagtgccattccactccactcaggttcttcagggccagagcccctgcaccctgtttgggctggtgagctgggagttcaggtgggctgctcacagcctccttcagaggccccaccaatttctcggacacttctcagtgtgtggaagctcatgtgggcccctgagggctcatgcctgggaagtgttgtggtgggggctcccaggaggactggcccagagagccctgagatagcggggatcctgaactggactgaataaaacgtggtctcccactgcgccaa

SEQ ID NO: 651 - DNA, 2776 bp, Homo sapiens
aaggaagatataaatgacaaggtcggctcagctctcagacaaggttttccaagcaagatgaagcccaacatcatctttgtactttccctgctcctcatcttggagaagcaagcagctgtgatgggacaaaaaggtgagtggagagggtaagccttggggaaagctgctcagacagctaataatctaagattatttggggtgcaaacagtaacctgtttaggcacagattcttctctttgaagagaattgattttctccacccaaagcttcagcttttctagaaatatcaataatttgttgggggaaaagtggggggtaagagttgtaagggagctttggagataatgaatgcataccttcttattatcaattaccaggtggatcaaaaggccgattaccaagtgaattttcccaatttccacacggacaaaagggccagcactattctggacaaaaaggcaagcaacaaactgaatccaaaggcagtttttctattcaatacacatatcatgtagatgccaatgatcatgaccagtcccgaaaaagtcagcaatatgatttgaatgccctacataagacgacaaaatcacaacgacatctaggtggaagtcaacaactgctccataataaacaagaaggcagagaccatgataaatcaaaaggtcattttcacagggtagttatacaccataaaggaggcaaagctcatcgtgggacacaaaatccttctcaagatcaggggaatagcccatctggaaagggaatatccagtcaatattcaaacacagaagaaaggctgtgggttcatggactaagtaaagaacaaacttccgtctctggtgcacaaaaaggtagaaaacaaggcggatcccaaagcagttatgttctccaaactgaagagctagtagctaacaaacaacaacgtgagactaaaaattctcatcaaaataaagggcattaccaaaatgtggttgaagtgagagaggaacattcaagtaaagtacaaacctcactctgtcctgcgcaccaagacaaactccaacatggatccaaagacattttttctacccaagatgagctcctagtatataacaagaatcaacaccagacaaaaaatctcaatcaagatcaacagcatggccgaaaggcaaataaaatatcataccaatcttcaagtacagaagaaagacgactccactatggagaaaatggtgtgcagaaagatgtatcccaaagcagtatttatagccaaactgaagagaaagcacagggcaagtctcaaaaacagataacaattcccagtcaagagcaagagcatagccaaaaggcaaataaaatatcataccaatcttcaagtacggaagaaagacgactccactatggagaaaatggtgtgcagaaagatgtatcccaacgcagtatttatagccaaactgaaaagctagtagcaggcaagtctcaaatccaggcaccaaatcctaagcaagagccatggcatggtgaaaatgcaaaaggagagtctggccaatctacaaatagagaacaagacctactcagtcatgaacaaaaaggcagacaccaacatggatctcatgggggattggatattgtaattatagagcaggaagatgacagtgatcgtcatttggcacaacatcttaacaacgaccgaaacccattatttacataaacctaccattcggtaaccatgtgaaaggatggaccaatatcaaggtaatttttttttagcaaataggggagatatctctctcattgtttagaattgttggggactctccaggacttttgtgggattgataaccattgttcgcaccaatagaagtgctgtataacaagtggtaggaagatgagcctccccattccctggtgaggagagggtctggtagtggcacagaaggatgtttggcctatcatgaggtcctagaattcctatccttaattgaatattcttcaataatatttttttgtatatgcctacctgctaaaggtttttttgaacaggtactgactacatatgcatatttataagtttatggtatactcttgtcagttcttatactttagattagtaaacctcagtttctttcctatatagtataaaggattacagccattaatgttttctttctgcacaccagtgaatgttcttgcatccctgttagggttcatctatgctccttcagagaccacaagcccaaagactatcagtcctccctctcagaatacaggaaagagatatgtagaaagatccttgttcatgttgtgaaagagaagatggaaagggagacacaagagatggtgagggatctcatgggccaattgggtgtttacaacatcaggagaagaaaactgaagccctgagaggggtaatggtgcttccctgcctctttgcagtaagtaacactgcacttgaagagagggcaagcagtagaaacagtggccccagctggcaactagtggcctggtatcctagtagtagagggctggtacagttggagctgaaggggacagggggcccagctaccatccccacccttcactttttactatactcacatcactgattctcttctttctctctaggtgtcagttgacctcagtgaattctgtgatgtttctgagatgcagactcccgtgtagtttcagattcttggtccatggatgacaccacctgcccatgcttccttgaattaggctttcctaacctgaagcgccttcaaacttccaataaagagatcattttctgcttcatctg

SEQ ID NO: 652 - DNA, 60784 bp, Homo sapiens
ggaccagtgacagaccaagggcatgccactgaaggaatccctagacgcacccttctggatgtgagacaggcggatctcacccacgcctgccagcagctcctcggagaactgtgttcctgggtcagccctggcccagaggagcgccggggacccgcagagtgctgctgaagtcaaggctacaactcacctaggatctggggcgccagccctccggtgggcagggcgttctcctcccccaccccctccccgcacgatgacatcaagtgtttggcgttgagttgctccataaaagctgcccggggaagccaggagagcgaagggcggacgtactcgccacggcacccaggctgcgcgcacgcggtcccggtgtgcagctggagagcgagcggccaccgggagcccccggcacagcccgcgcccgccccgcaggagcccgcgaagatgccccggcgcagcctgcacgcggcggccgtgctcctgctggtgatcttaaaggaacagccttccagcccggccccagtgaacggtaaagtttccgcctgcttctttcctaacactcctgagcgctcagccgcccctgggctgaaggctcttcaatgataaagtaaaatcattgctgcggggagcagggaaggtgtagtaccaaatagtagattctcaagaaaggatgctccgttttcctttgctgaggttgggtcgggaagcacgttgctttctagtggcgcttggcgcagatttggtgttaaaatgtttgcgtgtactcccgggcaccgccagctctgaagatgtggcttgggaacttgctaaccagggaggagatgcaaagccaagatttaaaacagcgttcccctgatccacgtttagaaagtagagacatgactgtggcattctgattggggtaagcacagagaaaggtttgctgtgcccctgtgcagaacccgcagacagtggtaggcgcttttctttggaggagaggatctttaccattaagtcttacctacaagtcaaagggatgatgcatcccattcttaatcattgtttttctccaggagggctctactatgctgaatgtacgtgtgtgtgcacgtacacacacacacgcacgcgcgcacgcacacaaaccacacacacacacacacacacacacacagcatatttctgattgtaattagaacactaaatcccaaaaggctggaggctgagggactgaatggaggctccgtggagtgacaggaggaggtggcagaggggacctgaactgtgggctcacgccgggccagtgagctaacacgtgtacagccaaggctggttcattaatcttttggaataagaaagtgattttggaccgaaagtgattttactggctgaaactagattcttcctggcgaggcagtggtggtgggaaatgtgtcctgctcagcagcataaaagctctgagcctcctctcttggaggtcacagtgcccatggggaagggcaggggagccaggctgtggataactcttaattaaattccagtcaactagctggcatgatgtgcttgatattatctccctcatctggtcagggagaaacagaagcgatgtaacagaagttgggagaaaggagcgatgtaaaagtgaaaatcaagttttaaaaccacaaactttacatgtttccttttacgaaagctgcactgagaccaaagtttccctggaaatctctttagtcctaagttgctccaagaccaaagggagaaacagccattagttggccctctttcctatagctggttgctcctctcactctggggcagctctgcctcccttctctctcttttcctgcccttccctgttctcttccctccctccccttcctttcttccctactttccctgctcttcctcttccctctccctttccctcctccttatctcctctcccaattctccaagttgggactggggaagtttgtagtcaaaactccactttcgcctcactctgaggaaggagactgcctacccctgggtagagcacagcttttattctgtaaattctcatgcagtttccttgggtttttaactgccttagaggacaggtcaaagcaaaaatcactgaggtgtagaatgtcagcatgaacccaaagttggaggtggagaggagttaagctgagtaatggggtcaaagtgtgatctgctctctgcctggtgcatttaaacttccagcattggagaatgttcaagaacaatgtcaggggcccaggagggagcataataatgtgaagtcaagtgtcttctggagaaacccttggaattcttagttgccgtggctttggggggcatttcagtgaattctgcagagcttgccctgcccaaacctggtgtggagagccaggcagtcttgggctacccaggagatggttactcagggaaagttctagcacccagcacaggaagcaggcagggcccaggacctctgatatggatcttggtaaataccattttctctgggcattccctccaggggaacctccctgcccagtaccagctgggtctgcaggttctaacaggtttcaggctgagcctcccaggtttcccagatggaacagataaccttccttgggaaggaaactattcccctccaggaagggcctgctccctcaggatgccactgaggccttggcctggcctcgcttgtggaatcagtttaatccttttaagccttctgttcttacagctagaagtggggaaccagggggtgcaattcctgaataaagcacactttcgtgcgcgtgcacacacacacacgcacacatacacacacttttagagagacttcctgaggtcagagctgagctggggccctgatcctcacccgatgaacccccttgactcaccatcctcacttacaacgccgcttctccccagccctccagctcctgagcccctccagacactgccatttatacccaaagtgccgagtctggagtcccaagccagctcactcacagagaggagggcagggaatgttgctctggaggctgctgcctttcaacaagtccccagtcctatgtcaccaccgcgacctcacagtcccagatgtccactctatgacttttagccctgagctttccagagtgtgatgctgaggcctcatctgaggatgagaactccaacaacagggaaaaccttgattagcgagccctgggagggtagcagaagatgtagggtataaggctatgatttgaatgtgagcaggtacaatgcaaactgctggcaaggcagcagtgctcaggcagcagatgtgtttctagtggcctccaggatcactggagtggcctgtgcctcctcaggggaaaagtaagggtgaactcctctgttatttgtggaattttacatcctgggcctccaactgttctgcctgctaagaggtaatgatctggcttattatatctctaaggtctgggattacatcttaataatgaacctctcacacaaaagactgaagaaaatgtccagaagaggttttatgtcttctatagcttggtttgaaagcaatgctttctttattttttttcattgttgtttcagcaaaggggtgagcagtaaacttgggggtcacatacaagtttggtttccccgtggttctgaatgtctaattactaattcaagggaggttgatcttgggaccctcaactctcaatgcacccatagctggtttcaggggagtctgtggaccttctgaaatgacttgtatataaaactttatgtgtctaagcttagggaaattttttttttgagacagagtctcgctctgtcacccattctggagtgcaatggcacaatctcagctcactgcaacctccgcctcccgggttcaagcaattctcctgcctcagcctccccagcagctgggattacaggcacccgccaccacgcctgcctaatttttgtatttttagtagagacagggtttcaccatgttggccaggctggtctcgaactcctgacctcaggcgatctgcctgtcttggtcttccaaagtgctgggattacaggggtgagccaccgtacccagccagcttagggaaatttttactgggagaggtccataatactcatcggatactccagggggtctggactcctccacttaactactccaaagattgaggagacttgaagattccctaagttcatggcactaatgctaaattaatggtaaatgcggtgggactccttccagtgggaatatgatattggtcaggacacttcaccttggtggactttcatttcctcacctacaaaaggaggagatgggctatgagtgtaagaaagagatctgaactcttctcttccagggtgggatgtcaataaataatgcctaaacataaaacaatcaaggtaaaacaatattagcatgttatatagagatatggagataatagcaaaagaatcattttaaaaagatccaaagtggttgctctagggagcagtacatggttagggaatgtcagggaactgaggtttttgttacacagctttgtagaaccatctgactttctaaaccacgtgcaagtgtaatttgataaaaattaccaattacattggaaaattaaaaacaaaattaattacaaacactgaggcaaagaaatggaacagaataacaaaaaatatgagattaaaccggcttttttttaaaaaaaaagccaagttcactttttaacttttaaaaaacacaatttccttaagtaggaaatgccaggagtgataagtgaccagattgcttgtcacttaagttttactgcaaactaattcccacgagagaaaggggatgtgaggtgcttccccacaagggtacgcttttccatctgtacccttgtgggtcgagaaccacggagaccctgggaaaagttgggaggcagggatttaggagttgcacagtcccctcattggatgagtcacctgagacacacagtgggatgcttctctactcagggtcccttcctcggaggtgaagaggaaggccggcaggcagggtcacaagagcacagctctgcacttgtgaaaaagaccttttttgacataggaacgaagaacatttatgcatgaagagtgtggagtgcgaagtagtgggtgacttttgttctctttctggcagaactttgcctacacattcctactacccctggaattctaactcagatgtgggtagcagcttcctcaaagagaaactttttcccagctgggtgctgtggctcacacctgtaatcccagccctttgggaggctggagtgggcagatcgcttgagcccaggagtttgagatcagcctgggcaacatggtgaaactccatctctgtgaaaaatacaaaaattagccaggtgtggtggtgcgcgcctgtaatcccagctactagggaggctgaggtgggaggattgcttgagcccaggaggttgaggctgcagtgagctgcgatcacaccactgtactccagtgacagagtgagaccctgtctcacaaaaagaaagagaaagagagaaagaaaaagaaaaagaagaaagagagagagcgagagagagagaaagaaagaaagaaagaaagaaagaaagaaagaaagaaagaaaggaaagaaagagagtgggaggggagagacagagagagagagaaaatgtaaagtgggaaaaagcaagacacagaacactatttccagtatgccaatgtttgtgtgaggagaaagagggagatcaatgcatatgtgtgtgtagccatgccatgaaagggctcccaatcatcagctaacctccttgtctaatggaagcagggaaggtagagtgggaagaagagcttctactgtatataccatttgatggcttttgggttttgagccacatgaaattattgcctattcaggtaataaagtttagcttctctaagatgtctggaaggcacctgctcaagaaccccctcctgcttccatgagcctctgcatgaaccaactgcctgtgctgctgactggagcacagttgccctgagaagctgctgttctgatgcagactcagaaaaagtttcaatttggccgggcatggtggctcacgcctataatcccagcactttgggagaccaaggcaggcggatcacctgaggtcgggagtttgagaccagcctgaccaacatggagaaaccccatctctactaaaaatacaaaattaaccaggcgtgacggtgcgtgcctgtaatcccagctactcaggaggctgaggcaggagaattgcttgaacccaggaggcagaggttgcagtgagccgagatcgcgccactgcactccagcctgggcaacaagagcaatactccaccttgaaaaaaaaaaaaaagaaaaagaaaaagtttcaatttctgggcatcgacctccttttcaatttcgctcatatcaaaacaaaatctgtagtgttttccattactcatctggttccattgtacttacttactgtgttttgttctttgtaggttccaagtggacttattttggtaagtagagattttaaatacttttttgttgaaaagaaaatagaaatggttgtatttaatgagaaaaacagaaacttcatgctctgtggaggtgattttgaagggtcggaagcacagttcttgtattgtagaaagagagtacaaaggcatctcctaagaacacttcaacttgggttgcatactgcactttctccaagcaggcgagcctgctccaggcacaggactgtgagtcatagtgtccaggcttcagattcctgcaaggatttctaccaaacctccaagatttggaggtaacttgccccacctccggactgcaagggtcctgggcaggagagagcctttctcccttgcaggacacatatcctattataaacaaagaagaaagggctcctctctgaaagtttggctgaggtcccagaacttaagctgtcagtatgtctagaattaacttcttgttgccgtgattgtaagctagcgatggatgaagaggtgttggtcagtgcttagtgaaagagggatgcttgtcttaaatgaagcgagaggagcaccagtgtgcttgttgcctgggctttctgtgggacggtctccaagagcatgttagccccatctggcaggcctgccagagaagcagctggaaatcagcttagctggagagttgcagtgaattagaaattggtcattggctggaatggatgtggcaggccagacacctgagtcccctggccagtgcgggaatgttgataatgtcttgttggggcacagccacagaagatgcacaagatcgattgttttggtagcagaagggtggaactgactcactggcacaggaggcattttaagcaagcagggttgtggccaaagttaaagccacaggatgcaatggctgtgggcggggacaggcgggaagttgattactacagtggaagcaccgtccagagaaagatctgacaccaatttgcataggtcagcctttggaggttcaccagcccaagatgcatagaaaagtcactgaactgaccaaccagctacccacaggccaaggtcccctcagccccagcactgcacggctccgttattgctaacatcccttatgtactgattatgtgcacagcacattgctaagtgggtgggtaatagaagggtaggctgtggtccatagttgggaattacttaaagctcacaattcaaagcagaacataataggtaataataacatcataaacaaatgcttcagagatctgagtgctcaaaggagggcgagtgtgctagggctagatggtcagggaaggcctcctggaggaggagggctttcacctgggccttggaagataaggaggattcggtgagtggggagtgggtgctgttggctaaggtgatgttgagcagaagcaagaaagagcaaggtggtgttcgaggaaagcatgtggagaagggttgatagcggagtcacgggctctaaggtcagagagataggctgggtcaaacaggggaggtgtggagggtcagggcaggcctttcccactttgtcctgctcctggaggggcagggcagggagtaagtctgtgttttaggaagagttacttggtggtaggaggtggagggggaaggatggagggaggcaggaaggtgtttggcctgtggagaaaccccgttccgtgtcttcacatccagtttacagtggtggcagtgagggggaaggccaggccaggataagagaactgacaaagtaagaatcgcagaatctgggccacagggccccttgggcaggttccgtgtgtaggaggtgacaggcatggaaagaaggtggcacttgggttctgggctttattccatatgatccccagtaagccatttcagccccaggacttcactttccccatctgtaacctggaggaggggttgtctagaccagtgtttctcaaactacggcttgggatcacccacatcaggatcacctggaatacttccccaaaatgcagatttctaggccttgggctagacctgggaaagggagggagcctgaaaaacctgtattcttaacgcactccccaagtgattcttagctgcactctatcagagaatcactgacccatggttcccaagacctgtctatccagagagaggaagcttgccccacctcttctgctggcctctcaggtatgatagaaacacagatcacatctctacggggtcctctatccctatctctctgttacagccctcctgggcagaatgagatggcgacagggaacagagacattgtgtgaaggtgtgggaggacaaattttttttttttttttggagtctcattctcacccagggtggagtgcagtggcgtgatcttggctcactgcaacctctgcttcctgggtccaagggattctcctgcctcagcctcccaagtagctgggattacaggggtgtgccatcacgcccggctaatttctgtatttttattagagatggggtttcaccatgatggccaggctggtctcgaactcctgatctcaagtgttctgcccacctcggcctctcaaagtgttgggattacaggtgtgagccaccatgactggctgggaagagaatcttaactgcctcttcatcatgacgtggtgttcgccaagggcgggcttctcagtgcagccacactgacctgtccagaagcatttctccctgaccactagctctggccagccctctgtccctcctaccctgcataattagagcagctctttgctgaggaagcagagggcagagtctaatgatgcatggacatgcatggggtaagcacaaaggcaagtctggtttttattagtgacatgggcatgtgtgatgtggagtcagccctcagaggggacgtgcaggagaggacagatggaagacagctaaggaggcaaactcctcctgaggtcttggctagctcctccttaggtcctggctggcagctggcacctgtgctcagggctgcacaggtagacagagggcccagcataagtgctggagggaaacggcttccaagcaataagggccgcactgaatggggcaagtccaaccaaaggctccgtgctgggcatggtggctcatgtgcagaactcagcttctttgcacgtacactgctgagtcattctccaggggcctcccactgtctggcacacatggtaggacttttagaagtacaaaaaagggagttctacccctacatcctcatagctgagtcaccaggctgactgcatggatggctcctccctggagagaggaggaccatctgactgccaagatggggccagcgccacctctttgagcccctcctagggtgctgaaacagcagctgaatggctgctgggcttagcatggctgaggtggcatcatgagagagaggctggggatgatgtgacatggaccttccccgccggaaatcagtcccgcatcaatcccgctgagcccggcagcttcacttgctgtgaactgaggacagctgcaggtcaggttgtcatgtgagctaaggacaaactccagcctgctaaggtatcagaatatgtgccctgtgggggatgaagatgaccggaaggaggcaggaagggttgtgggcacgttcaggtccttggtgtgggtgctgcagtcagtttttgagcattcatccagctgtttgcttatggtctacacacttttcggtatatatttcatattcaataaaagagttacaaagttccagctggctgggagattcatccttactctgatagcttttttagtccttccccaagaaaaaaccaaaccaaaccaaaacaaaacaaaaaacccaaaaacaaaacaaaaaaaaccctagtgtgttcaaaacaacagagcaaccagaaagaatgactgtattggagctagacccgagagcacatcatgttagctgagaatgggcgtggtgtttcatccctgatgatatcagatattggcttgctgcttcttggatgtgagctggttgagaaatagatgaaaacccctgtttgctcaagatctgcaaagtcttaaacgcgatgggatggcagaagaacatggatgacaagccttcctcctggagggtgcgccaacccctatcacagccccacagggcacccgcgaggccagcccctccatcctgttcaggaaaccttggaaagaaggtggcctggcacgggggtgccaggtggctggctgtggctgtggccgcacatgcttacaggtcagcctgcccagttctctgttgcggcaggccagccctcgtggccctcggctctggcaggactcggtgtgagccgggcagtgctgtgcattccttttgctgcactccttggttcctctcccagataatacattgtccgtcttaaagaatttcctttggaaatcagggggagatcctccactggggcaaacctcattttcatgtccctgaagtcctccaggcccacacctccacccgccttctgtcctgtatctgcggaaatatttattttctgtaatgaactttcttggggctccagacaccctctcagcctcttcccacacagaactagaaatggaacacatgaaaggaggccaggaagcaaactcttgactttctattcttcagcagtgataaaggcactgtgtgacctcacacctgaattgcaatataaaaagcaggctgcagtgagagctcaggggagactcaaaacagcagggagcacctgcaattaatagaccgagggctcttgtctctatcaaagggagggaggcttggccatctcaaaacattccagccacttctcgcgactcccagctgccatcctgaggatgaataaggggcacaaagtactctcaggagagccggaaaaggccagacatgtttttcttttttcttttttttctttttttttttgagatggagtctcgctctgccacccagactggagtgcagtggtgcaatcttggctcactgcaacctccgcctcccaggttcaagcgattctcctgcctcagactcccaagtagctgggattacaggcacccaccaccacgcccggctaatctttgtatttttaatagagacggggtttcaccatgttgaccaggctggtctcgaactcctgacttcaggtgacccacctgccttggcctcccaaagtggtgggattacaggcatgagccaccgtgccccgcccagatatgcttttcctatcttttctttttttcttttttttttttttttgagacagggctttgtcatccaggctggagtgcagtggcacaatcactgctcgctgcagcctccatcacctgggctcaagggattctcctgtctcagcctcccaagtagctaggacgtatgccaccatgccaggctaatttttaaattttttagtagacacaggctacattaccaggctggtcttgaactcctggcctcaaatgagcctcccgcctcggcctcccaaagtgttgggattacaagggtgagccaccgtgcctggcagacatgtttttcataccagcacactgaattcctatccccaaatcccatggatttctgctggggttagaaatccgaccccctatcttgaattaaatctgtgttgtagtttcagttacttctaattgaagttgtgacatctagggtctgtctggatgtggtgtggcccgcctactcatagttacttctcatctttcctgaattgcagaattggggtttgtgcgtatcctggaggcttttggcctgtggctgccaaaatgcctacatttttgtgttcacagctggcctcatcagctgagtaaaaacatagggaagctagcattagttcctaaagacaggcatagtggaacagaggatgaggcagaaaaccaggaggaagaagcggaaactttacagaccccagaaccaggcgacctccatggaaatatctgctaggccactttctgtctggtgcgccttaggaaagtaatgacctctctgagccttggttccttagctacaagatgagaatcatggcatctacaccagtggttctcaaagtgtggtccctgggccagcagcattagcatcacctaagccaaatgcaaattctcagcccatcccaggcctacctcctaaccagaaactctggggggcggggcccagaaatttgttttaacaagtcctccaggtgattctgctgctcactcaagtttgagaatcccagctgtgcttcagagggttgtggtaaggatcaaataagataacacatggagagaggctcacacagggcctagcacatacaaagctaactgtagtttctttctctttgcctcgcagagctatggtgcagattaaatgaactaatatggagggaaaggccttgtaaactctacagcaccaaacgcatgagagctctatttttgttaggaagggttctgcttcttcacacttttctgaattgtgagtttttacagccaggaaatactccttttatattttcaataaacaaagggtatttcctttttgagtaagaaaggaatttaaaaaacacaaggactgcaagctctcgtcccaagggcctcacaggccagaatgtcctttctagcctggttcttcagaccaaggtgaagtcaggtctcatctccctggtgctttcctggcatccaggaaccagatatctggttccataaccatggcctcctcagccaagcccctgaagtctcccagagagcaggcaaataggcaaattctctggttccctgtctagcccatgggggctgagcctagtttggggttcaggagtggaggcctgagcctaggaagaaacttggggctgagctatttgggattgacaccagcctagcctcatgcagcgcccttttcccactggggcagcatcaagccttggaaccgcaggtgcagcgggctggcaggtgaggaggaaggacgagctgtggggctgtcctgccagggcctttcaggcctctggctgtgctccgacttgaccattctgctacctgctggtcttgagccccgggcattcaggtgagggcagggcatggcttctgcaagagctggccagagcttttggcaacgcatccccttaagaagaggagccagtgtgctgccctgtgaacctgctcaaaataaatctttcaagtaaaaaggctgaattcaaagcatgagtgggaaggtggctgcgggcaggagggaggaagtcctggttctccttgaggaagagaataggtcagagaatgtttcctcgggatcctgcagtcttagaaggagcaggggcctccttcctggcctgttactctcttccttcgcaggggcaactgctgggcgaagggtgcaggcaccacggtggagcgcaggcaccatggccagtctcttccaggggccacaccaccaggccaagaaagagagatagcacctgctacagtcaaaggtcctattttattggtcctaagatgtccactttccccacattttagcatctctgaaattgggatatatcttgttatcagttgcattgagaagcaatgaaataggatagctattccacgaatacagagaagcaccatgttagatgctaagaacacacagaaaggggctgaaacgattaatttcaacaatactgaaaacagtggaggcaaaacggtataaaaataacggccattatgcacctggtctgacacagcacgtaagtatgatggggaatcatgtgagatcttgaactatagctttttccaacttgcagttaattcacagttcacgtatactttttggtgatgttgggtcgttctcacaagtatgtaaaaacaaagtaatttaggcactagtttttttagtttatgtaagtattcatttaaggagaaaactttccaattacctgacaagcgttcaatttatgccaaccaggaagaaacaaatactagctgccacctccttgagtctataaacattgactcagagctggtgtaactccaaatacgtagatcacttagctcattttaacttttaaacaattttgcaattattaactcgtgactaggtcagctatggtgtgaaatggatgcaacccatccagttctcagaaagatacctgcagattcagggcaagtggcacatgctgccccctccttctaggacacagggctctgcaaagtctcctaggtaatgatgacagtgagatttccttatgtaaggtcatgctggcattggcaagtggggcctggtgccttcccagggtggctcctcattggcacaccacttttctggaaactctatcagaaatggagaaaggagaaaagatggaactctcaatgtcgtggaagaaagttttgaagcaagtatgaggcagtgtttactgttgactcttttggctttggtcaccaggaagcccagaggaaaattgatgtctccaacttgagcaaatgtctattcttctatgacctgcaaatctaaagaagccatgctggctgggtgcggtggctcacagctgtaatcccagcaccttgggaggccgaggcgggtggatcacttgaggtcaggagtttgagaccagcctggccaacatggtgaaaccctatctctactaaaaatacaaaaattagccaggcattgtggcatgtgcggtagtctcagctacttgggaagctgaggcaggagaatcgctggaacctaggaggcagaggctgcagtgagccaagatcataccactgcactccagtctgggcgacaaagcaagagtccatctcaaaaaataaaataaaataaataaataagccaccttagtgttacccttctagcttggggatcttatttcctgatcctgagccaaaaccttgtaacagatttctggattttcatctagaaagagccttagtctagtggtaccctacattttcaccactgttttattctgccttcccccaccacatgggtaccatgatttaaacagtttttaaacatatttatatagtaatgaagtagtttaaaatttcccacttgttattaatcaaaggcagatgtaaaaaccaaccaaagttttcaacttgcctgagataaatggttcacattcattccacaaatattcactgagtgaagactaagtgccaaatattggactaaagaaacggataagtattggtactcaggaaatggttgacaaggcttggtccctaccattatgagactaagaatctggaggacagagcaattaagcggggccttacagtacagaggagagagacctcactcagtattttggaggaaaggattaaagaaggcttcctgggggaggtgatgtccaagatgagacctgaaggacacataagagcaagccaggcaaagggcaggggatggagggcctctgggacaaagggacagcctgtgcaaagaaggaagctgctatgttctggagattcctgaggacctcagtgatgagggaaggggcttggggccagagtgtgaagagctgagccaggccaaagagccaggacctcgttctagacacagcagggaactgcaggacatgctttttttttttttttttttttgagatagtctcgctctgtcacccaggctggagtgcaggggtgcaatctcagttcactgcaaccactgcctcccagtttccagcaattctcatgcctcagcctcccaagtagctgggactacaggcacacgccatcacgcccagctaattttttgtatttttagtagagatgggggtgtcaccatgttggccaggctggtctcaaactcctgacctcaagtgatctccccgccttgccctcccaaagtgctgagattatagtcatgagccactggacctggcccactgctggaccttctaagtagaacactgacaaactgggattagcattttaggagaatcatcccagctgcagggtggagaatggattgagtgtgaaaccccagaggaagggagaccagagggatgtaggggaaagggagaggatctggaccaagggaggagaaatgggggtcctgaccttttgatataattgggccagaaatgtagatacccaacattgcaattgcctggagcagcctgattgtggctgaaagcccgtctctgctgggcttcacaaagtattcaaataggtgcccagacagccgttattgcttaggtgggccccaggcaggggaggggaagctcatgtcaccaaaccctgcccctgtttacaactgaagccaggaaagctcaaaactgtcaggtggctccagcagcctgaggagcagagtcagaacttgggcctcttaactccctcccggtgctctttcccagtccattggtggatgctcgttttatgccaggcactgtgtgccctgcactacacctcatgccgttgaggaaatgcagggattttttttgaagagtaaatagtgtagatttgccaggaattatgccaagttcacttgcttttcttccccccatcaggatcaaaggcttagcagttaaagaaaacacaatagacttaatacctattgacataaataaatattttacactgttcgttgtgacatgctcatgggaaatgtggatcaaagaccagtgtgtccggatgaggtggcttatgcctgtaatcccagaactctgggaggctgaggtgggaggatcacttgagtctaggaggttgaggctgcagtgaactgtgattgtgccactgcactcagccccagcaacagagagagaccctgtcgcaacacaaacaaacaaacacacacacaccagtgcagttgctaggaagacaaaatagaatccagtcattgctgtcagcagcacagggctgaaagaggtgcaggagttcctccaggaacaatcttgaaacagtgccctcaggaacacatctttggaagaggttgggcagtggagggagtgcggtgattagcactggacaggaccacattggaagagggaacacagaggacaggccatgcacagtgaagaggcatatgccagaaatgtgcctggacgatgggccagggctgcagggcctgggcagcaagccgtgattcagtgagcagatatcatatgagaacggcacactgcgaggcaagagcccaggctgcaaagactgattgaagaggagcgcccacatcccccaatctgtgttcatctgcgtatttgtgtttttagatgtgtctgtactcacacatactcccagctgcatctcctgtacagtttaactgggacccagcctctcagctggtttctgagttactcacatgtgcatttatagctccctgcttggaaccgtgcttaggtgaaatcttaaagagactccttgtggcagtttcctaagagtcccactgtttttttttttttttttttttttctagtgacggggtttcactgtttcactgtgttgcccaggtgggtctcaaactcctgggctcaagtgatctacctgccttggcctcccaaagtgctctaagattgtgagccatcgcacctagccaagtctcctcaccgcccccccactttttttttgagacagagttttactcttgttgcccaggctggcacgatctctgctcactgcaacctccgcctccagggttcaagcgattctcctaccttagcctcctgagtacctgggattacaggcatgcgccaccacgcccggctaattttgtatttttagtagagatggggtttctccatgttggtcaggctggtctcgaactcccgacctcaggtgatccgccctcctcggcctcccaaagtgccaggattacaggcgtgagccaccgcatccggccaagtctcccactcttgataagccttttagtggaatgcttaacttgtacatcagcaaggatgaagcagggagcgacccatcccttggtcagactgcatctgcacagatgccctgtcagaaaacttgttatgccctggtaaaaagttaagaattataggcatcaactgtttcctgccacataactgtcccatgatggcatgggtacttcttgggttaataatcaggtgttggctttcctgcaaaggctgattatcacttgtcaaattatcactgctgaattgtttaatcaatggtggcttttgagcttgagcctgctgcatgcacagcagtgttctaggacttccaagaggaacagagggtgaccaaggagccatttttaccctcaagaagagttatctagaaggagggtgtgtctgcacagcttaggggtcagcgtctccacagcagctgcataggcagatagatgcacatagcctggcccaggggaggtgctcaggaaacacttgttgatgattgaggaaagaatgggttatttctctattaatttttggctctgggactcagggaaggcaccagagagaaggtgacattgatctgggatggtcggatttcagaggtgaaactggcctgaaaggaaatgccacatcaccatgtgcatctcattagaagtaaaaggagacatgtaggaaaccttagatttgtttttggtgaagtgaaagagagaagttgctctaaaaggttggaaaccagcccctaagaaaaaaagaaagaactgagacaaatcaactcaggagggcctgggacccagcgtgcgtaagagtctaccttgtctagacatggctcttacgcagtgattcctcacagcacagcacccggtgagataggtactgccacttccattttgtaagtgaagcccagagaagcaaagaaatgtgccctaggtcacatagctagtcggtggcagagctgtgattggcaggttggtcgaatgcctccaaagccctcgaccttcccactatacttcacgcatctctagagaagagacagaagtagccaggatgaaggtcttcaggtttaagaagaactatgaaaaagcaaaagatttttgttttcgtggtttttttactataaaggaaaactttaaataatagcaagagtgctataggtaagatatcagaaagaacatccttattgtgaaagctgttacgtgaaacattgagccagcatcaggtcaacgtccagcggccaatcttcactttagttcaggcttcatcctggggaacttcaggaagtttctgtcttttatcagatcccctctttgggtaatttccagactccccagggattgttcacaaagtcacaaatggctagttctccactccctccagctctggaccattgcccagggcttatctgctggtcacgtctcaccacctcatagccgttgctactgcctgggctctggtccctccaaagagcattgagaagctgctgtcgtggaagatgtgaactgtcatggttcagagctcaggcttgctactcactggcagtgtgactttggtcatattagtcaatccttctgtgcctgggttcctttgtctattaaaaggaacacagtgtctatatcatagcattgttattcagattgcagtaattaacacatgttaagcttacagaatggcagttgacaaactgtggcccatgggtcaagtccagcccaacacctgttttataaataaatttctttggaacacagctacattcatttgtttgcatattctctgtgactgcttttgggctacaatagcagagctggtagtgacagaaaccacagggcccgcaaagcttcaaaaacttactctctggccttttgcagaaaaagttagccaacccctgatatagaatgatgcctggcacatagaaagtgctcattaaatggtagcttaaacaaagaaaagggaaagaagcctcactagttcttgagtttaacaaaatttgaatgaggtcctatgatgaatgcttagacaatgacaacctaaaaggaacatctaacacagctgtttgtgtgatcagtgctccctgagggtggtgatctcttcctgcctcctcaatgccaggaggtgctgccatcatgctgtgtcccatggactggagtccctcctgactgtgttctcccaccactctttcctgccccagagaacgactgacagggagagcagccaactccatcaagatcaacctccgctgtggggcatgctctggttcctctttcctcacggccctgaggggacaattacaatagtccagtctcgaccttccagtctcttccctgtggatattttgggcaggataactctctgttgtgcaggactgtcctgcacattgcaggatccttagcagattccctggcctctgcccactagatgctagtagcacccccccaagttgtgacagctgaaaatgtcttcagacattgccaatgtcccctgaagggcaaaatcgccccagttgaaaatcactggcttagtctaaaataacatcacaggtggggcaacagcaacccggtctaggatggcttaacttcatcctttgaaaaacagtgttctttgcaaaggcacaaactgctaaagatgcctccagtttgtattattgtatcattaaacagagcatctcacctcgaagcagcagcatctggactgctccgttgggggctacacttccactgggcagctccctgcctcacatctgtgtaggtaagagggtctatcaaagagctaccttccacagcccagagacggcctgccccagagtgtggaagatgcttatgaatccccccacccctggccccatgctagctttccagcttcactgtatttacatccgatgccacctcaagtgtcaggaagaaactgttgacagctttaaaataatagtttattcaccgattcgcttattctcccctccagtctttaatgaatccctttgtgggctggtcacagggaaccagagacagagcccttaccttcaatgggctggtaggtgagggggaggtagacatataagcaggtaattacaatgaagcacactaagtgctatgatgacgtgtgctggtgttgtggaacacagaggggacaaataacctcaattcgggggcatgtgcgtctgtcagcaaaggcttgcctgaggagctaattctggaaacacacaggagttagcagggcaaggagaatatgtgagtatttatgtgcatgggtggtgagtgttttagggatgaggatggcatcccattgcaggcaacagaggccctaaaaagcaggcgagagcacgtggcacaattagagactcagtagcctaatgtttgaggggtagtgttgggagacagttctccatgggtctttcatgtttcagcatatctgtgaacagagacactagacaggttttgttccagacttgcttttaaaggacgtttatgtaacaaacagtcttagatgatagtgacaatatctccctgcagggcaaagagtgatttatttgctgtcagcataataaagatcacgtctcctttcagaggtaaatgttggacaggtttgctagccgccccctttaaaagaatgaggtttcccaagccttgagttcctcagccaatgatgctgagcagtttgcatatgccagtgtcacttggtccacatatcattctgtggaactggggctggggaaacaggtgcaaacgttactctggctactgctgtgagtattaaactgtcccttgtctctgacccaggcatctcatgtcttctgccgatatccatgaaactggcagactaacttgttaacttgcaagcaggataaaagctctgaccctccacacttttggacaggtgatgagtggggaaagcaaagcctggagaagtgagtgggattgtgaaggtcttgtgtgctacatgacagagcttgatatttatctcaaggagccactgaagaactttcagcagagaactgtctggatctggtgtgcactgttgtggagagtggagagctggagggtgagcctggagaaacacggccaatgaggggtacagctgtggggcaagtggtctgaacaagggctgtgccagttgggagagtggcggtcaagtttaaaacaaacttcatactatccttgatagcattttttttctgatccaggattcaatccagatagcatttatctgtggtatctctttagaccttttatgcccttgacatttctgaagcatgtagaacggaccttgtagcatatagcatatagatcttagagaatgtccctcgatttttatttgtctgagggtttctcatgacgggagtgaggttgcatgtgtatatatatttgtgtgtgtgtatgtgtgtgtgtgtgtacatatatatggttagggttaaggtacatatacacagtagagggtgtgagagaaagcaagtgtgcaaaatgttaacaactggtgattctaggtgatggctggaagtgagggttgaaggagaggagaggaacgagtcagttgtgatcgccaggcatttggtgtggtggctggtattaccagctgacatagagggttggggggagctttggagggaggaagggggaggaaaagatggtgagtttggttatttttaaaaatgatttgctagcctgagtccccttccagccacatctggttttaggatcccatggattatccaaagggggtagccagcaggcaggtggtctggagctcagaggaaaactgggcaggggcagagctggtgttgaagccatgggaggggacagcttcaccccaggggagtgtgtctgtaagaaggagaaggggccaacaacaaaaccaccgtgacagctgacattgaggggcaagtggccacagagatctgagaaagggcagggaaacgggaggacaattcaacaaagcagtgtccccagaaacagagggttcagaaatcaggagtggggggttagtgccaccagggtcaagggctgcatgaagtgcgagggccgaagagtctgtgtggactcagtgggacatgggcgtggaagagcagggaggtctgaatgggaagtaaagacacagatgcgggtatgcacacagttctttgaagatgctcggccgaggagacaagagtaatcaggtcaggggcaaaaaggggtactcgcctgaggaagtaaacattggatgtccacagctcagagttagttcaaggtcacattcaaattagataccccgatttcccccggcctgctgtctaaatgccaaatcaagtcatggcttctcacctaccgcttcacactcttcacaaagatgagtgctgggaaggcggatggggagagggagcatttttttgtcagccaggggagacagctgtaccagtgatgaaaagcacctgtgacattttcaagtctctctctgccaggaaaggagcctgtcacaaaagcagcctctgcccacagtattcgctctcccactggtttcccgtgagtgccggggaacattgctacatcaccctgtgtggaatatggctttatgatcatgatcatttgaagttttctcttttcactcaagagcttgtcacaaataatagccttgttgaccccaggccctcattttctggaaaccaggctgtattttctccatcttcctttccttccagctgccttgcagcactctgcacagcttattttctaaaactcaaacaggagaaacaccaacattttatttcggtcaataactattttacacaagagaatccatagcaatttaactagagtcaaatatttaaactacaataaaatgcagtcctatgaatgaataaccaaattgtgatatatccatagaatgggatattatgccatcataaaaaggcatgaaggccctttttattgcataggaaggaatgctacaacatggatgaaccttggaaacattatgccagatgaaagaagccacctgcaattgaccacatattgtatgattctgtttatatgaactatccggaagaggcaaatccatggaggcagagagcagattagtggttgcccggtgctgagagcagggagagtgggaggtgactgcttcacaggtatgaggtttcctttggaatattgaaatgttctggatctaagtaggggtaatggttgcacaacatcgtgaatatactaaattttactaatggtagttttatgctctatgtattttaccacaacaaaaaattaatttaaaaaaaaaagaaagaaagaaagcaacttcaccctgagaccagagagaaaaaggccctgactctgctcacaagaaccacaaggccttcagtgtgatgagggtttcacagcagctcttccctactttggctgcccatgagaatcatgtgagcagttttttaaagcacctcccacctcaacaccaagaccaattaatcctgatctcagggactggggctgggagcaaaatcaggagctcttggagattccactatgtagccatggttgagaaatatggctctgggctggggattctccaaatgtggttcctggacccagcagcagcagcatcacctgggaatgtgttagaaatgcagatgctagggctccgtccgtgaagtactgaatcagaaactctgagggtgtggcccagcagtctgtgtgggaacaagccctctaggagattctgattgtgcactcaagttctggcaaccactattcaagtctaggccaagtaaactacagagtttttctcaaccagtgagtattcattgagcatctgccatacgtttggttccataaagggtgccgtgaaaataaaaagacctatcccagctcctctcaagcatctggtgggttagattcttggaaaagaaatggtacattaaaatgagatcagcctttttacggctaaacaatattccattgtatgtctgtgccacattttgtttatccatgcatctgttgatggacaattgacttatttccaccttttgactaatataaataatgctgctatgaacacaggtgtacaggtatctctttgaatccctgcttttaatactttgggatctatatctaggattagaattactggatcaggccaggcgtgttggctcacacctgtaatcccagcactttgggaggccaaggtgggtggatcacttgaagtcaggagatcgagactggtgaaaccccatttctattaaaaatacaaaaattagctgggtgtggtgatgtgcatctgtaatcccagctacgtgagaggctgaggcacgagaatcgcttgaacccaggaggcagaggttgcagtgagcgagatcacgctactgcattccagcttgggcaacagagcgagagactctgtctcaaaaaaaaaaaagaattgctggtattatatggtaattctatcttaacgttttaaggcaccgccaaactatttgatgttcccaccaacaataaatgtttgagataatgaaaaagctctgttatgtatattttactacaatttttaattttttatttgagatgctctgtcacccaggccggagtgcagtggcgcagtctcagcttacggcaacctccatctcctggatttaagcgattctcctgcctcagcctcccgagtagctgggactacaggcgtatgccaccatgcccagctattttttgtatttttagtacagacggggtttcaccatgttggccaggctggtctccaactcctggcctcaggtgatctgccctccttggcctcccaaagtgctgggattacaggcgtgagccaccgtgcccggccgacaatttttaaaaagagattaagccatgaaaacatggttagaaacatgaccatgtttctgatggtcaacactgaataaaaattacttcaaacaccatatttaatcatgtaaatgttatgcatataacagtgcatgaaaaagacggtatctgtagtcctttctgttcagagatggttaccagtcgttgcctgagcctggagccccctatttgaatattatgtttaagaaagacagagcaggatgtcttgcgagggcggtggctacagggctgtggacttaacactttcacatctagcacgattcctcacatgaatgggccaaggaagatgaaggaggataacatgtggtgagcactgatggggggctcaggcctggctagttttcatgataggggttaggttgttagcatgtcagcagtttgtttaacttagtggtttgctgttgtttgttgcttagttcaagagctgtttgttgaacacttcagtgtgccaggctctgcagcaggagccaggtgtacacgcatgcagaaagcgagctgacagtctagtgcagcgcttctcagcctcagcccgcagcagcatcgcctggcagccttgtccaacggcagatgctgggcgccacccccagagtgtccggttcggtaggcctggggtggggcccgagactctgcattttgaatgagttcctaggcggtgatgataatgcttgtctggagccacgctttgagaaccactggactactggggtggaaaggcagacaatattgctttgatcagtgtggctgctgcaaggaagagaaatgcaaaggctgtataggagcacagaagagggggaaaccctttgccctgccccagcgaggggagggtgtttcagggagatgtgaagcagcttggtgtgtctgcaggatgcaagcagctcagcgctgctggaacgaaaaggaggggtgggagcagacacagaaaagtccagagagaggtgggcagagcctctccacgatgaacatactctaaggtcacaggtcatgagaacctaagaggaggttagaaatggagaagcaaaagcaaacagatcgtcaccctttacctttggcagcctggaaaccccacccgcctccctgtaataaacctcatctccagaaggaacctgatgcaggccttgacaccagtgtgtaaatgactgcggagcctttttgtccccgcctcatcccccacccagcaatattagacggggattattggcggggtggaggagaaggacttcctgagggtgggtggagggctgagctggcagccccagccttatggttcacctcttctggcctccagcctgcactcctggcccccaccaccatggctggatgggaaatgattcccatctctctctgtgttaatacatccatcagtcctgcccctgtgactagagccacagagaacacagctaagccacaagactcagagggaacagcagccttcatgtcccctctaaatccatctggaaatcagacatcctcaggatggtgtctgcatgtagaagccactttttttgttgtttagagatggggtcttgctatgttgcccaggcttgtctcaaactcctgggctcaactgatcctcctgcctccccaaggggagatttggggggatttaccaagcccaagtctcaaccctccgtctccagctgacccaaacaaaaattagacaaaagtttgatgcaaagtatggattaaagcatctttagaaaatgtgtttatttttattgatctataatgtaaaatccaagaaaaagagttggcctgctatggcaagtccagctttgagctttattcataacaagtaaccctccccttctagccctccctcactgtcccgggaccacctctgattcagtggtgatactgacaaaggaaaactctaacgctagtttgattcctcgccctctgtttgtacataataacatcataagacctcatccatcaattattaacccatgtccttggtcacctcctttccttctgggcaggacattggggtttatgactgtgcctctccgcctacccagcaggaaaacaggtagaattcagcaggttgtggccttctgtgcggtgggtcaacctcttaccaaggtgatgctgtgggaaccacactactgactggctgaacccactgggtttttatgagaagacatagatattttaatcagcttcagaagtgaactgcaggacctataaatatattttaaacatgtttttaaaatgtagcttctaggctgggtgcagtggctcacatctataatcccagcactttgggaggctgaggcaggaggatcatttcagcccaggagtctgagaccagcctgggcaatatagcaagaccccatctctttaaaaaaatggcttttacatgcagacaccatcctgaggatgtctggtttccagatggatttagaggggacatgaagtctgcggtcccctctgagtcctgtggcttagctgtgttctctgtggctctagccacaagagcgggactgttggatgacccccagagagaggcaggtactagcctcccaacaggaagacctttctaacagatggaggaatgtacacaagcaggtgtcaaatgatcctagctcagccttggcacagggcaggacccagacctggcaaagggaggccggatggatcccagactctttctgagtcaatgcatcacacatccctagaatataccagcctctccactgcagcggggcctctgagcttgctgggccctctctagtgaacgccattcctcacgtttcactcatggttggttctacttgtcctttaaatctcagctttaacggcgcctcctctgggaagcctgcctgcatcatctgcttgacagggatccctccatttttctgttgcagccctcgtttaattcctttgcagcgctcattgcagattgcaattatttccttgtgcattggtttacttgttatttattatcagtctcttacactggtctgtgagtgccgcaaggtcagagactagagctgttttgttctccattgcatcttcagcacctagtacagtgcctgacacatactagacacatttgttgaagaaatgaatgcattaactccaaaattaaattgcactccaagaaggagagcatttagagatttttctccttcattcaacatttgagtactcgttttttattgcaaatacaatccatcttattaaatgtgtattcaaatttggtacataatttttgatcattttcatatagatacacatgcctttcattatggtcagacctccttacaaaacaaactttgagggactaaccaaaagctatcattgtcctgaaattgtgcctatttgttgaaaaagggcgtgtcatcatctagaatgtgtaaactttgccactacagtggtatcctttggggcaagttttgatctgactgcgtgttggtagccggcccaaagagatgtaccctggagcttgggcccaggcaggttctccaggaagctgcctgcagtgagcactgacacagacacaggggggtccacctcagagtatgacctccaagaagtgtcatggggcagaattaatgttgactctggtgcctggatccccccactgtcttctcatggctacctttcatcagtgagcccctctttcttctgtctccaaccttccttctctggtctcttttgccgtctgcatagcagtttgctcaagcctcttcataaaaaacaaaaacacaggctgggtgcggtggctcgcgcctgtattcccagcactttgggaggccaaggcaggtggatcgctttaggtcaggagtctgagaccagcctggccaacatggcgaaaccccatgtcgactaaaaatataaaaaattagctgggcgtggaggcacgcacctgtaatcccagctacttgggaggctgaggcagaagaattgcttgaacctgggaggcggaggttgcagtgagctgagattgcaccactgcactccagccttggtgacagagcaagactcagtctcaaaaacaaaaacagaaacaaaaaacaaaatctttcacattaccctcaccttaccataaccaccacgcatacacccttctctcatccctttatggctaaatttctgaaatgagcttaaaaaaaccctccacatccattcaaggatgtgttcagacataagtagggatatgacataaagttctggtcttccaaaggtctttgaaactcatattctgagctctagtctgtaataagtttctgtactagtctggctctaacagtcacaggtgaggcaggctaacaatcatcactgcttgctagtgtgcacaacccgagtaggctggccgagaagttcaagtcagggactagaaagcactggggtagctttggcaggacctgagctggactttgaagagtggacgaaatttggaaaggtgcagaggaaagaagagggcatttgagcagattttttcataacggcatttgtgaaggtgggttggcatagcctgttcttaggctcagggagctggctgaagcatggggcaggctggggcgggatgtgggggcctttgaagactttgacaggttggggcacttcaaggccatgaaaaacagctaggctgtgctttgtcttgttggggtggggcagggcatgctagggagaaagggagtgtacggatgggtggtggggtggtgccacccaagccaggctatgacaagattgatctggttactgcaggagagccagcctggcagtgtaacaaggaaggctggggctggttgcctgtgggaagcctttgcagtgtgacatggcgagggcctaacccatggaagcatgggagtccatgacccactaagggcaaaggatagaccaagctggctctgagatgttgagccttggaggagcggggcccaggtgttctctgatgaggcattccaccatcaagctgtaatctaggccataacacatcctctaattgcaatattgcaaaaaatatatggactgtatgtgaaccctgaaatttacaaactgttaaaaatttatgacctatttggaaaaatttgaattctaattggattcggtaatcttaaggtattaattcttaactctctaggtgtggtcatggtactgtggttttaagagcccttatgttttagagaaacatatgaaatatatacagatgaaatatatctggatttgtttccagttatccaggtagataaggggagaatgggcttagcatagatgaggcaggactgtttctgaattgtaaactgtccaagctgggtgacatggggttcattccactcctctctctacattgtatacatttgaaattttctgtaaaaacattctggtccttggataatgcaggtcctacaccctgggcctcaaaattcccaatcagaaatcacgagaggcattttgagctgtgccatgttaatctcttgttacctttcgaaacaggaattctgaccacttctgttttgcctagagcaggaaaaacacatagacaggaaagaaataatgccttggctttatttagaaaaacaaactgtgaaagacacgtgatcctcctgtatcacgatcatgggaggagtccaaccaactggagaggcgaagtcaaaactcagaagagcaaaggcaaagttttagctggaaataaatgcttcttttaggagagtcactcccagtggaggatttctggcagtggagcacttggcatgagtgtgaaagctgacactgagttggaaaatggtagcccagggtgtagcggccagcataaggccagcactgtgcagtcacatgtcacagctcagggaacagaaaggcctgctgttgtcacctctgatattggttgtcccggtgcccaccctcatggcacctctatctctcacatgccacaaagacaggaggctgctctgacagtgtccccagctatgcaaggcggggacacccactagccattacatgctgggggagggccctatgaacttccttggcaggccgtctcccaggctacagggcagaaatcagatttctttttcaattagtgcccccaaacagaaaccatttgcacacaggtaagctagaaagctaggagggtacattttgaacctgagcaagtgatctcatttttcctcctcttttttgaggagaagaaatacatgagggaattaaggtgggtgcacgttccctgggaaaggaacaagcatgaaacaggtgttgagagttcagcttagtaaacatgtgagggcccactctgtgccaggcactgtgggaagtgcagcgatggatgagccgtggtccttgtcttcaaggacagcgtggggaagccaggaaattccaggtgcacaaaatctcctggataaatactgaaggacacataagtcctgtgacccaagcaaagtaactgttacttagccaaagtcaaacttccggcaaatctcttaaatctctatttttcacccataaaatggtgcaattctgccttgcttaccccgtaaggttatagagttataaggatcaaagctactacaatataataacaatgaggaggaggaggaggaggcgaagacaaggctttcttgaccttgctgacctacagacctgtgactggtgcccaaggacgaactccgctgtggatggcagccaggaccagggcaggttcctgatgcagatggctgtctgatcccagccagtcctggagcaccggtgccctgtgccctcattcccgaagctggttcccctgggcaccttgtcacatgcccagtagctgccttgacatgagcaacctttctgactcattcaaatttgcctgacagatggagaaggtgcttagtcctagtattcttaataaatatcagagcttaagagccagaaggaaccttccagaacatagcttccacacacatcccatccccaccactacgcccaccacccccaccatttgcacgaagggcaatggaggctccagcagggaacataacccactgaagtgttgggacagctgatgctggaatctcattctctggactcccctggtccaacatagctgcttctctttccaagacaggttttgccaacaccaactctactgcctttaatatccttagtctttcctgccccccaaataccttatttggtcctaacttccaataaagcgtatttagagcaagagaaaaaggaaacattccccaagtcacattttcccaagccctctgttctttttcactctttgggaaaatgtttcctaaatgcccatgggggcacgtgaccctacttataatatgggttcacagagacgaagatgaggggtccctatcttcacgaggctctcgtttagctatcagtaaaatgccctcttgatgaaacctttttgaacctccactgtgggaaaagaaaacccttctaatccagttccctttagtcatgtgtgcaaagagaaagcttctcaatgatgcatctctttacttcctgagttttttgcattcatgcctggctggcagcttccgccctgctggctgtgggcccaggcagtattgtgagcacagaaaaggctggcagcctcacttagggagtcttaccctgtgctgtgtctcttcctgaccctggggttctacatgaggcctcacggttgcttcattctgctccccgctgcccctaaagcattcggtttggcccccagctgaataattgtcttactccagtttggccctggagtgcctgctttgatatcctccagcctccctcttccctagtcaccatcttggtgtagttgagttattttgaggccttgaaaataagaatagtagagctcagcggagactctgccatgcccaagtgagaagactggtgtccagtgaaaggttggactggagattctgcaattccgtcatgctgtaacatttctgaaaatgcatagcctaaggttgacagcctgaaaaatcagtagggttccgatgtgtgtgtccggacctagaagtaagaactaactaagcctgggaccaacgcctcatagcatttgaaatgaacctgggtaccaagtatcacttcggattcttcccactctcagatacggtcccctagttagagagcacgatgtagggggttgggattctgtggggccaatataacatttacacccttgtgaaacagtgcaggggtctacagaagaattcccagaagaggtggtgttcctttccccttttctctatttacccaccttccttgtgttgaaatactgatgaacggacccccagatggcaaagcttgatccccagctctgatagagcccacaggacaccctgggtctaccctaacgagccatgacatgccaattctttgcttttctggagaaaccttggcctgaaagtctgtttaattaccgtggagataatcttttaaacatagatttacattctttaaagactttttccctgtgggagtaggaaagttcatctgcacatagcatgtttattttcatttccaggggaggaactgctatctggtagttagcaagaagcttgagccctggaggaatttctttttttaaagtctgttcctcttcactgatagtgtgtcaattatattgtaataattagtttatagtgtggtcatatttttttccagcttaaactctgcacttcactctgtgattccaggcctataattatttaacatttgtcaatcatccctatcagattgggttctatagttactctaaatgtgggtatcaagagtcaatgtcctcaggggtttctcttcaggaaggtcatacttgcaaagccagcagccacaaagacctatttaggttggtgcaaaagcagttgtggtttttgcctgaaaggaatggcaaaaaccgcaattatttttgcaccaagataatacttggcactgtggtcagtaagacactaatttttcccacctggggtggccccgcagatttgctaaattcttccccgctagaatgccagcttggatgagcaggggctctattgtattcaacctggcagccccaagacccagagtaattcctggctcataataggtactggctaagcagatgctgaattgctgaaagtcaacaggtcttgacgtgtgtgtcaaacaggaacaatgtacaaaataaagcagagttcggtggccttctggctctggcctgtgcagccctagtccttctttccccacatcacttaagagcaggtggtcctgagtggttgctggacctgattctggaggccaagactctgagccttgaagatttacctccggggattcagaaaagaggagaaaaggagtaattgtattgaacagagaattagaagataaggaaaatccctttgtgagaaactctaaatcttgagcatggatctctgtgtccaggtcctgatggggagaatagctggtccaagaagtacccgtcgtgtgggggcctgctgcagtcccccatagacctgcacagtgacatcctccagtatgacgccagcctcacgcccctcgagttccaaggctacaatctgtctgccaacaagcagtttctcctgaccaacaatggccattcaggtgagggagaggccttggagacctgaggggtatgtctgagtctccctcagctgccaggcctgtccttttccatctggcagggaggtgttccgtggaagcatccaggaggaggggtggggcggggcgggggtgtctttgagagattccaggagcactctctccaggggatgctggaggctctgggctctgaggatcctgccagggccgcacttcccagaagaagcacatctctcaggatggggcaggagaccggcctgagcactgtagttcattggctgtgcagctggagtgaattctggaccataaacgattcaaggaaccacacagtttggcggggggtgcccaggctttggagtcagaccaacctggatttgaactctggcttgactgcttacgagccatgagaatctaggtgagaattttagtctccttgagcttccatctggaaatggacatattgatggataccgtgaagactggagattatgtacgttggggtctggcatacagagtgaagtaaatgcttcataaatagcagttatcgttgctgttgctatataattctaaagcttggaaggtacttcactaaaggtgtctgatccatcaatatgtaaataaacacccatccgttggtctagtgttagcgtttctggcatcactttccaaggtgaaccaagaaggtgctggtgccactggagttgctttggggaaaagggaacattctcagggaaagagcccaggtgtctgacctttaggctgcatctctgctccgcacctcactccatccacctgcctctctctgggctccagggggtggcagcaggggtggagggagcattgcctacctgactgctctctggcagtgcacagctggccggggctctgaaggctgctcctccactccccgcagtgaagctgaacctgccctcggacatgcacatccagggcctccagtctcgctacagtgccacgcagctgcacctgcactgggggaacccgaatgacccgcacggctctgagcacaccgtcagcggacagcacttcgccgccgaggtaagtagggctgccagtctggcagaggctgctctgcagtgggtggtgtggcaccttctcgacctggctgctgtgcagataacaccagagcatgggacaggctgccttcaggctctctgccccacctctggccctggcacaaggggcgcagccactccactagcctgtagctcatctgcactgtcctggtccctttcttctcctgaacatgctaagtttgtccctgtgtcttttactgagtgatgctgctggggaggcagtattcccagggtggcccagtgggacatacatgcccttcttttagacattgccttcctatctgtgcagataaaaatctcctgctgactcacactgggctcactgctcccccaaacttctcagcctttcttcatatgtcatgctgtttgcatcattttgatgctatctttccctctctgggcatgggttgtgtttagaacatggggacatgggtctagggccacccttctacctggccacaagtctaggggtacctggcagtctaatgtgcagggcatcacggcaagcagactcactagggacaagatgtcagccagcacagcatcgtgtcatgttgccttgagaagctactccgaaatgccaaaagaaaattagaagacgggcagagcatttgtcctatgcaattgcaggatggggtggggcaaggagggggttgagatgctccattttggcactccaatagccctgaactgggggtgtggctctgaatatttacagggaaatacaagcagataaatgctgctgactgatcagccaggggagtccgtggtaaatagagaccattcccctccagtcataactgctgaactgcttaatgtttcagactaatcataggtctacttgcaagcatggaagggataggatctggttcaataggatggtaccactggaggttcacatatttcagagcggcccttccctgaagctcaagaactgaaatttcctccaggctaattgcagtgttgagacttctgcttcccccatggggaataaagaaggtgtaaaccaaaaagtgtctgagactcaatccatttagaagtttattttgccaaggttaaggacacatgcccgggagacagggagacaagtctgtgcctttctacaaagatgattttgagggcttcaatatttaaaggggaaagggcagacactggggaaagagggagaaatgtttaaaaggtgtggggaggtaagaggcaagaggtcgcattcttctgagtttttgatcagccgttcacatgtgagagaggggtagaggaatagtcacttgtgcattcatctagctcagcgaatctgcattcttacaaaataaaacagacatgggcagaggaagcaattagaaatgcatttgtctcaggtgagcagagggatgactttgagttctatcctttgtcctgaacccatgaagataagttatccatttacattgtcacggtgaaattcaacagaactgttttagggtaaagaccttgcggcccacagtgaatttcctagtgggcaaaatgtgaggtgtgttgcttttttatctttgtagccgtcttatttaggaatagaatgggaggcagctcccagcttgacttttctctttggcttagtgatttgggggtctcgagatttattttcctttcacaaaggaggttagggtgtagattggcagggtttatgtgttttaaaatatttctacttcttgtattttctgctattaagtcacagcatcagaccaagagtctggttaagatggaccataaatgccaatactagagaaaaggcatcagggtgtccctaaagtgggtcctctaaggaaggaccttggaagtgtagtggttctttgggatggagttcatataagaagattctggtggggcatgttggctcacacctataatcccagcactttgggaggctgagacgggtggatcaccggaggtcaggagttcgagaccagcctgaccaacatggtgaaaccccatctctactaaaaatgcaaaattagccgggcttggtggcacatgcctgtaatcctagctactcgggaggctgaggcaggggaatcgcttgaacctgggaggcggaggttgcggtgagccaagatcacgccattgcactccagcctgggcaacaagagcgaaactccattaaaaaaaaaaaaaaaaaaaaagattctttctatcttaatctcctcaacagggagctcctttatgcttggattagtcttcacttcctctgagcacaataagaaaagtacagacaaaccacaagctcaaaggtcagctgtaaaaggaaataggggcttaggacctcaggggttttaatcatatagaattcagctctgtttctcaaagtgatgccaggccgagatggtgtgggcagtgtggcagactaagtcctttgaggggaagatggtgaagtaggagctctgaagaaatccttaatagaggaccacttaaaagaagaaataatttgatatataattttttttaagttagaaggagccacttaaagttcgaaatgggaaaattaagctgtattcaataacatatgttgaactgtatttataaacacatgagatggaaaaggatgaatgaaaagagaaaagaaatagagttaaaatctcaatatgtcatagtctcaaggacaaagaaccagcaaaaatgcatgggttgtgtaaaccaaaaataaattctaagccccccaccccacccacctgccatctgaatggacctctcctcttgaccaagggcattccaaagttaacatgaaaactagttcaggccatgatgggaagagggagttggacatgacccattataccctcctcccttttggaatttaggaaaagcccacattcattaacatcaacacagaccttaggtctgatcagaaatatttacagtctattctctctgaagcctgctacttgtattcttcctctgcatgataaaatcttggtctctacaaccccttattggaacccagacattcctttctattgatgataactctcaaccgattgccagtcagaaaaaagttaaatctacctatgtcctggaagcctccaatttgagttttcctgcccttccagatcaaaccagtgtatcttgtacgtattgattgatgtattatgtctctaaaatgtatcaaaacaagccatgccctgaccaccttgggcacatgtccttatccttggcaaaataaggggagggtctgagagacctaacctagtctggggggctgagggggctggggttctgtcctcacagttggagtcaagtcttctgcagaagcgacaggctcccatgagtcgcttatctcctaatgggtggcttctcccccactgcagctgcacattgtccattataactcagacctttatcctgacgccagcactgccagcaacaagtcagaaggcctcgctgtcctggctgttctcattgaggtaagagatatttaaaaggttcttaggtgaaatttgaagcagggatgagattgggattccaccttttgttccatgcatacctgttgataatcagctgttcctgtatcgactccgtgtcaactccagagcagggggtatcctcctgtagtgcaccttctctcttggcctggaggcagcactttctgtgcctgggcagcagaaatggggaatgttctttggtccgttggaaaaacgggccccaacatctagccctgttgcataaggcatggaattgcccagttggggaggacctgtgctggaaagggatcatcaaactccatctgccccatcagatgcctgaactcttgatacaactcctgccatccaagctcctctagatccaagggacctctagatcagtggtccccaacctttttggcaccagggaccagtttcatagaagacaatttttccacggaccatggaccagggagggagatggttttgggatgaaactgttccacctcagatcatcaagcattagttagattccgtaaggaatacacagcctagatcccttgcatgcgcagttcacaatagggcttgtgctcctatgagaatgggaggcctctgctgatttgacagggggcggagctcaggctgtaatgcttgcttgcccgctgctcacctcctgctgtgcggcccagttcctaacaggccacagaccggtactggtccacagcctgggggctgggcacccctgctctatatgtaccctggaatgaattctttttttatcccaagatagaggaatgtcttctgattggcttgcatgtttttttttcctaatgaggctgtatgtacctcatttcccaacatgctcatttgtctgacgtggcttttgtgaactcagagctccttaagttctgtgtgacatggatgttagtcaaagccttcaggctcatatctggatcatcaagagcacacacggtaccctatgccccaggacattcaagcccaactccttaagctgaaaacaggacgtcctgagatgcaagaggcaggaccattacactaactcccaagagcctagtgatccatcataattgtccagtaaagtggatccttcaggcagtggtggcaacatacccacagctttgcccttctgatagcaatcgtcaatcctggctcagcctatcctgttctgtcccagtttaacctgccctgtctctgttgcagatgggctccttcaatccgtcctatgacaagatcttcagtcaccttcaacatgtaaagtacaaaggtgaggggtccttgcatgcatattcactctctgctggagaaggaggtagtcagccctgtgtgactttaagaaaagcaaacacaaggggcaggtgctgtctgtgttcaccaggttaagagcagcaggttgttgaacaatgttgcaaccaggtcctggggttagatgaccctgaaaggggctagttcatgtttctaggctcagtcgctctgttcagctgcacttatgccctacggagggaggctgacactatcacctctgcaacatgtctctctaggccaggaagcattcgtcccgggattcaacattgaagagctgcttccggagaggaccgctgaatattaccgctaccgggggtccctgaccacacccccttgcaaccccactgtgctctggacagttttccgaaaccccgtgcaaatttcccaggagcaggtaactgtcgtgccagactcagccagagtccacgcggcacctcagtccccatcatcctccatatcacaatcaatgacttgatttcctcatttagtttcattggcagctcttcaaaacctctccaaatatcacaggtgtctgaaagcaccgcagaaattccaggctgagcttcaaaagaagtcaagctaggcaaatgaatagatgtctcctagttcttttttaaaaaaaagagctctaaatctgcatttgctaatatatcctcagtggctgggtggtattcacttcccaggcaggagagagcctggttcctttacagggcagaataaagacaggatcagatgaaatcatttaagagatgggattgcagcaatgactaagtgagggtccctgcccccaagaagctcaaggtctagtgcaaactggggaacaaaatccttagccatcacctctaaagcttcttatttgataggagatgagagagaagagtagaagtctgtgggatcacccgcgggttagtgacaaagctgagacccaaagttaggtcatctgagttccatgtcactgctcatacctgtcctccacagcctaaattcatgagaagaaaaatggctccccaggagacggggctggggccagcactacaccctggctcacagccccacgccagcttcatgcgtccagggcagcctcacagctgctcctctttacagtaagcttctgctctgagtcacctggtaaatggcagcaggtgggtggacaggaatgaggacatgatgaaccaagagatggatgaaacatgtggggaagcagcaacatcctacctcagaaactgccttgggaaagggttatataatctatgcaggtgcatgaaaatgccatggaacccgcaatcagatggcctgtgaaactcttaactccctcctttattccttctgatatgaccatcagaacaagccctgcgaccctctggttgagagctggcctctaatttaagttcatgagaggaactcagtctctgtggaggttaaggagcactccatcaccccaggtttccctccacgcagggcagattccaggtataattggaaactaacagcactgcctttccctgaagtctcgggtgctgggaagataaacccagcgctgcccagctcccactcacccactgtggagggaagcagttctgtggctttccctctgctttctaatatctcccacccggccccacagaagctggttccagaggcttctcccaggtgcaagagcggagagctagcctcttcccaggggatcaggtgaggaggtcattctgcctgcgggctatttctgctcttgccctcagctgctggctttggagacagccctgtactgcacacacatggacgacccttcccccagagaaatgatcaacaacttccggcaggtccagaagttcgatgagaggctggtatacacctccttctcccaaggtgaggagaggcagtgctggggggagggggtgcgggagtgtggtgccaagacattgggatcttctgtgaatgcagctctggcactgatgccctcaagaagttggctgagagctccctggctgccacgggaaccaggcgccttgtgagactaggtgtggggctcactggggtccccccttcagtgagtctttgcagagaagcaaaaagccgaggcccccaggcacatggaccagagcactctttaagcctgggagtcttgcacagatgggtaagagagaattccctggggacttctctgttccagacaatgatcccttctctaagacacaggataggaccctttccatgagatcagacttctaacttccctccctaggctttcttggcatcaaaggctgcagccagcctatcttaggcctggccaggtgattcatgcaccaccaccaaatgagcaagaatgttcctatgttagatgtaaaacagtgagtgtaacccacaaccatgtctaatgtagcagggcctgttaggcaaggaagcacccttgtgcactgcatttttgtctaacctccttggagcttgcataagcacaagcacataagttcccaattgaacaaaacttaatagcttggtttcttcctaatgctacaagggctcgggtctccctttcacagctgtaaccaataactccccagtagaacattaaccgttttccttgctcagtgcctacatcaacactgctggaaactgggcatcaggggaaaggggtgagggagcacttttggggcccacacccctcttcagacctctgagttcactttcaagctcactttcttactgtagattctcgactgcttcccagcttgggaatcttcatggctggtctgtgcagttccatttcatccccagcatcacgtgtggaccaaaccgggcctggcgttcatatttaaagataacccgttctcacctgcaatcccagcactttgggaggccaaggcaagcggatcacctgaggtcaggagttcaagtccagcctgaccaacatggtgaaaccccatctctactaaaaatacaaaaattagccgggcacggtgtcttgcctcctttgggaggccgaggtgggtggatcatgaggtcaggatttcgagaccagccggaccaacatggtgaaaccacgtctctactaaaaatacaaaaattagccgggcgtggtggcacatgcctgtaatcccagctactcaagaggctgaggcaggagaatcgcttgaacccaggaggcagaggttgcaatgagccgagatcacaccactgcactctagcctgggtgacagggcgagactccgtctcaaaaaaaaaccaaaaaacaaaaacaaaagaaacccgttaacccacttgtcagaatctgctctcctcgtctcacctggtgcacttttttgggttcctttcttattatatgaggttataacgatcacctcctaaacttagttgaacatatggagactgtatttgaaggccctttccaggaagctttagaaactgacccatccttacggtcaggattacatcattctctgtcttttcatgaagaactgcccaagaatttgtcttttgtgttttctcctctccaggtacaactaattaagatcatttccctctttcctcagtttctcagttggaaaacagaatctgtgaacagtagccttcctgaaaattcaaaatccatgtgatgataactaacagtttcttttctaggaaatgaactgagtgcatggaatgtatctgttatggatacaacgctgtcttttctcattcttctaagtggagaatgtagtatccaagggttaaatggaactacttcaactcttaaaaccaaaaacataaaaactctgccaggagattaggaactttgcccacatagatcagatagaattttgctcgcgatcccaggaccccattgccggctctgttctctgagctcacctatgcacacccagggaaggggtggcacatattctccttacagtcaggaggcctaggttcaaggcctggctttgcttcctcctggctgcaggctgtggacaaatcgtgtcccttcttcaggccttggtttcctcagccacaaaatgccaggtaatcccagctactcaggaagctgaggcaggagaatcgcttgaacccgggaggtggaggttgcagtgagccaagatcatgccactgcactccagcctgggtgacagagtgagactctgtctcaaaaaaaaaaaaaaaaaaaaaaaaagccaggttggattaggtgatctcatgtcctttcggtgctaatatgttgtgatggttaagtggacactaacaactgccaatcctgactttacattgcagggacagtgtttgagggcagttacagaggatcagaagaaaccgggcaggagcttgactctgacatccaaaagtaacccccgcttgtaacgatggactatggcattggggataattagccatcttcttagaccggcttgtgtctaagcagctgcttgtagtggggcagcgtaggcaggtttttagccaagcgcttcagtagattctcccagtctggataggggagcttgaggggcctctaagcagaagtctggagaccatctcccagcttaggacgtcaagatcaaagcccaaatgcagcgttgccactgctcttcctccacggtttgcccagagctggtgcttccacaagcccaggttgggaccagctttctcctctgagtgagactctgtggcagtccaaggaaaacctgtccatctggaggctgattatagaagcttggccagaattctcctcccctccctttcacttcccaaagacacaggcagcaagtgcggctgcttcccaaggagcaatgaggaggcagtcccaaaggggtgaaggcccaaacctcatctgcccagggggctgcattcacgaggcctttcttacccagctcggagcaggcctcagactgtaacatgatgtttcaggtttacggtgtgagactttgtcagtgtgaaccttgagcagtttggactcaaattgtagcctcatccactgaggcatgtttgtaattagggtctggcttactcagggctttctctggaagttaacaagaactacagagtcagaaaattctgccaggagaaaagtgatgtttaaaaaatcatctaggatggccgggtgtggtggctcatgcttgtaatcccagcactttgggaggctgaggtgggaggatcacattagcccaagagtttgaggctgcagtgagccatgatcacaccactgcactccagcttgggtgacagagtgagaccctgtctcttaaataattaaaatttaaaaattaaaaaaaaattccctatgagagaaagtacatggactttggggaaggatctgaagtttagccaggttgggacaatttggaccgaatcatttaacttaaccctgctattttcctcaactgtgcttagaaaaggggtacaggacctgatttctgtccttaagaggtttatagtccagctacaccttagcctgggggcagagtttctcaaccttagcactactgacaacttaggcaggataattcttacagtggggggtgtcctgtgtgttgtagcattggcagcaccgttggtctctacccagtagatgccagttgcccctccccagttttaacaggcaaaactgtttccagacattgccaactctgtgcaggcaggaggggcaagttttcccctgatggaaaaccactgccccagggtttctgcggcccagaactcattgttttcactgatgtcataggagtctggagttttatatcacatgccctggtcttcattgttttatggcatgaacatttcagtgtgatgatggttatccctgaaacagtaaggctgaagttactgaggcagaacaaaccaacccaagagagaccttgttccccatcttcctttagaattcaagtatagattcttttttatatgattgggtaagaccaagagacgtagcgtgagagagaactgtgcacccttaggagtgtacaaatcctttatcaggggtgcagatgcctctgaagtagcaacttcttcaggatcccccctttattctttttctctctcccttttgtatgagtttttctctcttgtatgttatgtttcttgttgcctttagttaaaacgtccactctttatggaaaagtgaaagtcatgtcaggcacttttttccattcttaaaaagtgcctcttccattggctgggtgtggctcatgcctgtaatcccagcattttgggaggccaaggcaggtggatcacctgaggttgggagttcgagaccagcctggccaacatggtgaaaccccctctctacttaaaaaaaaaaaaatcagccaggcatggtggtgcatgccagtagtcccatctactgtggaggctgaggcaggagaatcacttgaacccagaaggcagaggttgcagtgagccaagattgcaccagtgcactccagcctgggcgacagagtgatactccatctgaaaaaaaaaaaaaaaaaaaaaaaaaaaaaaagtgcctcttccaagtggcagttggaagatttgagctgaaggagaaagcaagactcgtcctcaaggtgggcccctgggaggggacacgtcctcaggccagttcgggtttcaagtcaggtgctcttagtgggaaaggggaaagacggcagaggcagggggacatcacaggggctcaggcttagggctttggcctggttcttggttcctttgagttcacctcctcctagccagtggcaccaacactgggcccagatgctgggtaatgaagcaagagcccatcagacaaaaatgctaacaccatctagccctgtgctcaacatgtcagggccatggaaacttgagggacaaaaggaagccaagaagtttctataatcacatcattagtgggcttgctctaagcaactgcatgtcacccaccagagcagctatggcacactcagacaagggtgccaggcagcaaaccgcaagggcaaatctatagtcctgcaattaggatctgcttaagcctagacctgggcaattttatgaaaccttaaaaggagggagaaggaaatcagacatggctaagatggctaattatctaattttttgaggctagaatgcatgtgttatcattattgaccttgtatttcttaaagtttccattaataagaaaaagctattagctgaaagaatatcatcgattctcccaaaggatccaaatgattagccagcatcatttccaccttcagtcgctggtctgggtcagaggccgaacagtcaggagcattggtccaaggtgctaagaagtgaggtcctagtgcctttcacacaccacatgtttcccgagcacagtccgagttatgcgctatgggggacagaaaaccccatggtgggtgtcatcttgctcttaaacacagcccgtggcacagggcagactatgttcaggaaagacaatgggaaaaggggctgggcagacggctggacccacccttggtgatggggccctagccgatccttccacatcatctccccacagccccatccctgccctcttagcctcagcccccaaaactgtagggcagatgctttcaagtacacacacttgatgtctgggatgccccctccctcctccatctggaaaattctttcaagacccaactctaatcacgtcctcctggaagtcctccccatccctctaaaggtgacttaatctccctcagtgcagccagaaccacgtctccatctctgttatgttacttgacacaccatagagtaattattaccacacagcaaagacgaatagaaaaagaacaatacgtacatattatacacatactacaagctccttaaggccagggatgactgacgtgttactcatttttatgcctggcatggtgcctggtgctcaatataagcttgttgaaagaatgtccctgacccatctccagttccctcccctcctcagtgtcttctctgcagaatgatttacacataagcctggccagttgtcaccttttcgttttattgtcttgtttttctgtggtctccatttgctaacaatgttaaaaatcaaccatttgtttaagagagattaacgatcagaacttagctgtcagttttgaaggtctgggaggaagttgcctagagatgctgttgtgccttctgtagctctggcttgatagggatcaaaggcccccgtcccaccacccattctttccccagggacagtgaagacagcttagagtgccaagcaccaagtgccagcattgtaacctgcccctgaggctctgggatttaggcccttcagagcaacgtgctgtctgcaggggctgcattcctgtaatctacaggcaaagccctcagtcccatcatagctgtataaaaccagttcccccatgtaatctggtactatcttgttggcagatttctttgtagcaattcttgttttgggttgcatagcgttcataaggaaaactccgcagttaaatatgtcctctgaagatggctccactctgtggtgagggcatcttccttgtcttggcaaagcatcatctgaagatagcactggatttgcagtttcttgactctctgattttttattaggtgtaataataaggggctttttaccttcctaacagattttgtgtatttaaactatcaaacccctgataaatctaaactctctgacctcttttacaaggctggagacggctaaggatatcgctacgtaacatgccatctatgtaaacagtgtgtactttaaaataatacttgaaaaggattatagtccacagtcaaacagaatcgtaaatagagctagaaaatactagactgttgttccaggaacctccagatgtgaaagtgaggtgcttgttcctcgtgctggactcttctgtgtttatgcttgaggcttcagaagacctcaaaagcccttaaccagcatccctcagtccagcaagatgccggtggaagacgcagctcctgggcctgccagaacaggtagcaaggcccttgtggcaagcagctcaccgaccttctccgggtgtctgtaccttcctgggcaaggtgtgtgaccatcgagttcttctatatctgtgtggtttccttgtgtgtgtcacactgccgtctctctgctcgccctgagtcatacccgagcactttgtgaacaggcggctctcccacgtcctcatggtgtgcaccctcttaccagccagccccagagctccttctgttgggctgccactcgatgcctctcgtgggccacctctgtgacctagcctgtctccatttctactgtctgtcccattgttcttccgtgggaatcgcctcccttctttcctattcagaaacaaaccatttctttaacctgaaagtgaatttctctagttctgcccctccctgtaccatctttgatgcctgttctctacagtgcctagaggcttcgctctcacccagccgaggctctgctgggaaacaggctttggcttcgcactcaggttctagttctctggttgccctgacagttctccctgtgtcccgaaagtctcgctgactttctctctcccatcagataacagatgttttggcatctgcctccaatgggactcaagcccatttctgcaaagaagctgagcctccatgatggttggtgctgtctcgattggcagggacagcattccaacaacaccttcctgccctgggcttcctgaggtggtggaactatcgggtgacaccctcgccggcattcctcttccttaacagcttatgatgttggctcagtcaagctgcttcgtttttgctgtatcaaagtcttggctgaaaagtatctgtcccagtctctgggcctttctttgtcttcatgcctgtttggtctcatttcgttgtttccaaggagagtccatttaggccttgacaagtggtcctcaaggagcaaagatcccaggtcacagcactgggttcaactatgctgttgcttacaggacctccaacaggaaccccgcgtaataaccgggggaagccagactctccctccagagaagccaccacgcagggcatgtgccctgagaaaagccccacccttgctggggccttgctctccatagactttgctcagctccccaagaccaggcatgaagggtacccccaccagccacagactgggctgctcagtggtctggggcctgtgtgactctcagaatgtttgaggtgactgtgaaagagatgactttagaaaccatccagcctggatggcttagccaggtggtaaggcttcctagtaatagtcttcaggtggcgagaactggtttggcaccacaagcatctggagcttcaggaacaaagaacgagagtgtatttcatcaaagggttgggaagaaaaaccatggctaggtttattatgtttgtttttttaagattccagggaccatggtctctggttacatttaaaaaagaaacaaccaaccctaataccaagttccactgtgcagaggccacaggccctgcaggaaacagagcttgtgctgtacaaacactggaagctccctccaggtggagactcatgtcctcagtacctccccaagccacaggctggtccttgtgttcaggttacacgaagaggcctggggcagggagtctggccagtggagccactctgccacttgggaggtcatgagcagctggtggtggtgagcagagtagggagaataggcttccctgtccttggggacagctcttctccctgcctgctctgctaaccctcacagcagcccggtgccacctggggaagccagaccaggaacccccagggcccagccttggaccagggaggctctgcaggttcaatgtgagattgcagaaaaagacaatcggaaaagcacacggctgatggctcctggggaatcagctagacttgggccatacgacaggagaaggggcagtgagcaaaacctcaccctgcagcctcagatctggttccccaggctgttaagggccccaagggagagtccttggccccctgctggcatcttacacttgaccagggctctcccagggcctcagccaccactgtgggttctatgggcacaggatcttctgtgtcaggctgggtggccaccatctgtacaactgtggctcccagtgtgagttagaacaaataccccttcttcctccaagacacacacacatgctagaagtttccattgagatgagaaaaccaccagacagaagggtacctgtaaatctacactttctttagacaaaggacctgattaggagaatggggaatggctgtgggaaccttggaaaaaacaggctgagggttttcaggggagacttcatgactgggatcctctgctcactcaagacaatggattctcatgtgattttccccccaggaggtggctagtaggctgactgtgagacttaggtagctgggcacgggttcagccacactgaggacttctctctcaccttatttatcctcaacagtaacttgctggttgaagccgtaataccctggttccatggagcagagaagtggggctgatgtggtgaaggcgtttgtccaggagggacaaagcaaaaatagaaccaaaccatgatgacaagctgatgggctgggggagaagtctggtgatggattccttgcttaggaagtgaggcaggtaccagggacatggacaggagcctgcccaagcaggctttgatccctacctttcttcatctttcctctttggccatgttgtattaaaaactgaaatcttggctgggcgccgtggctcacacctgtaatccccatagtttgggaggccgaggcaggtggatcacttgagatcaggagttcgagaccagcctggtcaacatggcaaaaccccatctctactaaaaatacaaaaattagccaagcgttgtggtgcacgcctgcagtcccagctgctcgggaggctgaggcatgagaattgcttgaacccaggaggtggaggttgcagtgagccaagattgtgccactgcactccagcatgtgtgacagagcgagactctgtctcaaaaaaaacacaaacaaacaaacaaacaaaaactcaagtgaagtcttgccctagccaggaaactgttgtgataaaggagcatcggggccgggcgcaggggctcacgcctataatcccaacactttggaaggccaaggcaggtggataatgaggtcaggagttcaagaccagcctggccaagatggtgaaaccctgtctctactaaaaatccaaaaattagctgggtgtggtggcaggtgcttgtaatcccagctacttgggagactgaggcagagaattgcttgaacccaggaggcggaggttgaagtgagccaagatcgcaccactgcattccagcctgggcggcagagcgagattccatctcaaaaaaaaaaaaaaaaggagcatcggaaggagggattgcagtatgaattccctagatgggcaatttcctgtacttcatcaggcaatccctgagccaagggtggacatccctagaggtctgtcagcctaagaccaaacaaatggtagagcgtctctcaacacgctgctcaaatccagtgtggtttgactctagagtaacctcgtcttttcctctccccttttaagtgcaagtctgtactgcggcaggactgagtctgggtatgtggctgggcagccagccgtgcatgctgcagctgggtgatcactgtgattcttggtgtgatccaagcccgtcctctctgcttctctgtactattgctctggctcctggccctctccttgctatgggtcttaccctcaagtcgctctgtgattcaaagatgaactgccaatcaaatgttcctctaatgaaagatccaatcactctacagcatgtgtgtattcaaagaacctatctaagactttcttttggtcatggtgggaggctgttgctgaaaacataccagagcccattgtggaggtcagctgacaggccgcatgaccttggcaatggactactggtcatctgggactgcttaggactgtgcaatggaacttgggggcaaaactgatggagacagccaatgggccttaaatccagcaggcaaagacagagtaagttcttatttgtgtagcccagggcttatcaaagtgtggttcttggaccacgtgcatcagtatcagctgtaagtatttggcaaaatgcagattcccgggccctgcaccaaacagattgactttgaatctctgggggttgggctaaaaaaaaaaaaaaaaccctacattttaaacaagctcttcagatgacccttgtgtaagtttgagagcatctgctggaaaaccactagaatttgcaaacggccacctcaaaatactccagccagtcccactaagccaaagaccagaatctgagaacagggatggggaaattattcctttctgtggatgattatgcagctgggccatgatttcacacccgggggccatgggctaagatggaggggaaggaaggaatgtaatgtgtgccctctacctcttcaccaggcatcatcctctcactggccctggctggcattcttggcatctgtattgtggtggtggtgtccatttggcttttcagaaggaagaggtgagctggtttgggtccaaaatgggaatggacagctatgtgtccatgatgattagtctgcctgggaaggcagctttgtggcatgaagagccgcagtcacctggaccaccacttaccctaggagggccgtccccaaagcacccgtgccctggcctcctttgcatgagacgcacatgtgaccctggtcgttcaaagggttcaggggtcactgtgctcagatttggaagcgtgtgtgccttgcttgctgctattgcatggccttggacgagtctcttgacttggggcttgtgcctgaagttaagcagccaggctgtcttcttatcaagatctttacatatgctttttggtctatgaattcaaaaagaaagatgaaggaaaacctgatctctcactcacattaactcttcatgccctttgtccatgtttttattgtgacatttggcttttcctaaaacctaatttatttggggggggtatgaaaaataaaaaggtttctgggaaccctgttatggaatcagaggtttgaagaggggggtgacaacgagacctctttcaaaatataggtctactactgttaggtgtgaaagagaacagttggaaaacgaacaagttctgtttttgttaaagctttatttggtgacactccctcccaagaccaacagaattggggaaaggtcccaaagagaggaatccaacttttaaaaacggcctcattccatacctgagtcaggctgctctctggctcgctcgctctcctctctaacaagagttatgtgttctttctgttctagtatcaaaaaaggtgataacaagggagtcatttacaagccagccaccaagatggagactgaggcccacgcttgaggtccccggagctcccgggcacatccaggaaggaccttgctttggaccctacacacttcggctctctggacacttgcgacacctcaaggtgttctctgtagctcaatctgcaaacatgccaggcctcagggatcctctgctgggtgcctccttgccttgggaccatggccaccccagagccatccgatcgatggatgggatgcactctcagaccaagcagcaggaattcaaagctgcttgctgtaactgtgtgagattgtgaagtggtctgaattctggaatcacaaaccaagccatgctggtgggccattaatggttggaaaacactttcatccggggctttgccagagcgtgctttcaagtgtcctggaaattctgctgcttctccaagctttcagacaagaatgtgcactctctgcttaggttttgcttgggaaactcaacttctttcctctggagacggggcatctccctctgatttccttctgctatgacaaaacctttaatctgcaccttacaactcggggacaaatggggacaggaaggatcaagttgtagagagaaaaagaaaacaagagatatacattgtgatatattagggacactttcacagtcctgtcctctggatcacagacactgcacagaccttagggaatggcaggttcaagttccacttcttggtggggatgagaagggagagagagctagagggacaaagagaatgagaagacatggatgatctgggagagtctcactttggaatcagaattggaatcacattctgtttatcaagccataatgtaaggacagaataatacaatattaagtccaaatccaacctcctgtcagtggagcagttatgttttatactctacagattttacaaataatgaggctgttccttgaaaatgtgttgttgctgtgtcctggaggagacatgagttccgagatgacccaatctgcctttgaatctggaggaaataggcagaaacaaaatgactgtagaacttattctctgtaggccaaatttcatttcagccacttctgcaggatccctactgccaacctggaatggagacttttatctacttctctctctctgaagatgtcaaatcgtggtttagatcaaatatatttcaagctataaaagcaggaggttatctgtgcagggggctggcatcatgtatttaggggcaagtaataatggaatgctactaagatactccatattcttccccgaatcacacagacagtttctgacaggcgcaactcctccattttcctcccgcaggtgagaaccctgtggagatgagtcagtgccatgactgagaaggaaccgacccctagttgagagcaccttgcagttccccgagaactttctgattcacagtctcattttgacagcatgaaatgtcctcttgaagcatagctttttaaatatctttttccttctactcctccctctgactctaagaattctctcttctggaatcgcttgaacccaggaggcggaggttgcagtaagccaaggtcatgccactgcactctagcctgggtgacagagcgagactccatctcaaaaaaaaaaaaaaaaaaattattctgtaccatcacaacttttcacaacgatggcaagccttatgtcttgggagcctgttttgctaggcaaagttacaagtgacctaatgggagctcaaatgtgtgtgtgtctctctgtgtgtttgtgtgtgtgtgtgcactcaagacctctaacagcctcgaagcctggggtggcatcccggccttgccattagcatgcctcatgcatcatcagatgacaaggacaaccctcatgacgaagcaacatgaattagggggcctcttggccttggtccaaaattgtcaatcagaaatgaacataaaggactccagagcagtgggactgtctgtcaaaagactctgtatatcttttgtggatgagttttgtgagagaacagagagaccattgtacctggcacaagggctgttcatgaaaagggagacttactgggaggtgcaagacagtggcatttctcctctcctcttgctgctcagcacagccctggattgcagccccgaggctgagaccagacaaagcccgggaggcagaaagatgctccaagaaccaacactatcaatgtctttgcaaatcctcacaggattcctgtgggtccagctttggaactgggaaacctttcttcggatccgcactcattccactgatgccagctgcccctgaaggatgccagtactgtggtgtgtgagtctcagcagccgcccacacgctcctaactctgctgcatggcagatgcctaggtggaaatagcaaaaacaaggcccaggctggggccagggccagaggggaaggccctggattctcactcatgtgagatcttgaatctctttctttgttctgtttgtttagttagtatcatctggtaaaatagttaaaaaacaacaaaaaactctgtatctgtttctagcatgtgctgcattgactctattaatcacatttcaaattcaccctacattcctctcctcttcactagcctctctgaaggtgtcctggccagccctggagaagcactggtgtctgcagcacccctcagttcctgtgcctcagcccacaggccactgtgataatggtctgtttagcacttctgtatttattgtaagaatgattataatgaagatacacactgtaactacaagaaattataaatgtttttcacatcaggctgttctttttttttttttggaggcgaggttaaagcattactatttgcaaagcactctgtagctccctgttatggggataggtaactaatcagaataataatgtcactcgcatccacttcttagaacctggctccaaaggaaaataagctgatagactcaatcactttcctgaggatggaggcctatggcatgtgtggctgcaggtcgcgaagctgcttaatggtgctgggaagcctagaggaattaaataaagaccctggaggaggtgggatcggagctgcaccttgaacaaatagctcagatttgaacagatggatggaaaagagggaggtgttcccaaccaaggggacatgatacagggaacaggtcctatgtctctttactcctgagagtattaaacctagtaggtgggcagcccctcttggttgcctgttaccttattttgaattctttttgcaaaacatactatcacccgtccaaataatcttttgtctaaatccagacttcacattctgactggggcaaaaagaggcagtccagtaaaggttataaaataggtaccatcattgtttgccttatttagaaaagcatccaattttcactataatcaccctaagcctgagagaggtgaactgttcaagggtactttggctccagtgggtgacagtacctggcccagctttggaattgaaacatttctgatggtctgtactctgctagaacacaggatgcttctgctctccctgctctggcatcctgccaggtgtcatggccacgcacaggcatgaagacagccgggaagccagagttcccacgaagcactcactccttggacttgctcccaccccactggggagagcactcctggagcaggaaatgagcatctctcatctccctgaattccacatccactggctgaatgatcagggaggcatagcagtgagagccataggtcggcagagggaactcaggccctcctttaggatggccatcacctcatctcaatccagccaaatcaaccatctagagcacacaggccgagagaaatgtaataaaatataacatgagacacgtatgaaatttaaactttccggtagccacactagaaaaaggtaaaaaaaaaaaaaccagtgacattaatttaaatttaattttagataatccaacagatctaaaatactatcatttccacatgtaaccagtattttcatgtgtttttttctgcagtaaatctttgaaatctggtgtgtgttttacactgacagcacactcgattcagatgctagattttccttgtagatatttggtcgttatttagatttcataaaatttacagtttaaaagattccaatatccgagttgctccaaacacacttagaagttgttttccaaataatggaatcaatgatcggcttttagatgtaaacttattaaaataaagtagcgtttctcagttaagtcacattccaagcgctcaagatccatgccctgcgcagacccggacgacgaacccgactttcagagactgagggttctgcctagagagctcccacagaaatcagcccgagaagaaagccttgtgggtgaagccagggagggagacaggagggcaggaggaaaatcaagcctaaatgagcacatcgtggacgccgctcttcctctccccacatctcctcgcctcgccgcagtgggcccggctgtgccccaggtccccgcggtcgggagtgaatggcgctcgggtggcaggcacgtgggcacctggtgaactgcaggaccctggcaccgccaccccctcgcccctacacacacaggagtgcccctcccgttgtcacgtggccttcctgctgggtatctggagcagttgcagcctcgcttccggaaggaaacggggcctctggggcacagggaccacctgccagtgcgttccagccgggctgccatccacactggagaccgccccgcacgtggtcctcgggctcggattcagctgtcgcaggatgtgaggggaaaggtatgtggcccgacaatgccaccgagggtgtccccgggctccaccccgtgcctcttcattatagaatgactgggcagagataagggccagattactttgctgtattgaataattcaccataaaaatgattgcaaccagg

SEQ ID NO: 653 - DNA, 5069 bp, Homo sapiens
tggtcatcgcacggcggcagctcctcacctggatttagaagagctggcgtccccgcccgcccaagcctttaaactctcgtctgccagaacccgccaactctccagggtacaaagtacagcagggacgcgggtggagcccttccaagcggcgcagccttatctttcccgagtgaacacctaggtggattcccaacaccgcgcctggcacgtttctggagggagtctcaagctcctccagagctcccagctgcgcgtcctcgtttctgcagtcgatattcctgtgggagacacggggggctctgagcgctacgagctttattaagagatttgcgaatggttcactcaggtccctgaacactcccaatagcctaagctgcctgctgtgttatagcgcagaagcccctaacgcacggtggttgtcctttcttctcataacgctcgcagcttagggccagtttccgcgattctaagagtaattgcgtgggcacctgtgctggggccaggcgcaaagaagggagttggtctgcgcgaagatcgtcaacctgctaacagaccgcacatgcactttgcaccgaccatctacgtctcagtctggaggttgcgcactttgggtaaggagggcccggaacttccctggcgggtctgagctgcaaggcaagcgagggtgggaagagggaatttagggttctggactgcgggacgggagagaagctggggtctccagagaaaagggcagcaatggagggaaactgagatgaactccagacatccatgttcatggatccgtttgagtctttgctttgggtaggagaggagtggaatgagacagaatctatacctttggttcccacccgccctccagtaaggccgaggaactctcttggttcctctgagagcaagaggcagatggtgctgcgagggaaccccggaaggagccactaaagttgagcagagtgcaggactgggaaggaaaaaaatggggggcgggggggacaagccacctatgtgctctcctccctttctccaccccacccccttttttcgtagctgctgacgcgctggtggtgcctattaatcatttaccagtccagagccgcgccagttaatggctgtgccgtgcggtgctcccacatcctggcctctcctctccacggtcgcctgtgcccgggcaccccggagctgcaaactgcagagcccaggcaaccgctgggctgtgcgccccgccggcgccggtaggagccgcgctccccgcagcggttgcgctctacccggaggcgctgggcggctgtgggctgcaggcaagcggtcgggtggggagggagggcgcaggcggcgggtgcgcgaggagaaagccccagccctggcagccccactggcccccctcagctgggatgttccccaatggcaccgcctcctctccttcctcctctcctagccccagcccgggcagctgcggcgaaggcggcggcagcaggggccccggggccggcgctgcggacggcatggaggagccagggcgaaatgcgtcccagaacgggaccttgagcgagggccagggcagcgccatcctgatctctttcatctactccgtggtgtgcctggtggggctgtgtgggaactctatggtcatctacgtgatcctgcgctatgccaagatgaagacggccaccaacatctacatcctaaatctggccattgctgatgagctgctcatgctcagcgtgcccttcctagtcacctccacgttgttgcgccactggcccttcggtgcgctgctctgccgcctcgtgctcagcgtggacgcggtcaacatgttcaccagcatctactgtctgactgtgctcagcgtggaccgctacgtggccgtggtgcatcccatcaaggcggcccgctaccgccggcccaccgtggccaaggtagtaaacctgggcgtgtgggtgctatcgctgctcgtcatcctgcccatcgtggtcttctctcgcaccgcggccaacagcgacggcacggtggcttgcaacatgctcatgccagagcccgctcaacgctggctggtgggcttcgtgttgtacacatttctcatgggcttcctgctgcccgtgggggctatctgcctgtgctacgtgctcatcattgctaagatgcgcatggtggccctcaaggccggctggcagcagcgcaagcgctcggagcgcaagatcaccttaatggtgatgatggtggtgatggtgtttgtcatctgctggatgcctttctacgtggtgcagctggtcaacgtgtttgctgagcaggacgacgccacggtgagtcagctgtcggtcatcctcggctatgccaacagctgcgccaaccccatcctctatggctttctctcagacaacttcaagcgctctttccaacgcatcctatgcctcagctggatggacaacgccgcggaggagccggttgactattacgccaccgcgctcaagagccgtgcctacagtgtggaagacttccaacctgagaacctggagtccggcggcgtcttccgtaatggcacctgcacgtcccggatcacgacgctctgagcccgggccacgcaggggctctgagcccgggccacgcaggggccctgagccaaaagagggggagaatgagaagggaaggccgggtgcgaaagggacggtatccagggcgccagggtgctgtcgggataacgtggggctaggacactgacagcctttgatggaggaacccaagaaaggcgcgcgacaatggtagaagtgagagctttgcttataaactgggaaggctttcaggctacctttttctgggtctcccactttctgttccttcctccactgcgcttactcctctgaccctccttctattttccctaccctgcaacttctatcctttcttccgcaccgtcccgccagtgcagatcacgaactcattaacaactcattctgatcctcagcccctccagtcgttatttctgtttgtttaagctgagccacggataccgccacgggtttccctcggcgttagtccctagccgcgcggggccgctgtccaggttctgtctggtgcccctactggagtcccgggaatgaccgctctccctttgcgcagccctaccttaaggaaagttggacttgagaaagatctaagcagctggtcttttctcctactcttgggtgaaggtgcatctttccctgccctcccctgtccccctctcgccgcccgcccgccaccaccactctcactccacccagagtagagccaggtgcttagtaaaataggtcccgcgcttcgaactccaggctttctggagttcccacccaagccctcctttggagcaaagaaggagctgagaacaagccgaatgaggagtttttataagattgcggggtcggagtgtgggcgcgtaataggaatcaccctcctactgcgcgttttcaaagaccaagcgctgggcgctcccgggccgcgcgtctgcgttaggcagggcagggtagtgcagggcacaccttccccggggttcggggttcggggttcggttgcagggctgcagcccgccttggctttctccctcacccaagtttccggaggagccgacctaaaagtaacaatagataaggtttcctgctccagtgtatctcaaaagaccgggcgccaggggcgggggacctagggcgacgtcttcagagtccgccagtgttggcggtgtcgccgcaacctgcaggctcccgagtggggcctgcctggtctctagagggttgctgcctttcaagcggtgcctaagaagttattttcttgtttaacatatatatttattaatttatttgtcgtgttggaaaatgtgtctctgctttccttttctctgcttgcctagccccaggtcttttctttgggaccctgggggcgggcatggaagtggaagtaggggcaagctcttgccccactccctggccatctcaacgcctctcctcaatgctgggccctcttatctcatcctttcctctagcttttctatttttgattgtgttgagtgaagtttggagatttttcatacttttcttactatagtctcttgtttgtcttattaggataatacataaatgataatgtgggttatcctcctctccatgcacagtggaaagtcctgaactcctggctttccaggagacatatataggggaacatcaccctatatataatttgagtgtatatatatttatatatatgatgtggacatatgtatacttatcttgctccattgtcatgagtccatgagtctaagtatagccactgatggtgacaggtgtgagtctggctggaacactttcagtttcaggagtgcaagcagcactcaaacctggagctgaggaatctaattcagacagagactttaatcactgctgaagatgcccctgctccctctgggttccagcagaggtgattcttacatatgatccagttaacatcatcactttttttgaggacattgaaagtgaaataatttgtgtctgtgtttaatattaccaactacattggaagcctgagcagggcgaggaccaataattttaattatttatatttcctgtattgctttagtatgctggcttgtacatagtaggcactaaatacatgtttgttggttgattgtttaagccagagtgtattacaacaatctggagatactaaatctggggttctcaggttcactcattgacatgatatacaatggttaaaatcactattgaaaaatacgttttgtgtatatttgcttcaacaactttgtgctttcctgaaagcagtaaccaagagttaagatatccctaatgttttgcttaaactaatgaacaaatatgctttgggtcataaatcagaaagtttagatctgtcccttaataaaaatatatattactactcctttggaaaatagatttttaatggttaagaactgtgaaatttacaaatcaaaatcttaatcattatccttctaagaggatacaaatttagtgctcttaacttgttaccattgtaatattaactaaataaacagatgtattatgctgttgcaa

SEQ ID NO: 654 - DNA, 50268 bp, Homo sapiens
gaattacaaaggaggccgtctgcctcctttgtcctggatttgggagttgagcaccttcgtcgccattggctttcctcccccagctccagcctctctcatcttgggaatctgcgtcagaagtcactcgcagtcccgtcagcccaggtagccctgccgagactgcggaggaagggaggccgcggtgggaggccaggcccatccggcgccatttccatcgggagcgcgcccggcaaacccgatcctccctccacccaactgcccggcctttccctgctcgcttcactacccaccctcatcccttccagggagctttgaccaccccctcccctggccttctagatcagttttcggaagctggggaacaaaaaagtaaaaagagcggggaagggcgggaagccgaggtggccgcgccactgtacccaaaatggcggaggccaagccagcagggaaaggggaaaatgctggatgtcccctacttcgggcctcggcgtcgtccactgaattccacctgagcaagtcctcccatcggcaagccgccctccctgaagtgggagatggtcggggaggcgcagccccgccgcttccaagcggcggcctccgagcggcgaccaccccactaccccccaacccagcccctcccggcctttcgtccttctcccgactccgctctcgaaaccaccagcccaacctacccccttttacttcagataccctgtcaggcgatagttacgccgactctggtgctcgcggggtccagttcaaagaagggagaagtcgtttgcctcgtgtagcgctcgccacaacggttctcccaaccgtctccagcggtgacaaccgcttagggagctgcgcagcacagctactggcttggggggatgggagggaacgagcaagaagtggggggcggagcgagaactgcgaaggcggccggccccactctcgcgagacgggaaagtcggtttcgcatggcgctggcggcacgcagcgcgcctgcgcggtggtgggttgcgcagctgttgggggcgaggtagaccgagcagaggctgttccagttaaagagctgcagcgcgcaccgtttttcttgcttacgttagaaccatccagttttcagagcgtaccattctgccgcctcggggcgatggcaatggcagttctgccagtgtgtagaaggaaccgtgccgtagcgctctggagaagttctccggtgatctgcccccaccgtgaacaaattctgtgagggccccgccctggctaggcatcgacggcgcggaaagggccccacgtggttcgaccggcaaacgcggggcggattttctggtccaccatgtttgcattgtgcggtgaaaaataggagtgtttctgggccgcgaagatgaaagcgtccactggggccgatttcggctctcgggctgggtgtccgcctccttcccctggcccagagttgctggccgcccgccagcgcgcttcgtcccaatgtgccgcgcgggatccgggtttcttgggtgtattcatgtccaccacgttaccgttctctctgcaaatccttcctctttttctcctctggccttcgcgttttcatctctcccgccgtcagtgcctcggagactgattagcctgtggaggccgacgttgggttttttttatagttttgcgttgttgaaaattgcgcttccaagtgacacctaataaataagtacattttggttttgctgtcatgtcaccaaggttcctaatgacacattatggctttttttttaagttccaaaaaaggctggccgcggtggcttacgcctttgagaggccgagggggaggatcgcttgagcgtaagagttggagaccagcctgggcaacatagtgaggtgctgtctctacaaaaaatacaaagattagctgggcgtgatggcagcgcacgggagtagatgggactcccgagtagtcccagctacacaggaggctgggcaaaaggatggcttgtgccctggaagttgaggctgcagtgagccgtgattgcgccagtgcactccagtctgggagaccgagggagactcttgtctcaaacacaaagaaaaaccccgaatttctgcgcagagggttaaggggaagcctggtaaagagatcagtgcaagttcatcctggctaacacggtgaaaccctgtctctactaaaaatacacacacacacacacacacacacacacacacacacacacacacacacgccgggcgtggtggcgggcccctgtagtctcagctactcaggaggctgaggcaggagaatggcgtggacccgggaggcagagcttgcattgagcccagatcgcgccaccgcactccagcctgggcgacagagcgagactccgtcccacctccctttcccccccaaaaaaatcagtgcaagttcaagtacaaaggtaggaacatacgtggggtgtcaggaagatggggtaatgttagaaatgtggatgaagctagattgtagacaatcttcaatgtccggccaaaagactttcaactttgtggtacagacattgggaagcctgttgggggtagggtgagaggtgttagcaacgtaggaggatgtataattttttctcccatgagatctgcagtgtgtaggatggagacaggtaagtttccattaccttcatttaatggaaacttcatttcaaagctttaattcatcctcaaacctgcttaagacgagtgtggggcagtaagaattccctaagtcatgatgctcacatacccccaatggcccactccctaaaaatactcagtggaaggaagaaaggacagtgttatcatcattaaaagagatggaaaaccaaacaaggatgctgtagtaacaatggctcatatttatttttcagggttgtaaagagcaaatggagtacagtgtgtagcataagctacacactgtactcttacaaccctgaaaaataagtatcttcattttacagatgaagtgcctaagtcctagagaagtgaaaatagttgcccaaggtcacacagttgagtggtagagctagaattggagcccatagggttttacccaagggccagggtcttaaaacactatgaaccttcgtgaggttacaaataacttatctataacttaaggaaacagacatcatttttggaaaattgaggttatgttgcctaattaacactggagttaccatttcaggagacctgtggttactagcttattggctggagactttttgaacaggcctgaaactttatagtcccattatcactgacactgtgagtcccaagacactgtgagtcccaacccctctccctccttttaaaaaaaaaattgctgtattaataagactctaagctcccacaattctgatggagttcttcccttggtcctcctgggttcaagttacatggctacttctatcctttcagtctttcaaccgatttggcagatggaattctgtaatctccttcactccttgcttgaattcaaacaatttgttttactgcctaattgaatttggcattccttccgcatattttgtgtggttatgggccacaatcttaaaatcattctaatgacatgactgacttttcactaccaaactgctgcttgcttgcttgcttgcttgccataatttctttgggtcaggcactctgccagtgtgcatactcaggaaggacttgaaattggtttacacattccttttgcctttttattattacagtaggaagttttgagttaaaaaatacactatataggctgggtatggtggctcacgcctgtaatcccagcgttttgggaggccgaggcaggtggatcacgtgaggtcaggagtttgagaccaacctggccaacatagggaaactctgtctctgctaaaactataaaaattagctgggcgtggtggcacatgcctgtaatctcagtcacttgggaggctgaggcacaagaattgcttgaacctggtggggcagaggttgcagtgagccgagatcgtgccactgcactccagcctgggtgacagaacgagactccgtctcaaaacaaacaaacaaacaaacaaaaccgctacatagtcataaatgtacattttatttggcttcctattttactacctttcttaaaaaaaaaaaaagtcttgtcaacgattctcatttgcaagttgaatcctgtaaataaggcttggtgagactggctcaccactgctccagtgatccctacagaattgtttccagacctatctgtgtggaattgtttccatagagatggttaaaaccaaggactgccagctgcttttgggacttttttttctctttgtcttccttttcatcattccagtgctttcctattagcatagagatcagagggaccctggagaggatcttgttagagaccataatgagagaaaagatgaaaaaggagaaggaaatagaagtacccatgtgacccagaggaaaacaagacaacaaacacgtgatcatgtattacaccatcaggatgaagaggagaggaaaattccgtgcagagcctgagagaaaaaaagaaattgaaagagattacactcttcggggggagggaaggcacattaacgaaaaattggttaagatatttgttcacatatccccagtggcattgtgaagtaccataaaaactggattatcataatcttttgcctatgtaaaaagcaaataatctaaaaaatgtaacaaaatccactaaatttcatctaattaaggtagttaatgccttttaaacactaaatttgtgtaagactgtgaaatgcttattctttggtttatatcctatgtatcttgtctttagaaagcactaatctcctttattatggttcaacattgtttctcaagacaagactgaattacacagtttatattcttgatacttttttgtttctctaagtcacctaagtgttctttgtgaatctggcaaccaaaaggcctgttcaatcttaataattatactaagtaaacaaatgaaaactcaaaaggaagaaagcacctaaacatattctttctctaatttttgaaaataattaaaataattgaacattctttttgttccagtgaattgctgtgaaggctagggaaagcagcttaaaaagatagctacttaaataatttaaatgaaattattgtactgcttttagtgtgtcataagcacattaataactttgaaaatacagcattgataatacagtaatagaccatttcccccaacgtgatttttttttttttttttttttttgaggtggagtcttgctttgtcgcccaggctggagtgcagtggcatgatctctgttccctgcaacctctggctcctgggttcaagcgattctcctgcctcagcctcctgagtgggattacaggcatgcatgaccacgcccagctaatttttgtatttttagtagagacggggtttcaccatgttgatcaggctggtcttgaactcctgacctcatgatccacctgcctcagccttccaaaatgctgggattacaggcgtgagccacagcgcccagccccacccagattttaagcttcttggtggtagataaaaatatagatctcattattcatatacctatgtttttaagtctgcaaaaaataacgatggtcacactgggggcagggacactttaagtcattcattttcactgcagtcttgcaaagttactgtttcatggaccaagaaatgaaaaagccagtagataaagtagtgtttcaaagtttaccaaaaaagtaaatggcaaaacttagacttgacttcataatcagggagtcccagttctgacaccagctaccagtgaattgattctgaaccagttaacttttctgaaccccagttttttttttattgttgttgttgttgttttgtagtggagtctcgctctgtcgccagactggagtgcagtggcgcgatctcagctcactgcaacccttgactccctggttcaagcaattctcttgcctcagcctcccgagtagctggaattacaggcatgtgccaccacacccagctaatttttgtgtttttggtagagatggggtttcaccatgttggccaggatggtctcaatctcctggtctcatgatccactggcctcggcctcccaaagtgctgagattacaggcgtgagccactgtgcatggccacctcagtttcttaatctctaaaatggtttgttaggttattatatagggggtggagattagtaattgaaataatgttaattctagttccatgctgttttatttatttgtgtttgtcctagcattgttaatgaatctggttcattcctgctaaactcatttaatagcagtgaatttaatagaatttttaaagtaagtacagtatcctaagagctacattgggagccaggacattattccagtgaaatctgtaactcatatgaactattctgtgggcagaataaataatatttccgatgtaatgtgctgctgattttccaatataggcagatgcagctgttattaataaatggaaattgatttgagagcattactgaattcctagtaggtcagtatatgtttccatccatccataaaaaatacaagtacagcttggcacagtggctcatgcctgtaatcccagcactctagtaggccgaagctggcggatcacttgagatcaggagttcaagatcagcctgggcaacatggtgagaccacgtctctactaaaaatacaaaaataattaaccgggcatgatactgcatgcctgtaatcccagctactcaggaggcggaggttgcaatgagccgaaattgcgccactgtgctccaacctcggcaacagagtaagactccatctcaaaaaacaaaaacaaaacaaaacagaaaaatcaagtacattctataatgttggatgagctaaaaaaaaaatgcacgtacataaagtgaacctgtccctgactttcaagagcatacagatacattccattacatagataaattacattaaactgtagcaagtgacaaaatagggtaagcacagagtgtttggggagcacagaatctggccattcacacagtctagggcttcagagaaagctttctgaaggagacaactcatgagttaagtgttggaggataagtaaaatttagtggggcaatgaaaaataggaaaagcatttacagttgaggacgcagtaagatccaaggcatggatgtacaaaataacggcagaagtggaaactctaagcaggtgaaacattgtaaaataaggaagtaggtaggaaccagatcttggagaagtttgtgtgctaccctatggagcttggcttttaagattgatgatcaatgtagtgctttttgggtttttttgtattgtttttgagatgcagtctcactgtgtttcccaggcttgagggcagtggcgtgatctcagctcattgcaatctttgcctcccaggttcaggtgattctcctgccttagcctcctgagtagctgggactacaggcatacaccaccacgcctggctaatttttgtatttttaggtagacacggggtttcaccatgttggccaggctggtctcaaactcctcacctcaagtgatccacctctcttggccacacaaagtgctgggattacaggcatgagccgccattcccggccaatgtagtgggtttttgttttgttttgttgttttccctgagacggagtcttgttttgtcacccagtctggagtgcagtggcacagtctcagctcactgcaacttccgcctcccgggttcaagcaattctcctgcctcagcctcccgagtcgctgggattacaggtgcctgccaccgcacctggctactttttgtattttcagtagaaacagggtttcaccatgttggccaggctggtcttgaactcctgacctcgtgatctgcctgtctcggcctcccaaagttctgggattacaggtgtgagcaactgcacctagcccagatgtagtgttttaattagatagttctgattaaagtgtggagagttggctgggcatgatggctcacgcctgtaatcccagcactttgggaggccaaggcatgtggatcatttgaggtcaggagttcaagaccagcctggccaacatggtgagaccctgtctgtactaaaaatacaaaaattagccgggcaatagtggcacatgcctgtaatctcagctacttgggaggctgaggcaggagaatcgtttgagcctgtgaggcagaggttgtggtgagctgagattgtgccactgcactccagtctgggcgagtgacaccctgtctctaaataaataaataaataaataaataaataaagtgtggagggtagatattgggagggtaagaagagagaagactaggagaaggaccagtagagatgatgaatacttaaactagagcaatggtattagggatagatacaggaggctctctttaagaaatatttggctgggcacagtggctcacacctgtaatctcagcactttgggaggccaaggtgggcagatcatgaggtcaagagatcgagaccatcctggccaacatggtgaaacctcatctctacaaaaaatacaaaaattagctgggcatggtggcgcgcacctgtagtcccagctacttgagaggctgaggcaggagaatcgcttgaacccaggaggcagaggttgcagtgagcccagatcgtgccactgcactccagcctggcaacagagcgaggcatggtggcgcacacctgtggtcccagctctatctcaaaaaaaaaaaagaaaattaggagctatttatcagcagggtttagtgcttgagtagaaaggctgtgcatgggtgagtgaaaagaagtcaaggatgaattatttttggcttagggttggatgctgagaattttaactgacataggaaatacaggaatatcgggtgtgttgattttgagatgccatgtactgtccgagtgaatgtgtctagtaggaaattaatctggataggaatgtagatttggcattcattgacatatattttgcttttatacttcaaaataagttttttgggatggcctcaggctaagtaaatttgctgtggaatctgttgtaaaaactagaatgagaatttattatttacagtgaagaatataactatcaaacaaatggaatgcaaattatcccagtgtttttgtgggggatacttctgaatattctacataaaaggaagtatactctattagttattattgctgtgtaacaaattgctccaaaacttaacagcttaaaacaacaaacttttattatttcataatttctgtggatcagaaatcttggggcagcttagctggatgcttctagcccaggatctctttttcttcttttttgagatggaatctcactctgtccctcaggctggagtgcagtggtgtgctcagctcactgcaacctctgcctcatgggttcaagctgttctccagcctcagcctcctgagtagctgggattacaggtatgctccacgaagcctggctaatttttgtatttttagtagagacgggttttcccaatgttggcccacctggtcttgaacccctgacttcatgtgatccacccactttggcctcccaaagtgctgggattacaggcgtgagccaccatgcccagcctagggtctcttataagggtataattaaaatgtcagctggagcttcagttatctcaagggtcaactagggtaggatctgcttaaaagctcactcccatggctattggcaggcctcagatcattaaaaaaaataaaattttagatttttgaatagttgtagatttatagaaaagttgcaaagatattacatagaattcctatatatggctcactcagtttcctctgttaacatcttatatttggctggcacagtggctcacacctgtaatcccagcactttgggaggccaaagaaggaggattgcttgagaccaggagtttgagaccagactgagcaacatagtgagatctcatttctgctaacaaattttttttttaagttagccagatgtggtggtgtgtgcctgtagtcccagttaatggagaggctcacttgagcctctcaaggttgcagtgagctatgattgtaccgctgcactccagcctggataacagagtgaggccctgtctcaaaaacaaaaaacaaaacaaaacaaatcttacattgatggtagcatccatgctacatttgtcacaagttatgaaattacattggtccattactttttttttttttttgagacagggtctcgctgtgtcacccaggctggagtgcagtggtacaatcatggcttattgcagcctcgatctcctaggctcaagcaatcctcctgccttagcctcccaactagctgggactacaggtgtgtgccaccatgcctgttttttttttttttaattttttgtcgagatgagatctctctatgttgcctagcctggtcttgaattcctgggctccagtgatccttctacctcggcctcccaaagtgctaggattacagttgtgagccaccgtgcctagctctggtccattactattaattaaactccaaattttatgtacggctcagtagttttcccctaatgtcctttttctgttccaggatcccatccaggataccacattacattagtcatcatgtctccttagcatctgctggtcaggtattttgtggaatatccttcaactgggtttttttctgatgtttttctcaggattagacaggggttatgggttcttgggaggaaaaccacagaggtaaagtgccatcctcttcacatggtaataacatgactctttaccttgatcacctggctgaggtagtgtttgctaggtttctccactgtaaagttactctttactgtctttccatgctctgttctttggaagcaagttactgagagcagcccatactcagggtcctggggaagttaagctccatctcctggaaaggagattaggtagttagctagataagctatttggaattctgtaaggaagtttgtctcttctcctccatttatttatgtagtcttttatttatgtaagtatgggttatggatattaattttatctttgggttataatccaataccgtgttgcttcttttgttactcaaattgttcttgcttcagccattgggagctcttccaggttgactcctgtattcctttttatttatttttttgagtactggtttactttgtagtactagaagagattccagcctcacctggtcttttccctgcacttatgctagaatcagtcatgtctccaggaagctccaggtctttttactactagagaatgttgtttaatttccacatttttttgaatttcccaaatttcctttcctatctgttatgtaatttcattctattgtggttgaaggacatgctttttattatttcagtcctttacatttattgagacttctttaatgggctaacaaatggcctactctggagaatgtttcatgtgctcttgaggagaatgtgttgtctgctgttgttgtggagtgttctgtaggcgtctgttgggtctagttggtttatagtgttactcaagtcttctgtttccttgatgatcttctgtctagctgtttcatccactgttgaaagtaggcattgaaatctccagctacagtcagttctccatacctgtaggtcctgtatctgtgaactcaatcaaccattgatcaaaaatattaaaagaagaaagaaagaaaataaaaagagaaaagaaaagaaaaaaaccctaaaaatattaaaaggggtcggggctaggggtggtggctcatgcctgtaatcccagcactttgggaggccgaggtgggtggatcacctgaggtcaggagttccagaccagtctggccaatgtggtgaaactccatctctgctaaaagtacaaaagttagctgggcgtggtggtgcgcacctgtagtcccagctacttgggaggctgaggcaggagaattgctcaaacatgggaggcagaggttgcttgtagtgagctgagatcgtgccattgcactccagcctgggcaacagagcgagactctgtctcaaaaaaaaaaaaaagggggttgagcacaatggctcatgcctataatcctagcagtttgggaggcctaggtgggcagattgcttgaggcccaggaggttcagaccagcctgggcaacatagtgaaaccccatctccattaaaaaaaaattaaaataaaaaaattaaaagaaagagagaaatacaacaataaaaattacaaataaaaaagcaatatattgttacaagttttgacatagcatttacatcatattaggtattataagagtctagagatgatttaagtatatgggaggatgtgcataggttatatgcaaatacacaccattttatataatggacttgagcatctttggattttgatatccacagggactcctggaaccagtgccttgtggataccaagggatcactgtattgttgttgaattgcctgtttctccttttaattctatcagtttttgcatcatgtattttggggctctgttgttaggtgtgtatatgtttataattgtcttatcttcctgatggattcttccatttattgttataaaatgtccttctttgtttctactaacaacttttgtcttaaagtcaattttgtctgatattagtatagctgctccagctctcttttggttacttttttcatggcatatcttttttccactcttttattttcacctatttgtgtctttgaatctaaagtttgtctcttaggcgggcgagtggctcacgcgtgtaatcccagcactttgggaggccgagacgggcagatcacctgaggtcggtagtttgagaccagcctgaccaacatggagaaacctcttctctactaaaaatacaaaattagccgggcgtgatggcacatgcctgtaatcccagctacttgagaggctgaggcaggagaatcgcttgaacctgggaggcggaggttgccgtgagccgagattgcaccattgcactccagcctgggcaacaagagcgaaactccatctcaaaaaaaaaataaataaataaaaataaataaataaataaaaaataaaaattaaaaagtttgtctcttatagaaagcatttagtcagttttttgttttgttttatctttttctttgtttttgagatggagtctttgtctgtcgccctggccggagtgcagtgttgtgatcccagctcactgcaacctccgcctcccaggttcaagtgattctcctgcctcagcctcctgagtagctgggcttactggcacacaccaccacacctggctaatttttgtatttttagtagatgccaccacacctggctaatttttgtatttttagtagagacggggtttcaccatgttggccaggctgatcttgaacttttggcctcaagcaatccacctgtcttggcctcccaaagtgctgggattacaggcctgagtcactatgcccagcaagttagattactttttgaagtccattctaccgatctttgccctttgtttggagagtttaagcacttaaatgtaattactgataaggtagagttcatgactgctattttgatatttgttttctacatgtctcatgtctttgttgttccttttactcctgcattactgccttcttttatggtaacttgatattttcatcctttttttttttcactctccatcagtggagtcccaactagatattttcttgtgttccattgctatttctccttctctctttctttctttttcctttctttctttctttctttctttctttctttctttctttctttctttctttctttctctctctttctttctttctttccttctctctccctctctctttctttctttctctctttctttcctaacttccttccttcttgcctgcctgcctttcttctttcctctttctttcttcttctttgagacaaagtctcactctgttgctgaggctggagtacagtggtgtgatcatacctcactgcagctgtgaacttctggactcaagctgttctcttgcctcatcctcccaaagtgctgggattatagacgtgagccactgcacccaactcacttcattttctatatattttgagtcattttctaatggttgcctggagaatcatacttaacatttaagtttataacaatctagtttagattaacagaaacttaattttaatagtataaaaaaactgcacttatatagctccattcccacctcacctgtttgtgactttcttgccattcaaatatatctttttacattttatgggcatcaatatagatttatgactattgctttatgcagttgtcttttttttttttttaaaagagacaggatctctgttaccaaggctacagtgcagtggcatgatcatatctcactgcagcctccaactcctgagctcaagggaacctccagcctcagcctttcatgccaccatccctggctttttttttttttttttttttttttaatagaggcagggtcttgctgtgttacccagactggttttgaactcctggcctcaagcagttctctcaccttcctcccaaagggctgggattatgggcactagccaccttgtctggtctactggtgctgtttatttatttatttatttagagacagagtctcacactgttgcccaggctggagtgcagtggcttgatctcggctcactgcaaactccgcctcccaggttctcaccattctcctggctcagcctcccaagtagctgggactacaagtgcctgccaccacgcctggctaattttttgtattttcagtagagacggggtttccctgtgttatccaggatggtctcgatctcctgacctcgtgatctgcccaccttggccacccaaagtgctgggattacaggcgtgagccaccgtgcccggccttactttatttttttattgtggtaaaaatcacataacattatatttaccctcttaaccattttgaagttaagctcaatagtaataagtatattcatatcattgtgcaacaaatctctacattttttttgtttgtttgttttttatgggacagtgtcttattctgtcactgcccaggctggagtgcagtggtgtgatctcggctcactgcaacccctgcctcctgggctcaaccgattctcgtgcctcaacctcttgagtagctgggattacaggcacatgaccatgcccacctaatttttgtaattttttttggtagagacagggtttcaccatgttgcccaggctcgtctcaaactcctgacctcaggggatgccctccttggcctcccaaagtgctgggatttcaggtgtgagccaccacacctggcattttctgttcttttgatagtggccatcctgaaaggtgtgagatgatgtctcattgtggtttggatttgcatttccctaatgattagtgattttgagtacccattcatgtgcttattggccatttgtatgtttgttgctctttgtttttttatgttgatttgagttactgtctagtgtcctttcatcttagcctgaaggactcccactaatacttcctccagaaaaggaatactagcaacaaattctagcaacaagtttttgtttatctggaagtatcttaattttacctttgctttgagtgatagttttgctagacatagaattcttggttgacagttgttcttttggtctatattcttgctttgagtatatcattttactgccttctggcatccatagtttctactgataaaccagctgttaatcttattgaaggtccattttacatgatgagttatgtctctcttgctggtttcaagattctgttgttttctcttttttttgagatggagtcttactctgtagctcaagctggagtgcagtggcatgatctcagctcactgcaacctccatctccgggtctcaagcgattcctgtgcctcagcctcccgagttgctgggactacattcgcacgccactatgcctggctaattttttgtattttagtagagacagggtttcactgtgttgcccagggtggtctcgaactcctgagctcaggcaatctgccctcctcagcctcccaaagtgctgggattacaggcatgagccactgtaccccaccaattcagtcattttctttctgcagttagattattgtgtgtctaggtgtttgtctctttgagttaattctataatacttggagtttgctgtgtttctttgctgcatagattaatgtttttcatcaaatatgataagtttttgaccatttatttcttcgagtaatttctctgccactttctcttttctgtttctgggactctcattatgcatatagtggtatacttgatgatgtcccagagatctctgaggctcttataatttttcttcattcctttttctgtttctcaaactgaataatctcaattaacctattttcaagttcactggccttttcttttgcttgcttaaacctgctgttggacctctctaattaatttttcatttccattgttatacttttcaatctctacaatttctacttggttctcttttaaaaaataatttctttattaatattctttatttgatgagacatgcttctcatactttgctttagttttttagacttggtttccttttgtttttggaacatatttaactacagctgatttaatgttcttgtctagtaagcccgacattgggactccctcagggacagtttttattaactactctttattctttgtatggtatactttcttgtttctatatacacctcttttttgttgttgaaatctggaaattttagataatatactgtggtacctctggaaatcagattctccccttcaccattgtttgttattgtgagttctttagttacttttctttactttctctcaagtctgtattctttgtggtgtgtggccattgaagacactggtatgttagcttagcatcagctaattattagacagagattttcttacgttcctggagtcaatatgtctctcagtctttgctgatggactcagttgtacatgctggggcacacccttgacactcagccagacaggtagtaactctgccttacctttcactttctgcttgcacaaaacccctaggtctcagtcagaggtgagagcttagggtttcttcaggttttctgcatgcacacagtcctaggatatatgcagagccctatgtatgtatattgccttctagattctcaagactatgtcagagctttttttttcttgtctttttttttttttggagacagactctcaccaggctggagggcagtggtgcgatcttggctcactgtaacctccacctcccaggttcaagcgattctcctgcctcagcctcctgagtagctgggataacaggcacacaccaccatgctcagctgatttttgtatttttagtagagacagggtttcaccatgttggccaggctggtcttgaactcctgacctcaagtcaaccacccttctaggcctcccagagtgctgggattacaggcacaagccaccatgcctggtcatcagagcttttcaaaaccctttctggacatctcattcccttgctattccttatcaacttttgattagcctatcatttgccttagctattatccactgactcagacagccatggtgctattaaacagttgctgtttgtttttgacaaacaacccttgaggaaaggctgtttgtgttgggtgagctttgactcaggtcaataaagacaagccacagccgggcacggtggctcacacctgtgatcccagcactttgggaggccgaggtgggcagatcacctgaggtcaggagttcgagaccagcctgaccaacatggcgaaaccccgtctcaactaaaaatacaaaacctagctgggcatggtggtgggtgcctgtaatcccaactacttgggaggctgaggcagaaaaatcgcttgaacccaggaggtagaggttgcagtgagccaagattgtaccattgcactccatcctgggcaacagagtgagactctgtctcaaataaataaataaataaaattaaattaaaaataatacaaaaatcagcctggtgtggtgttgtgctcctgtaatcccagctacttaggagtctgaggaaggagaatcgcttgaacctgggaggcggaagttgcagtgagccaagattgcgccactgcactccagcctgggtgacagagtgagattctgtctcaaaaagaaaaaaaaaaagacaaaccttgttagtgggggtcttccagggaattaccagacaagtcaaatgacaattctctatgaatgcagctttgaagagacttcaaccacatcctgtcccttctagtagctatcaggtgattgcaggatggtggttctcaaagctatcatgtagctggggagagagtatcaactagggcaagagtgataggtaatatcttttcgtaaagaatatgtggaccaagttttccccattaatttcaagatagagcaaaactccaccagtgcttataaacagattcttaagtctttaactgtgaaactgaaaattctaaatttaggctaggtgtggtggttcatgcctgtaatcccagcactttgggaggctgaggtgggcggatcacctgaggtaaggactttgagaccagcttggccaacatagtgaaaccccatctctactaaaaatacaaaaattagctgggcacagtggtgcacgcctgtagtcccagctactcgggaggctgaggcaggagaatcacttgaacctgggaggcagaggttgcagtgagccaagattgtgccactgcattccagcctgggtgagagggtgagactttgtctccataaataaataaataaataagtaaaaataaaaataaaaattagaagtttaaaatataaacctccagttcaattggattgtcaagtacagcttccttaacagagcagcagaaagaacctaaacaatttttggcatatggaaaagggtttttttgttgttgttgttgtctttttctggcatatggtaaaggttttaccactgcaaagtactgaactatgttttcttatttagaaagcatcttaatatcaatttataatctattttctgaagtcccttccaggcccttgagcttttgaggagcaagaatgtggatcttaacaccaaagtgttttcataaaatttgtttggtaaatggtaaatcatgatgataatatgagaatcctaaattttagcagaaaagtgaaaaaattcccaaacatcaggtgtttgaacataaatctggttgaggaattcagaactagcctatgaacattttaacaaaggcggtgtttggagcttctgtgacatccgggaagtatgcataaaagtaaacacaaagtagttgaacactacatatgtcgtatttgaatagatctatattagtagctagatgaaactaatttagaggttagttttcttcaggcaacaaaacaaaaaatagacaaatgggattacataactaaaaagcttctgtacagcaaaggaaacaacagaatgaagagacaaagtatggaatgggagaaaatatttgcaaattatacatctgataagggattaatattcaaaaaatataagaaactcggcccggcacgttggctcaagcctgtaatcctagcactttggcaggccaaagcaggcagattgcttgagcccaggagtttgagaccagcttgggcaacatggcgagaacccctctctacaataaatacaaaagtcagtcaggcgtggtggtgcatgcttgtagtccagctactcaggaggctgaggtgggagaatcacctgagcctggggaggtcgaggctgcagtgaactgtgattgatcgcaccaccaccactgcactccagcctgggtgacagagtgagaccttgcctaaaaaagaaaaaaggctgggcccggtggctcacgcctgtaatctcaacactttgggagtccgaggtgggcggatctcaaggtcaggagatcgagaccatcctggctaacatggtgaaaccccgtctctactaaaaatacaaaaaaattagccaggccatggtggcgggcgcctgtagtaccagctactccggaggctgaggcaggagaatggcgtgaacccgggaggcggagcttgcagtgagctgaaatcgcaccactgcactccagtctgggagacagagcaagactctgtctcaaaaaaaaaaaaaaaaaaaaaaggaaagaaactcaataacaaaaagaaagaaaatcaataacaaaaagcccccaaataacccagtaaccctattctattaaaaaatggacaaaaggcaaagtatccaaatagacatttctctaaagaagatatacaaatggtcaatagctatattataaaatgctcagtatcactaatcatcaaggaaatgcaaatcaaaccacaatgagatatcacttaactcctgttgaatgactattataaaaaaaaacacaagataacaagtgttggtgaggacgtggagaagagggaacccttacacactgttggctggaatgtaaattagtatagccattacagaaaacagaatggagatgcctcaaaaaattgaaaatagaactaaccatgtaattcagcaattccactactgggtgtaaaacacagtacgttgaagaaatatctgcgttcttgtgtttattgcagcaatattcacaatagccaagatgtggaatcaacctaactgttcctcaatgaatggataaagaaaatgtggtatacagatggcccctgacttatgatactttgacttacaattttttgactttatggtggtgggaaaacaatatgcattcagcagaaacagtactttgaattttgaattttgatctgttcccaggctactgatgtgtggtacaatactttcccacaatgctggacagtggcagccagctgcactcccagccagccacacgattatgggggtaaacagccagtatttgccatcttcctaaaaaacactatgcctgctaaaccatcaacaaatgttggcaccctagtgctttctatcagttattctttttttttttttttttttttgaggcagggtctcgctctgccacccaggtgggagtgcagtggcatgatctcggctcactgctatctccgcttcccgggttcaagcgctcctcctgcctcagcttcccgagtagctgggactacaggcatgcgccaccatgcccagctaattttttcttttttttttgacacagtgtctcactctgtcacccaggctggagtgcagtggcgcgatctccgctcactgcaagccccgcctcccaggttcatgccattctcctgcctcagcctcccaagtagctgggactacaggcgcccgccaccacacctggctacttttttgtatttttagtagagatggggtttcactgtgttagtcaggatggtctcaatcttctgaccttgtgatccacctgcctcagcctcccaaagtgctgggattacaggtatgagccaccatgcctggccgcccagctaatttttgtatttttagtagagatggggtttcaccatgttggccaggctggtctggaactcctgacttgatccacctgcctcggtttcccaaagtgctgatattataggtgtgtgccactgtgcctggccaattttagtttaatgcttcaaactgaaaacacactgaaagcccagtgtgctttcagcggtgtacgttaatggtgtgtacccatacaaccattttgctttttactttcagtagggtatttaataaattacatgagatattcagcactttattataaaataggctttgtgttagatgattgcccacctgaaagctaatgtaagtgttctgagcatgtgtaaggtaggctaggctaagctatattgtttggtaggttgggtgtgttaaatgcattttcagcttatgatatttttaacttatgatgggtttattgagatgtaaccccatcaaaagtagaggagtgtctatatttatgcaatagaatattattcagccataaagaagaaagaattcccatcatttgcatcaacatgggtgaacctggaaggcattatgctaagtgaaataagccaaacacagaaagacaaatactgcataatctcactcagtgaggaatctaagaaagttgacactgtagaagtagagagtagaatggtggttgtcagaggtgggggtggctggggaggggagtggttggggagatctggccaaagggtacataattacagtagataggaggaataagttcaagagatctattgtatagcatcatgactatagttaatatactgtattcttgaaaaatgcaaagagagtggatgttaagtgttctaatcataaaaataatgattatgtgaggtgatgcatttgttaattagctagatttaaccatttcacaatgtgtatatatatatatatatatacttcaaaacattatattgtacatgataaatataattttatctgtcaattaaaagaaacataaacaaagtaaaaagaaaaattttctttcaaattttgatttaaaacttattttatttacactttataattctttttgatacttattttcttttcaccaactgaaaaaaaagtagatggtgttcggatacactttgaatgcccgtactctattattttcttttttctttttgagacagagtctctctcggtcacccaggctggagtgcagtggtacaatctcagctcactgcaacctcagcctcccaggttcaagcaattctcctgcctcagcctcccaagtaggtgggattacaggtgcctgctatcatgcctggctaatttttgtatttttaatagagacggggtttcactgtgttggccaggctggtctcgaactcctgacatcaagtgatccacccacctcagtctcccaaaatgttgggatgacaggtgtgagccgccgtgcctggcctacatatttatattttctttttctttctttctttttttttttttttttgagacggagtctctctctgtcaccaggctggagagcagtggcgtgatctcggctcaccacaacctctgactctgtgttcaagcgattctcctgcctcagcctccctagtagctgggattacaggcatgtgccaccatgcccagctgatttctgtatttttagtacaggcagggtttcaccatgttggccaggatggtctcgatctcctgacctcgtgatctgcctgcctcggcctcccaaagtgctaggattacagacgtgagccaccacacctggccaatatttatttttttcaaagaactaaactgatatttattaatgagtagcctcgttttgaggcggaagttataaaagttataagcaagagtgaagtgggttcttttttttttttttttttttgaaacataatctcactctgttgtctaggctggagtgtagtggcacaatctcggctcactgcaacttccgcctcacaggttcaagcgattctcctgcctcggcctcccaagtagctgggattataggcacgagccagcacacctggctaattttttcatatttttggtagagatgggtttcaccacgttggccagggtggtctcaaactcctgacctcaagtgatctgcctgccttggcctcccaaagtgctgaattacaggcgtgagccactgcaccaggccatgaagtgggttcttttgtgctaacagctacagaataacaggaatctgcagtgacaggaaaactgtaaacaaactaagactattgcagagggacaaatatacatcactctccccaggcacatccatgggcaggtttaatgactaagctatttggacaaggaagctttctgattttcctacatttacgtggtaaatggaaccaagattaaaattcaagagaatggtctcaacacacacacacaaacacacacacacacacacacacacacacacacacaccatgcaggtcaggtgcagtggggcacgcctgcaatcccagctctttgggaggcctaggtgggaggatcacttaagtgaggagttccagaccagcctggccaacatggcgaaaccctgtctctacaaaaaataagccaggtgtggtggcacgtgcctgtaatcccagctacttgggaggctgaggcatgagaatcgcttgaacccaggaggcagaggttgcagtgagtggagattgtgccattgcaatccagcctgggtgacagagtaagactctgtctccaaaaagaaagaaagaaagaataatctaagaaatgcaaatgaaaacaagatattttaaaatctatcagattagcaatgatcagacactctcatatactgtctaaattggtatactttttctgcagataaatttaactgtttaagttaaaacatctgtactctttgacccagggatttcacttttaggaatatatataaaagaatcaggaacacagaagaaaatttacatttaacaggtttgatcactgcattatctttacaagtgaaaaattagaaacaacttaaatattcacccaaagggatatggttaaacaacttatagcatatccataaacgtattgtaaatctattaaaagggtgtttttgaagcatttggtgtgtttagaaaatattcatgctatacagtgttttccaattgtattggaatgtcccttgaattacgctattttatataagggacttgagcatctgtgggagtatggtgtcctcagggggtcctgggatctatcctctgtgaatacagagggccaatttactgttaagagggtaaaattctgataaaagctgtacatccagaacattaataatgttattgctaatttgtgcacttatgggtctttattttccaagttttttataatgagcatattttttaattagaaaaaatgcgttcttttaaaaaatagtaataatattcattgggagactgtaagcaacatacatgcctcttgtatgtttcatgcatttcattaaaagcagagcttaagcggccgggtgcggtggctcatgcctgtaatcccagcactttgggaggccgaggcgggtggatcacaaggtcaggagatcgagaccatcctggctaacatggtgaaactccatctctactaaaaatacaaaaaattagccgggcgcagtggcgggcgcctgtagtcccacctactcgggaggctgaggcaggagaattgcgtgaacctgggagggggagcttgcagtgagccaagatcatgccactgcactccagcctggacgacagagcgatgctccgtctcaaaaaaacaaaacaaaacaaaacaaaaaacagatcctaagctagttctggctactctaagaaagactatgattatgctgctaagttctatgtataatatgaaaagtcaatacagaatatggaaaaaatcaatttagccagtattttaaaatgaatttcattttagaggttttaaaaagttaggggattggccaggcacagtggctcatgcctataatctcagcactttttgaggctgaggagggcagatcacctgaggtcaggagttcgagaccagcctggcctacaccgtgaaaacctgacgctactaaaaacacagaaattagccaggcgtggtggcaggtgcctgtaattccagctactcaagaggctgaggcaggaaaatcgcttgaaccggggaggcggaggttacagtgagccgagatcggtgccactgcactcccgcctgggcaacagagcaagactccatctcaaaaaatgaaaaaagaagttaggggattatatatctttaaatgtagtatctttgaataattgcttgactttgtatctgggaactgttctttgcgtctggacaccaagtaaaacattaactttttgatttccttttccaagaagaagacgtaaagcaggctaccagcaattttgagaacttgcaaaaacagcttgcaaggaaaatgaagcttcctattttcatagcagatgcattcacagcaagagcatttcgtgggaatcctgctgctgtttgcctcctagaaaatgtaagtgcttggttttgaattacagtacctgaaattctagattcctgtagaaacaattacttattttaaaagactagtttcacctgtttgtttacctctttggtttgtgttctttgccatcatatcagtaatgttcatgtatgcaagttgattttgaccaaagtatttgataaaaatgcctatgccttgggtacgtccaatgaaatgaagattcagataaagaggaactagagccaattttaaaaaagaagagctagagctcccttttagccatcaggttttcatttagttagcaccaagtgttgaggagaatgaaattagatgagttttgtgtgactagacatagccaatttcacattgagcataacagatcctaactgagtatctttaaccttatctatagctcaggcaattagaaattcttttcaggatcaagaaaatgagacattttgcaaggaattaagtagttaagtagagaggtagaaggaattaagctatagtatataaataacttactgaaagactcatttttaaaatggctttttgattaggatacatattaatggaatagttaaatattaatggaatagttaaatattaatagttaaatagataaatattaatagaatagttaaatatttaaatattgttaatagttaatatttaaatattgaccctcaaggtcaaggaatattgaccttgtgttggtccctaagtagtgagaaacaaggtaaggcgtttctgagtgctttcactcagagcagttagcacaagagtagattatctgaaaattacttcaagaagacagttagcaattgatgatcttaaataagtcatattaagttgggcaaagtgtgtgttggggccttcagggacagtgaatctcaacctggctatacatgaaaatcacccaaggaactttgaaaatgctgtcttctagagcaattacaacaggctctctgggagttggggggaagcagtgtttttttgttttgttttgtttttgagacggagttccgctcttgttgcccaggctggagtgcaatggcgtgatctgagcttactgcaacatccgcctcccgggttcaagtgattctcttgccttaatctcccaagtagctgagattacaggtgcccgccaccatgcacgactaattttttatatttttaatagagatggggtttcgttatgttggccaggctggtctcgaactcctgacctcaggtgatctacctgccttggcctctcaaaatgctgggattacaggcgtgagcaccgcgcccggccagcagtgttttttttaaagttccccaagtgattccagtgtgcaatcatgatggagaactgggctgggtgtggtggctcttgcctataatcctagtactttgggaggctgaggcaggaggattgcttggggccaggagccagagtccaacctggccaacacagcgagaccgtgtctctaagaaaaaagaaaaaaaaaaaaaaaggaggactgatgagcggaatgtcgttttttattgctgttgttgttgttttttattttttaaaactttatataaaatagagatgtggtctcgctaaattgagcaggctggtctcaaactcctggattcaagtgattctcctatcttggccttccaaagtgctgggattacaggcctgagccactgcacctggtggaatattattaattgagtccttttcacacttattttctcccttaagtggagcagtaaggtggccatcaagagtccttgtcttaccttaactctacattcattacgcagacttgagctggtattttctctccacaaaatgcagaaggtaataaactttgtccattattacaagagtttgggaagattagtatgaaaacaattaacaaccagattccaagtcatgacctttctttagaaacaatctggcagacacaacttcctgtcaaggaattgtggaattgactataactgcttgtcaaaagtcttaatacatttgccccatgtctgcatgtaatatccttgaagagttttgacagtagtttatattgaatagaatatattccatttttatcagataacaagaattggattattgtccaacttactccttttatttccagtaaattcagcaaacatcagacttatgggattgatatctctttctttctttctttcttttttctctctctttctacctatctctccgttaaaacatattttgtatgttaattatatatttggaaaaactaggaaataaaaatttaagcaaagaacttacagtttaaaacaacacgctttagtatgaatggaagaaggaaaaagaagataaggaagtccatgatttggggatgctctctaaagagttttccaattcacttcttttgaggcttgggcctgtgagaccaggaaaatttcacggcctgtcagagacacctgaatagatatctaaagattagtttgctacgcctctttgtcatgcttttctgctctttggatgtgagaatcttatcctcctagaggcgaagatagcacttttcctaattcgtaatcaataaaaattataatagacgtataaatggtggtgtctgcccttgggttcattgtcctgagatggtggagagaatacaggtggccacaggaaaatgtcagagacaaataaacgctaaatcttataatattggacacaattcagtaggaattcagccaggctctgggctaggagccagaggtacaaaggttaacaagttcacctgcccttgaagggctcagagtctagtgcagaaaatgggcatgtaaacccatcgttattcagtagtcactacagagactaaaagacctgaaggtaccaggcctcagagaatggaataatgttaggttttatgaggtaaaaatacctcagattttaagtgcagggcttcagatgatttttttttttgtagctttgttttaagttattcaaaatttgaccaggatgagagtaaccacaggaaaacctggtggatagactaaagactaggtcgtggtgctttgagctttttgaacacttgataaaagactactgaaagtaaagtaaaaacttctgagtaataaagttcaagagcttctataatattctaaaggattttttgttttcaagacaagtccatttttaaattttttaatttttatttttttgagacaagcaatcttcccacctcggcctcccaaagtgctgggattacaggtgtgagtcaccacgcccggctgacatttttaaatttttaaatttttcacatgacaacatataacactatacattaggtgaaaacaaaaacaaattaacggctacctggaaacatagaacaaatatttgaaaacaatgtaataaaaattgtctgggtgcggtggttcacacctgtaatcccagcactttgggaggccgaggcaggcagatcacctgaggtcaggagtttgagaccaccctggccaacatggtgaaaccccgtcaaattagccaaggttaaagaccagccaaaaattagccaggtgtggtgacgcatgcctgtaatcccagctactcggtaggctgaggcaggcgagttgcttgaacctgggaggcagaggttgtagtgagcccagagagcaccactgcactccagcctgggcgacagagtgaaactccttctcaaacataaataaataaataaataaataaataaataattgatggtgtcctcagatgcctgacaatccgtttgacaataaagaccttgtagaaacatggaaaatgtatagaagcaatgtaaaaagtaaaacagatacattatgatgatagctgggtaaaaaactagagggacccatgactagctactggttgtggtggtaacaaccagtggtgcttttttttttttaaattctaatttttttttttttttccagagacaggaccttgctttctcccctaggctggagtacagtggcatgattatagctcactgcagccttgaactcctgggctcaagctatccgcctgcctcaacctccagagtagctgagacaacaggtgtgcaccaccacgctcagctaatttttattttttgtagagacagggtcttgctatgttgcccaggctggtctctaacttctggcctcaggtgatcctctcacctcagcctcctaaagtgcttggacaagagccactgcacccagcctaatgttttgtcaattttagtttacaagtttgccacttccttgatggttttagaactttctccatccaggtgtgttgaatttactggaaccttatctacagcagagggacaaatgaacaataaggactgataagtcgggactgtcatattcaggttgccatatttcaaaactgccacaagatgggagtattttaaaactttactctgattttctgatcattaatctttgtgggtcataaggcgatggaacctcggtatgccaaagcagtacactggaattcagaaaggcaaacatcactctgtttttgctgttggaaatttgattcacatgagatggccaaagggaaatggatattaaagcaagggaattcatagctgttggtttgtaactgttttgtgcagcgtttgaaaagaagctcctagtgtaaaatggaaaaattgctgaaaagaaaagccagtattttgaacaaatgcatcctctctcttttgtttgtaaggctttcaaagttgaagtctttccatgattcaccattgtcttgacctttggttgcagtgtagaaattcagtgaaagtccagctgccagtggtacatgttgtgggctgctactgttaaactttccacgtgtctctggtccctcaggcaaatagcaggtgcattttttagtgtcctgaaatagaagttacagttatataaattcaaattgcaagaaatgcagtataccaaggtagagaggattaaagagctggtgggcagtggactttgcgtcctagctaatgtgtgaaagggcccatttgcaaagaaatctattaccaatagatggtgagcttggctacaatgtaggatgttttaatacttttaaagacttatcctaaaggtcacagggagctatagagaaagaaaggaaggacgaagataggaagtttcgccagatcatatagaggaaggactgacaggcactttaggtttctgcaagcaaggaggcaagtccaggaaggccagcaaaggcttttcttgatcacctttcgattaccactgagacttgtgattgcagactctgcactaaggggcttaaatacctcccagtttctatcaggtgttgtgtgcatgtgcatctggaccagtttccacagaaaacattcaacaggccatggagagtgcttgagttcaattgttaacattgttgtcttgttggctgggactttccagtggccccctctactcctcttcttaggtgggatttctcacttatccaggcccacaggtgcccacaggtgggacaggtactcatcccactgcattttcaccatcctacttctagaattctagagtgtccattatgttaaagtttaatctctgatttaacaagagaatgggcgggtgcggtggctcatgcctgtaatctcagcactttgggaggccgaggtgggtggatcacctgaggtcaggagtttgagaccagtctggccaacatggtgaaacctcatctctaataaaatacaaaaatcagccgggtatggtggcacacacttgtaatcccagctactcaggacgctgaggcaggagaatcacttgaacctgggaggcagaggttgcagtgagccagatcgcaccactgcactccagcctgggtgacagagcgagattccgtctcaaaaaaacagaacaaaacaaaaaaacagaagtgagatcaagcaacttgcctaagaagctgtcctaatacaaagctctttgcacacacttttctgtccaaatcaccgaaatctcccctcttttctaggttcaccacaagacctcatctttaaagttttagagtatttattgtcaaaatctatgtgtctcaatgacattttctctggtattgttcacagttgctgtctgtggctgtcttgactccccacctagatgctaagtcccttgaacacaaccatggcttatacacaagggtttctcaaactttaatgtgcacacgatcacctggggagcttgtgaaaatggagattctgattcagaatgtcggaggcccaagacagggggcctcggactctgcatttctaacaaatccccttagttgtgttgccgtgctcctggctcagcacagtactcattaatttatttattgctgttccgtcttagaaaccttgcaggggtccattttctctgctagacgtttgttttccctgtctgtagcatgttacagggttaataatcgtttgtctttgtgatgggcaggcagtgtagtgtggctagttaaagcatgactttgagccactcaaataaaaagctaacatgtatcaagtacctactacgtgttgggcactgggatgagttatctctttctctctctctttctgtttctttcagtctctctctgggtaagccggggcgtagaggatcatgcctgtagttctagcactttgggaggccaatatgggcgcattgcctgagctcaggagttccagaccagcctaggcaacatggtgaaactccatctctactaaaatacaaaaaattagctgggcatggtggtctgcacctgtagtcccaggtactcaggaggctgagatgagagaatcgcttgaacccaagaggcatagatcgcagtgagctgagacagtgccactgcactctagccagggtgacagagcgagactctgtctcaaaaaaaaaaaagcttattatgtttcctgccatgatttatttatttatttatttttgagatggagtcttgctctgtcacccaggctggagtgcaatggcatgatctcggctcactgcaacctctgcctcccgggttcaagtgactactgctcaacctcctgagtagctgggattacaggcgcgcaccaccactcctggctaatttttgtatttttagtagtgatggggttttgccatgttggccaggctggtctcgaactcctgacctcaggtgatctacccgcctcgccctcctaaagtgctgggattacaggcataagctgccacacctggcccctgctaagatttttatatcagccggtagttttaaaatcatgactgatttttcacaataatcacacttttatgccctatataattatatggaacatgtttcaaaagattttgaatcaaagacaagagtgtttaatttggataactcagagaagtgaattatgaatttattaatataaaattataattcttctgggtttcaggagatcaagagcaataaatttggccaaaacaaaaatgcatttgtcttgaaatttctttaaaattcaaaatctaactagtagatttccgttagaaagagtttcaggagatcaagagcaataaatttggccaaaataaaaatgtgttttcttgaaacttctttaaaattcaaaatctaactagtaagcattttattgattaaaaatggatttttcttctcaaaaggaaaacatacttcgggtccacttttttttttttttttttttttgagacggactctcactctgtcacccaggctggagtgcagtggcgcgatcttggctcactgccacctctgcctcccaggttcaagcaactcgcctgcctcagtttcccgagtagctgggattacaggcgcgtgccaccactctcggctaatttttttgtatttttagtagagatggagtttctccatattggctacgctggtctcaaactcctgacctcgtgatccacctgcctcagcctcctaaggtgctgggattacaggtgtgagccaccacgcccagctgggtccacttttttcttgagttaagaggaatgtgtgtgtgtgtgtgtgtgtgtgtgtgtgtgtgtgtattcgtatgcatgtatatatcttcacaataaaccttgacttaagtgctattattcccatcttaaaggtgtggaaactgaggccataagattaaatgacttgcccacttttacactgctgctaggagctcacacaggatagaaattcaattctgttttcaaacccacataatttttctaaatattttattttgaaaaattaaaaacctacagaaaagtttcaagaatggtatgatgaacatgcatattccctttctctagattcaccagttgttactgtgtaaaaaaaaatttttttagagtcaggttctcgctatgttgcacaggctggtctccaactccagggttcaagcgatccactctccttggcctcccaaagtgctggcattataggcatgagcctcccaaagtgctgggattataggcatgtgcctggccagttgttactattgtccacatttgcaaagccctcattctttttcttttttcttttcttttttgtttttgagacaggatcttgctctgtcgcccaggctggagtgcagtggcacaatcatggctcactgcagccttgacttctgggctcaagagatcctcctacctccgcctcccgtatagtctggaccataagcaagcaccaccatgcctggctaaattttttatttttattttttattgagactggggggtggtcttgaactcctggtctcaagcaatcttcctgccttggcctcccaaaatgctaggattacaggcataagccaccatgcccagctaaagcccttactctttttttttttatttaaatctttttttacagagacagagtcttactatgttacccaggctggtcttgaactcctggactcaagctgtcctcccgcctcagcctcccaaagtgctgggattacaggcgtgagccaccatgcctaactaagctctcattcttaatcactgtactgtttattaggtatattgtggtcttaggatattatatgatctctccgtttaatttcttcatttgtaagggtataaaaatatttacattgagggttttaaaaatgagattaagtgaaataatgtacttattttttcaacaaatgtttactgatctcctactgtgctgggatgaataccaggcattgttccaggtcccggcaaagcaagacagcacagtccataccccaacagaacttagaatcagaggtggcgaggccagacagtaaagggcacaccaggcaatttcaggacatctaagcactggagaggagacaacacctttagacacagtggtctgggaaggcttactggaggaggtgacccctggcctgaagcccttcccatgaaagagagtgaaccatgcaaagacaggggaggagtggtccagcctgcccagagtgagtgctgaacctcgctttcaccagcaaagcaaaggagattggggtacttccttgtgtggagattgtttttagaagacagcacactctgtcagctagactagatcttactgtgacaaaagacaggccaggccagccagtttttcacagtctattccagcttgcacatttataacccttcttcacagggcactgcaagcatgggtttctgagaaccaatctttataaaagtgccttgaattccttggtaattatttccttttaagcgtgtaactcttattattgctaaactgctttttaagttaatggtagttgttgtccaaaggaagtctgatctgtgtttttgaaacctcaatgatcgtctgtttctaattaaggaattggatgaagacatgcatcagaaaattgcaagggagatgaacctctctgaaactgcttttatccgaaaactgcacccgacagacaactttgcacaaagtaaatatgcattttttttttttaagaactgttctgtcgcacgggctggagtgcagtggcatgatcttgactcactgcaacctccgcctcctgcgttcaagcaattattgtgcctcagcctcccgaagtgctggcattataggtgtgagccaccacacctggcctaaatatgcactttaaaataattcttgaatgacatcagaaattattttttaggtgggggaatgatctttaaggaaaatgcccccttattatttgcatgcagatagtagatagagcgggagattctgatttggtttcggttcatttggggaagggggttttggtgaatctgaatgtttccattccagatctagcactggggagccctaggatgcttgcctagccatcattcctccttttacaacatgttttggctactcatcatgctagagaactatataggaaagaagaaaatgagaaatctgtgacctgcttgcatgggaatgatctcatctctctttggcttttcctatcctcaggttcctgctttggactgagatggtttacaccagcgagtgaggtcccactctgtggccatgccaccctggcttctgcagctgtgctgtttcacaaaataagtaatgtgattttctttaatgaatctaacacttagcaaatggcttttttttttttaagttctcacacacactttttctgatggtccaaagtgactggtataaagactctgcagagtttacttcatgctattcataatgcagaaacaaaaccagcgaccttcaatagcactttggcctttctgagtatgtgcccagcatcattggaaagctgcgatcagaatgctattttattttatttttattttattttactttctggtctacaaagaatttgacaaccattttattttattttattattttttgagacagagtctcactgtgttgcccaggctggagagcaatggcacgatcttgactcactgcaacctccgcctctctccacctcctgggttcaagcgattctcctgccttagcctcctgagtagcaggattacaggcgcccaccaccacacccagctaatttttgtatttttagtagagatggggttttaccatgttggccaggctggtgtcaaactcctggcctccagtgatccatctgcatcggcctcccaaagtgctgggattataggcgtgaggcaccatgcttggcctcattttaaactggagatctctggtctttgtgaagcttgcatgggcagaattgtcatctcatacgatatgagattggagatcaacaggaacatttcactccaattatttccgctcccacattgaaattcatttcacaataagagattcttcaataaacattttttttttttttttctgagatggggcctggctcggttgaccagactggagtgcagaggcaggatatcagttcactgcaacctctgactcctgggctcaagccatcctcccacttcaacctccaaagtagctgagaccccaggtgcacaccaccacacctggctaatttttgtatttttgttagagacagggttttgctatgttgcccaggctggtctcaaattcctgagctcaagtggtctgcccaccttggcctcccaaagtgctgggattacaggcatgagccaccacgcccggccaataagagcttctttgctctaaatttgaagattcctgggcccccactgtatacattcaccttaaaaggagttgcagcaccttaattctgccagtttctatcttagctgcatttagtttaatggacaaagatcagggccttgtggggatgggacagagaagagattcctgggaaatgccctaaaacaggagatggaagcagccacaaacaagcatagacagcaaacggaaatggaaacaaggaaagaaacaggatgataggacagaatgtcactgtgggggatgggcaaaaccccgtctctactaaaaatacaaaaattagctgagcatggtggcgggcgccggtagtcccagctactcaggaggctaaggcaggagaatcgcttgaacctgggaggccgtggttgcagtgagccgagattgtgccattgcactccagcctgggcgacagagcgagactccacctcgaggaaaagaagaaaaagaaagtaggattgaatagagggagaaattgaactgcagagtagtagcaacaaggaaaggcctaggccaaatccgtggggagctctaaagctggacattttttcaagtagtatagttccaagtagaggcaaagattcaggcctttttaccctccatggaccagttcccaaagcctggaaaagatgtatgactttgggcaaggtagctctactcagccaaaggtaactccaagagagtgactcagttgagagctgttggccactagcactctgggcaagcagggtcagggccaggtgtaggcagagccagcaaggccccaggttgcagctgagagcaggtgtctccttacattttgtaccctatggtacttccttgcctcatggagtcccagtcctgaggccatgggtcagacatagaatatggatcagcacccaccagagaaggggaactttgggcgaaaggataagatgaagcatctgtgggatgagctagagcgagaggaggagcatcccaggcagaggctaacaagtgcaaagtccctggggcctgtctatatgattggcaggagataaagttgagaagccatataatgtaattcaatatacattttaaaaagatgattttggtatctgtggataggggacatgtgcaaaaggcaagcaaacattccgaaatgtttaggaattgagtcttgaaaaatagggtttactgaaattaaattgagtgtcttttgtttttttgtttttgtttttttgagatggagttttgctcttgtcacccaggctggagtgcaatggcaagatcttggctcactgcaacctctgcctcctgtgtttaagtgattttcctgcctcagcctcccaagtagctgggattacaggtgcctgccaccacgcctggctaatttttgtatttttagtagagatggggttttaccatgttggccaagctggtctcaaactcctgacttcgggtgaaccacccgcctcggcctcccaaagcaagattgagtgtcttttgaaaactggactccacgtgggttggtttgatgctgaggtttggaataataacatcctggaaacccccatagggcagtcttcaggttagataagataaggtatgaaaaaatgctttgtaaataatgtcttatgcaaatcgtaatgagaaaaattaagctttgtgtttctgaatgtcaattttatgctcaataaaagttaacaagccaaagttcttcacctttgacatgtggtttaagttttacagaaatattaagggagagaaaagaattgggtcagcattctttgttttcactaaaaatgttatacacactgataagtagcccaagttgtatcagtaacatgggatgccaacatttgtggtgcattctttaaattacattgttatgtaaaaagtttggttcatttaggataaaccaaatttatttcatataacactgatatttacaacttaaatgttttgttattcccttggcgtatcttagactagaagaggttatgactctatggttgttgctgctggatattttaaaatctgtattagaaacattacaggctgggtgcagtggttcatgcctgtaatcccaacactttgggagccaaggcgggaggattgcttcagtctagaacttagagaccagcctgagcaacatagtgagaccctgtctttacaaaatatttaaaaattatccaggcattatggctcatgcctgtagtcccagctactggggaggctgaggtgggaggattgcttgagctcaggaggtcaaggctgcagtgagccagtccccagcctggtcaacagagtgagacagttcctcaaagaaagagaaaacattataaatggtaggtttaatgtattaacctcattttatagatgaggaaactgagatttaaggaggctggccaggtgtggtggctcacgcctgtaatcccagcattttgggaggccgaggtgggtgtatcacttgaggtcaggagtttgagaccagcctgaccaacatgataaaacctcgtctctactaaaaatacaaaaattagctggatgtgatggtgcacacctgtaattccagcttcttgggaggctgaggtgggagaatcacttgaatgtgggaggcagagggtacagtgagctgagatcgtgccactgcactccagcctgggcaacacagtgagaccatgtctcaagaaaaaaaaaaaaggaggctaagttagtaagggcacagtaagcagtaaagagctgggatctgaagccttgaagtatgacgccacatctgatcagttatgttcttggttctcaagttagaatctagtgagagttttctccattctagacctcagcaacccaaacctcgctccatcatagaaaaggatgacagtgccagaaaatctaagacaatgcaaaggtgtttgaaatggacatgcgcatatatgacaaagtttatttcctatttcttgattcctattttggccagaaaacatgaatagcacgctcacgtttgtcactctgagtggagaactaagggccagacgagcagaggatggcatcgtcctggacttgcctctttatccagcccacccccaggtcagctctttgtaattattgccctaagccatctacaaccgacagctctcctgttttataataattttgttttttttccccccatctaggacttccatgaagtagaggacttgataaaggttggtaaaaagaatcaaacctgagcctagttatttgttattgtttgcacacaaagatttggtatcatttgatccacaaagataggcattttaccaatataaatgttacagtgtttcaggtttgaattttaatattcagtctatttggtgagaaggttgaccagttttccttggctcctgattgtcactgctggcccccatggtaggatggagggaagagacactgttatatgacaggctgaaaggcacaaaagaaccaatggaggtggtaaagaagagggagaataggatgtcttaaggaaatgtaagtttctgggaggagaccagcctttagggaaattaagggatgttgaatttctgtgcttctctagctagaaggagaggaatgggccccgagcatggctgtgcaagttcaggtgtgaaagttgggaatttctggcagaaagaggtcattccataaaatccatacacacaagatggagggaaaaaatggaaccttcctggcagctgtcagtgtccccagtttctgtagtaaaggatgggactgaggtgggggagggctgtgctttgatagaggaaaccaagaaagcatgagtaccttgcagataagacaagatacagaacatgggctcctcatggggtctgtgtgggcatggggcttaataatattaatgatgatgaaacattttgagagtctctctgtgtgcagtgccacatgctgagcatttcacttgcattgtccatttaattctcaatgtttctcagtaaggtaggcactgcagttgtcccatgaaggttctgcagggccagagcagccctggatgaccaggggcttggtgtgtagagaagagagggcccaggtcaggaccagggcaagggctgtcatgagaaaaatgattctgtagcttagtctattgtgagtactacttgggtatttctcagtgaatttttaactacagcatttgtagtctctagtatttggctttatctgtgttttcaaagaatataaacaaataagcatgatggattctgattttatactcaaccccatccatggcttgggttttggagacaagccaaatttaaaaacaaactgctttaaacatactggtaagaaagtggaaaaaacttataatggtagaccttgttcatggtagaaagaactcaacttagtctcagggtcagcatttattaaatgggataacaaagggttgtaagtattgccattttgtgttcttccctagaaactggcagtaagattcccagccaagaattaaacctttttttttatttgagacggagtttgctcttgttgcccaggttggagtgcaatggtgtgatcttggctcaccacaaccttcacctcctgggttctagcaattctcctgcctcagcctcgcaagtagctgagattacaggcatgcgccaccatgcctggctaattttgtatttttagtggagacggggtgtctccatgttggtcaggctggtctcgaactcctgagctcaggtgatccgcctgcctcggcctcccaaagagctgggattacaggtgtgagccaccgcgcccacccctgaacttttaaatcaatgtacaaactcatgcagataagggctgggttcgagagactaaggctctggagaacagatgggatccggctgtaggagttcccatttcttgaggaagttacattggtcagcccatagtcacagaggcagaaagcccaagtaccacccaaggcagaaggaattctggatgtgggaactggagtatcttggcctctaacaaggattagagaacctgaagccacctagtgactgccatacaattaccatgtaattaccatctgctgggcctggcagctggggctggtgccaaaggatgacttggtggtgtgggaaggggttgtctcctcataatccccctctgccccaagccaccctcaaacaaacatacaaacaaatgatgttcctggatttcagcaagattatgtgcagtcaggtagagtgaaccagggtatcttgagaacatgttatgttattgatctgtcacatacaatctgagtgaaagtggtgtgcttgccaagcagagcagcacaggacgagccctctagtccctccttccaatcaagctgctagccctgagtgcttgccgtgtggaacgttctaattgctgctgcagatactccacatatacgattttatttaatcctcacagctctaagaggtggacatgaggcccctccatctctaaagatgatggacagtagggatttagagctttttctctgaccttctcagacctgggtcaagatatgtgtgtgtgtgtgtgtgtgtgtgtgtgtgatctttggcctttctaagtctctttctccttctctgtggggagaatacctacttgaaggagttgtgcattgaggcacatagtaggcacttgtgagaatgcctatgttttttttcttttttgagacagagtctcattctgtctctcaggctggagtgcagtggtgcgatctcggccaagtgattcttggctcacaagtgattcttggttcaccaggttcaagtgattctcttgcctcagcctcccgagtagctgagattacaggagtgcaccaccatgcccgactaatttttgtattttagtagagatggggttttgccatgctggccagcctggtctcgagctcctgacctcaggtgatccacctacctcagcctcccaaagtgctgggattacaggtgtgagccactgcacctggccacaatgcctgttttgaggctcacagaggcctctttggtagccaggagactgaccatccttgggcaacaccttaagctctgaaactgcactaacactcttggggactggagacgatgggcatgcttggctcacagtggatgctcaatgagaggtcatttcccatttcaggggatcaaggacttggcccagggcatgtccctgaggagtttttggtctgtctccacagactgccataggcaacacactggtccaggacatctgttattctccagatacccaaaagctcctcgtccgcctcagtgacgtttacaacaggtaagatttttggctgcatcagcactttggggagggctgagtacccagatttatagctcttccttagtctggctgtgctgtgtccagtcaaaccatgatttacgcagccagagtgtttctttccctgataggaagacattcccacttgttcttccttcccctcctgttaagctctttgagcaagctgcaccctggcctgcttcacagagtctgtgtggtgagtgggctgtgaaatgggtttgtcctaatccatcttgtttatgaacaaggtcgtttctggagaacctgaaagtgaacacggagaatctgctgcaagttgaaaacacagggaaggtgaaagggcttattcttacccttaaaggagagcctggtgggcagacccaagcatttgacttttactcaagatattttgcaccgtgggttggtgtggctgaagacccagtgacaggtactttttacttgagcccaggggagggttaaacaatggaagaggaggatcacaaatagttatttaagtgcacttcctgtgacctttcaggtggcttgagttttgagctgccttgttcctctatctttccccatccctgccatcccttcactgaagtcttccatgaaaaacataaaatagagcaggtggataacagggttaaacctgagtgtcagacagcctgggtttacattcctagcttcctagcttttgaccttgggcaagtgacttgacttttaaaagtctcagttccctcctctataaattgtatataatacctcatagggctataaaagcacaatgcatgttaagggcttaatacagtgcctggcacctagtaagtgcccaataactactagctattatattgtattattatatctttttgagacatagtctcacttcatcacccaggctagaacggagtggcatgatcccggctcactgcaacctcagcctcccaggttcaagtgattctcctgccttggcctccccagtagctggaactacaggcgtctgccactacacccggctaatttttgtatttttactagagataggatttcatcatgttggccaggatggtcccaaactcctgacctcaaatgatccctcctcggcctcccaaagtgctgggattacaggcatgagccactgcgcctagctaactactagctattttaataataacaacaaaactagctccttgagccaacacttctagattgtccaccacctgggagcagagggatgagtcaaaggtgggcagaaatgtcatgactcctactctccctctctttgggaacagtgggctgcactgcaaaggacgagaatgcttgatgtgggaggatggtgggtgggatggtgaaggggccacaggaggctgggcagacccttcagggctcctgttctggtcagatggcagggcctggatggctcagttactctctgagtaacaaaacacgtgaaattcaaaactcagcaaacaagcacttttaagactcaggaaaatgcccaaccatatccagagtgcagcttccccatggaagaaaagttccaagcagattgcacaagcacagctgcttcacaaagattttaattggcacagagtgcaagtttgtttgtttgtttgtttgtttgtttttccccgtaatgcttttctagagtataaaggcctttggactttgataaccaacatctgagtttgcttgggactgaagggtttctcagggctcagaactttcagtgctaaaaccagaacagtctcaggcaaaccaggcaggatggttggttgccttacttgaacatcccataacacttttttttttttttttttgcccaggctggagtgcaatggcacgttctcagctccctgcaacctctatctcccaagttcaagagattctcctgcctcagccttccgagtagctgggattacaggcaactgccaccatgccaggctaattttttgtattttaagtagagacagggttttgccatgttggccaggctggtcttgaactcctagcctcaggtgatccacctgcctcggcctcccaaagtgctgggacgcccaccccataacacttcataggttttcccaaacgagaggcttttcctccccatctttttcttcgcaaaatatttttctgtcagttattgctgtatattttgttatttcattttaaaatccaatctctgatctaaatctagagtacaaacgtgaaaaaatacctcactaaaaaagaagttcttttggtgccaaaagctcaggaatgttagcttggtggaagagtttgccttttggccaggtgcagtggctcatgcctataatcccagcactttgggagaccgaggtgggagggttgcatgaggccaggagtttcagaccagcctaagcaacatagggagaccacgtctctacagaaaaatttaaaaataatagttaaaagaaaagaaaatttagccttttttcagagtttccacctttctttgcatatgcactctgggaagaaggagatactttccctggaaagatgtagaaagacttatgcaaggctgggcgcagtggctcatgcctgtaatcccagccctttgagaggctgaaatgggtgcatcacttgaagtcaggagttcaagaccagcctggccaacatagtaaaaccctgtctacactaaaaatacaaaaattagctgggcctggtggctcatgcctgtaatcccagctactcaggaggctgagacaggagaatcactttaacccgggaggcagaggttgtagtgagccgagattgtgccactgcactccagcctgggcgacagagcgagactccgtctcaaaaaaaaaaaaaaaaaaaagaattattcaaaggccttgattctcctaccaagggctaagaatgagctggtagacaagacaagaattaaaacctgcagtctaattcagccttaggagactgtaaggaccagtcaccgtggctcatacctgtaatcccagcactttgggaggctgaggcaggtggatctcttgagatcaggagttcgagaccaggctgggcaacatggtgaaaccccatctctacaaaaaatacaaaaattagccaggcatggtgacatgcacctgtagttccagctacttgcggggggctgaggtaggaggatggcttgagaacgggatgtcaagactgcagtgagccatgattgtgtcactgcactcccagctggacaacagagcaagactgtgtctcaaaaaaataaaaataaaaataaaataaaataaaaagaaaaaaggaaagaaaagaaagtgtaagacatatttgatacataatttggccgagtttatccataaattctatgtcttcctttttatctcctttcataattctacaccctgctgtggcctggccaacataatgatttaggtgatctagagtttattcaaactggataattgattgtaattgcttagaaatttaccacaaaatcgcctctgttttcttggggattgtctcctaacttttcacttcttttgagggtctgcacacgctgttctcagcagctactggtcccagcatctggggaagaaagaaatgcatggtaggacagctctttaccaatttcttttttatttgcctaattcgaagctagtgttccttctcatatgtactatccccttgaaaatgtaatacaatgtcatgtatcacccatgtgaaaatgaaaggttttaaaattccttcacccttaaagatcctccaccccaaacagccttcacctctgcctcccccaacatacagagactgtacagacacagatacagtaactgcccaataagtgtttgttgaataaaatagctgtataactttggcccagagaggttatttataatgtgatgggttgagactggatgatgaccaaggttccttactgctattgctagtcacaggattgaatcaaacaaattactttggaaccaagtcccctagtgattaatgtattgcttagaggcagagaaaaatgatggcagccaatggaggctgcactgccctgatcatccaaggaggagtctgtgaccctgatttggagagagcaaggtggctattcattttccttggcgagtctaattattctcctaagtactgagctcctggaaggctgaggctatgcctcttttgtctgcctggaacacgtggttgcttgaatatgttatgagtgaatgaactccctctgtcctattcagagctgagaagatgggggccttctcaagagggctgagaccacccttcttcatcttcctagagttataggcctgcctctattgtttcaaacatctttgcttactcctagagagagcaggggaagaagcgatgagtggggtgtgtctgggccattacaggaattagtgaaggagatggcccaggaaaaggctcaggaagggagtatgtggagctgtgtgttctgtagatcaaattgagtttgtggctttctcagtctgcaggagaatggggatgggagtgggcagtaccataaacagacgaaggaatttattcttgaaactgatctgggaggactctaagatttgtaataagtctttcactatgctttgttaatttaaaagggtgaaaatactcttaatttgacctgtttgttttctttagcttttcagtgttcccaccgaggaggagagctgggaatttcccttcgtccagacggaagggttgacattagaggaggtgcagctgttgttttagagggcacactgacagcctagaggtggttatgctgtgacgctgctgtctctaaccaccaagtattttctgcttaaaaagaaatgtaaggggctgcctttagcaaatgtgcgtagtagtctacttaatcctcatgttaaaaatcgaaaaatgggccaggcgcagtggctcatgcctgtaatcgtagcactttgagaggccaaggtgggtggatcacctgaggtcaggggttcgacaccagcctggccaacatggtgaaacctcgtctctactacaaatacaaaaattagctgggtgtggtgccacatgcctgtaattccagctacttgggaggctgaggcatggagaatcgcttgaacccaggaggcagaagttgcagtgagcagagatcacaccactgcactccagcctgggcaacagagtaagactccatccacacacacacacacacacacaaaattgaaaagtgaagacattttaatggagatttaatagtgcttccagactaatgaactaatggagttttggctccactcatgagtgtatttgaaatgtaagtaaccagctacaaagaataatgtcacttcatttgattatgactaccaatcaagagaaggaggaatacatttctgaggagtgatactaaaccatttgagcttaaatgagtacctgattttgcagccattaaaatgagtcaataactatgtggaaatatagaaaaatattttataatataatactaagaaagaggacagtaggccataaagtgttagcagtgttatgctatgtctatataaataagcatgggccattaaaaatagcaaactgaaaacagttcatgtgtggggggcaagtttagaagtaattttaatgtatctaagaagtgatttcctttattgttgtactcaggtacgaagactaaaaatcaggatgaatccagaaaattaacacaaaaaagtatgtattaggctacttcctgtcatagtgaaattaaacactcaaagtaatgtaatctcagctgggcgtggcggctcatgcctgtaatcccagcactttggcaggacaaggcaggaggatcacttgaacctaggagttcgagaccagcctgggcaacacagcgagaacttgtctctattaaaaaaaaaaaaaggaatgtaatttcaatctttttcttgatatatggcttgagaatgataatgtaaaaggaattcttctcttacttcaataaaatgggttttaacataactttaaattcagttaaatatacaatattgaatacctatagttgactttgggatggggactttttcaagtcattaagagtgtttgtttaaggtgatctcattgatggtagttctcagccgtctcaaaaactgcaagctaatcagtcagacattctttaatgaccccaattttttcactttaattgttaccatgttttctatttttactgatttttgctaaagcatgtaagagtgaatttattatagcagtaatcttgtgtttctcctgatgtgcaataaatcaataattcaccagc

SEQ ID NO: 655 - DNA, 20767 bp, Homo sapiens
agagtgcctggtgactcttacgctagcctcatttctcggcttcatcttgttagaacaaatttcctcgccctcttctcctaggccgcctgccagcgccgcacccactcctgcccctgcctgcaccccacccacttcccggggacttccgagcccacgcccacatcctttacctccaaggggcaaggaagctgttgacttaagatcccatgtggagcagtcagatgctgctggagaactccccgcactgcaggctccagacacacgacctggcccctcccccgtggacgcctatactgctctgttctctaattccagggttcccaacctcggggttgtgccttgcaaatacctgggaaacttttctagctaatgcctaggcccctaccaacccagaaattcccatctaataatctagggtacagcctaggcattgaaacgttaagcctaagagaaatccggcgcacgcatccagtttccaccaccgaatttccagcttcttaaatctgcaggtccagaaaaagaagatgggagtgctgcccacgtcgcgcactggggctacggccggccccacccctggcgctgccgcggcagtcccgcccttggacttgggcggcgcctggataaacacctgaacctgactgagctccgagccagggactcgggtgcctggggcagacgaggccggcttctccgcggacagctagggagagtgtcctgggtaagttgccgaggtcgtcggtcctgggtgctggctcccggaggaggtcgcgctggcgggggtcgggcgaggccgccctttgggctggtttcacgctgggtcgctcgcaagggggcgcgggtcgccgagccgcggcaggacccacccgcgagctggtgagaaagcagctgcaccgggtagcgcacggctgagcgtcccagaagcccgggctcccgtggctacggctaacgcagacccctcgcccccgggggtgagctgccagcctccctccccacccggagcagagggcaggatgcctccccggaccctcttcttcggtccgttctgcccaggttccctgctctctgctgctcagtgcatccaccttccgggtggatatcaacccccatatcacccctttcaacccaagctgtgattgtcagtctgtctgccctcccgtttcgtccgggtgccctcaccagagccgacttgctgccgcgcactggtatgggaagccgagggcgcctgtttggattgggtaggccgcgagatagggacacctagaagacttctgccagattaaattgtatacgctccgtaacattctaggaaagtctttgcagtaaaatggaaccgtacattcactcttgtttgtaagtatactataaccatatttaattgatatagccagggattattaattcatatgcttaacaggaccagtggaagttctagccattaattattttgctgtcattctgtgcctggcactgttctagaaaggcctccatgttttatggctgtgccacattattatggggattgaggagcagagggggagacatgtaagctggcaggtgttgaaatccaaacagctcctcttgcaccccctccccaaccccttgcaccccgcagaggactttgtgcagggcaatgcctttttttttttttttttctaatttgttcgaaggtttcacacaagctagtagtgaccacataatgctccttaaaactttacctatataaactggtttaattctcacagctcctctgtgtggtaagtattcctatgcactattagaaactccctttttagaggaggaaactgaggcacaagagattaaatcatttctaccaaagttgcagggaaaatcagtgatatatctggaattccaacccaaactttaatctctagacctcattgcctgtgtgggtacccagcaggcaccctaaacttcaactggggaagggaggtaactcaggctgacaagctcttagaaatctagtaagcatctgccaagacagggttaaaagatggacatattttaggtcttgcatcaagccaacattgagacagtggaacactgaaatctagaatgtcctgacattaagagcgttcatgtcacccaggtcaatgttgagacttctggccactgctgaggtgctggagccctgtgatgggagaagtagacctctgtccctctatgtgaattcacatagtgatataaaagggaatgtggtggtctgaccaactactcctggtgtggattttccaaagttggcgacgcccaggctgctgtctgagaagggcgcctagggtttcccattactgtgtgcacagtctgaccctcatccttgcagatccacaggtacaggctccatgtatttgatatgagagtcctctttcaggacaccttttcaagttctgcagtgcctgagaggcctgatcaatcattcaaaagttactctgtgaatgtaaatcagagcaaagatcacagagagtttgaggtctatttcatcaaagcatggatgaaaacgttcttcatttgaccagagcatccatgttccttagagcaaacattcttattctctggacagccctggacacacaggtcaaacctgccttaaaacaaactattttgtccctctgccaggaaagctactgctcaatatccctacctcccaccatcatcatttggatatccactcaaagggtcactttccagcagacatctgttgcttcctctcccaagcccaatctgaatcagctctccgatcatcctctccatagcacactgcacttttctttataacactatggcttataacgatctgtttatttgttgaatacgtctcttcaactagattacttggctcacctgcacagagattatgagaggctgcccatcccctcagccccagtgcccagatagaaccagcacagggtggatactcaataaacataacacatgaaccaatctggccctcaccagctaaccagcacagggaccctgaacaagtcacatacatcttctcttcgatcctcagtctcatctgtacaataagccaggaacaacagcctgggttgcatcgactctcgacatttcctaagggtgtgaccacataccaagtcctcctgtagatgaatctatccacccttactcattaaccgcaactaggctgacttcagccaaactgtgaagacctgctcttttttcattactcccctcctgtctcctcacacctgtgcctttgtctgagcctctcaattaaacaccccattcagagaaggctcccacccccagcacagtatgctgtctgctaaatatgtcttctgttcccatcctgaaggaaataagaccttcccttctttctcagctagtggttagtaaagcacaccttatatattcattcacactaaagtgtgagtaactggtagcaggatgtaagcactaagctctgtatgagtttgtcaaggggaggccttttattcattcagcagacctagtggatgccttcttggtgggcagcactatgaatctgagaaatgtgataacatctgtaaagcactgactataagccaggcattgtggtcatacgtggaacattctcatttcatctgcaaaaacaccctatgccacgggaccaatatagatgaagagaccaaggcccagtgtaaggccaagagaacccccgccatggggttcacaggtaggcagaggcagtgcagggcaggagtccaggtctgcctcgcctgtgacctttaatcacacagagtggtaagtgatatagagctgttggtgcggggacctcagagcctagggaagggctatctggtgctgattgcaaatctgtcggaaaaggtctagaacatctggttacttcctgtcaaatgctttctacaaataggactttacattttcctctcaaatctcagattttaaatagtaatgcaaaattaacgagaatgcaaatgagaaagcacaaacatcaaaggagagaaacataaagccagagaggtagtaatgatgttataaacattgtgatgtggtcaagactttgaacataaaatcagccaacaggattcattattattatgaagaaaggctaactatgagcaataatgaacttattcttttgtgttaaatttgggtgtggtggttacagttcctggttaacaaacatttctgttgtgtactgcacatagcaggcatgcaaataacatgctgagcctggggccaagtaagaaagccgaataagtatagtccctgtggcttcctcctcccactttctgaatacagagtctgctaccaggagagctgtttaaatcacatatctcagttactttcactgtttcagaaaataggagctccgtggagtaaacaactcagaggaaatggacaaataagtcttcatgtgaatctgtctttcttcacaggtgtcagccagaacatgtctttcaacctgcaatcatcaaagaaactgttcattttcttaggaaaatcactgtttagtcttctggaggctatgatttttgccttactcccaaagccacggaagaacgttgctggtgaaatagtcctcatcacaggtgctggaagtggactcggaaggctcttagccttgcagtttgcccggctgggatctgttcttgttctctgggatatcaataaggaggggaatgaggaaacatgtaagatggctcgggaagctggagccacaagagtgcacgcctatacctgcgattgcagccaaaaggaaggagtgtatagagtagccgaccaggtaactcttgtgtgtttactattataatttgatacacatcacactctttttcacttgcctttctcagtgcctattagcctgtctccagtgtccctttaatgtaaacaagattatgggagaatgggaattgggatttttgaattcttattgtatgcaaagacactgtactaactaccatgtatgtattataaccttataaagtaaaacccattattatccctatttcacaagtaaggagactaaggcttagggcaggtatgtagctgccctaagaaacacagttagtaaacagcaagactatagctgccacttgcatctattgacacctgagtacctgcttctaacattacactgcacggaccataccggcccctattacagtgtaagttaatggagggatagaggcatccttctttaagaataaggactcgagatacagagacattaaataacctgtccagcggtcacagacctggtgtgtgatggaagcaggatttgaatccatattctgtctgattttaaatttaggctgtgtccactccaccacagtaccctacgttcgaatgtgtattgctcttaagtagtcataagacaatcagaatcttttattaatcctaaagactcagctatattttcttctttggggtttatacagatacacacataaagctttcaggaaaccaaagctctgacatgaagatggtagggattttcttaccatcatagaggcacgtgcccgtccctcacaaggaattttttttttttttttgagatggagtttcactcttgttgcccagactggagtgcaatggcaccatctcggctcaccacaacctctgtctcctgggttcgagcgattctcttgcctcagccccccgagtagctgggattacaggcctgtgccaccatgcctggctaattgttttgtatttttagtagagacggggtttctccatgttggtcaggctggtcgaactcccgacctcaggtgatccacccactttggcctcccaaagtgctgggattacaggcatgagccactgtgcccgtcctaaggatttttgtgtcctcatattggcttgagtacttcactcatcactctcctgggacactttgtgcctcccagaattgcccaacttattgagaagggaagaaccaaccaagcctgccgtgagcagcctgactacattgtaaagttgctccttagcttctaggctcaatcaggatttccttgctaaggtttgcaggtccctggcagataagtttatgactttcaagtttgtctttacattttacctctctgccaccaccatctccaaacacaggctgcccagtacaggctggagatccacacctgacaaatttgctcgggcctacgctgggcccactcttccaagcacagctgatctcacaaattcagctacttagaagttaagcactgatcacctggcatgttgacttacactgactacaatttatctggccagccttaagcaataaccggttgatgttcaaacgatgaagattgttagctatgggataaactagtatgaagcactctataaataattacttcccttttccctgtaactgtgatttagttctgccccaggtgcttgacttcagaaacagccaaacatgtcatattactagcttattattcaggttttatcactgtggggtcttgagggaattacttatgtgctcctctgaattcaggggaaggaaattactccccatccttataaacccaccatttccactttttattctggatagaaaggaaagtaccagataatttttttttttgagacagagtcttgctctgtcgccaggctggagtgcagtggcatgatcttggctcactgcaaactccacctcccgggttcaagcggtactcctgcctcagcctcccaagtagctgggactacaggtgcacgctaccacgcccagctaatttttgtatttttagtagagacggggtttcaccatgttggccaggatggtctccatctcttgacatcattatccacccgcctcggcctcccaaagtgctgggattacaggtgtgagctaccgcgcccggccaataccagagagtttttaagaagtagcccttagacgagcaatcaaagagaaagctttcagagtgatatgacagcgttttgtctctgctgagtctccaataactttgaaagcttgtatccctaggccatagcttagccttgagttcaggaagtccatccttggaaagaagaaaaccagccagttgatgaaaacaggacaggcagattctaatctgtgctgtgtgtttaaaatatatacagtcgtgcaccatataatgacattttggtcagtgatggaccatatacaaaatggtggtcccacattatgggacagattattacagtatttttactgtcccaatgttctatgattagatacacaaatacttaaccaatgtgttaacagttgcctacagtgttcagtatagtaacacactgtacaggtgggtagcctaggagcaataggctctaccatatggcctaagatgtgtagtagccacacatctaggtttattaagtacactctgtgatcttcacatagcaaccaagtcacctaacaatgcacttctcagaatgtatctccattgttaagtgatttatgactgtactttctcttttcctctatttattccctaatccagccccttctccgtgtgtgaggtcttgatctatgtcacatttggctataatgaagctattcttatgtcccatcatattgattaaaatgaaatgccacatacagagcacagaacaaagttactaaccactgagtagaagaacagctctaactgtaaacagaaagtagcattttgaacatggactcattttaagaagagaaaaatgggaaaagcacatcaaaacttgatctctggaggtcaggcgcagtggctcatgcctgtaatcccaacactttgggaggccaagacgggtggatcatgaggtcaggagatcgagaccatcctggctaacacggtgaaaacctgtctctactaaaaatacaaaaaattagccgggtgtggtggtgggcacctgtagtcctagctacttgggaggctgaggcgggagaatggtgggaacccaggaggcggagcttgcagtgagccaagatcgtgccactgcactccagcctggtcgacagagcaagactccatctcaaaaaaaaaaaaaaaaacttggtgtgtggtgcattgtagactcagcaatggaaataaaccaacctgtatttatttctttatttatttttttagatgcagtctcactctgtcacccaggctggagtgcagtggtgtgatcttggctcactacaacctccacctccctggtttaagcaattctcctgcctcagcctcccgagtagctggggctagaggcacgcatcaccatgcctggctaatttttgtaattttaatagagacaggattttgccatgttggccaggctggtctcaaactcctgtcctcaagtcacccccctgcctcggcctgccagagtgctgggattacaggtgtgagccactgcgcctggccccaagctgtatttttagagtgcataaactcagtatgaattaaccaggataaaaaaaacataaaactctgggaaaataaaacctagcccatgtaaggaattactacattggtggtgttgctcttattcaattcaggttaaaaaagaagtcggcgatgtttccatcctaatcaacaatgccggaatcgtaacaggcaaaaagttccttgactgtccagatgagcttatggaaaagtcatttgatgtgaatttcaaagcacatttatgggtaataattgtttcttctcatcataaatgtaaaattattctggcatttggaagtattttcctcttgctcttttacaatattattagcctctaagtaaagcagagacttctcagttttggacttgtcctgttctacacagttgtccttttctgatgccacttaatctacagcccccaggacctctgcttagggaattctacaaggacagaactgtcctcatggtcctgctaccatgtattgattagctgcaaatgttaggaaatactccaggtggctcacatattttccttaaaacagctcggtgagataagggatcatagaacttaaaagatttgctccaggctacatagcgagcaactgcacttagacaggaccagggtagctttgtaatttgcctaagctgggacacttttggaagtgaaattcagcattattaatgagcaagtgttaatcaggtctgttatgggcaaaccaaaacctatagtcaccttagttagtacccaaccagagaaattagaggttccactggtaacccaggttaccacctgctaccagcgctaaaagcacagtcctgacttctaaagccacccactcaattccagaagttgcatgtttctggcctttgctgagaccagccatctcaggcctccccacactatgcatgcaccctcttgctgcctctcccagcttttattaaaagttgtatttttattttactttatcattttattttaattttttgagacagagtctcattctgtctcccaggctggagttcagtggtgtgatctcagctcactgcaacctccaacctcccggattcaagcgattctcgtgcctcagccacctgagtagctgggattacaggtgcgcgccaccacacccaactaattttttgtgtttttagtagagacagggtttcaccacattggccaagctggtcttgaactcctggcctcaagtgttccgcctgccttggcctcccacagtgctgggatcacaggacttttgacctgtttggttccagccctgctcgtagctcgtcattcctgggcaaggctctctcttgggagtctttgctggagatttctgagctcctcctccattctcctcacacctttccacccaagtcttctttagcagccttcaaatgtaatttggaatttgtagattttctgtcccctatttccaccaaaaatgtaatggtgctggtgctattcttggtgttttgtaaagttttcaggagaaaaatggaaagattcagaatttagtggctaccatgttcctacaagaactactgcaaatgatttatcttgtcccaaatgtccctctccttggtgcttgcttatactcatatatagtcagaatgaagataaagaccatggtccctggaagtctccactcccatggctttgtgttctttttcttttttttttttttgagatagagtatcactttgccgccaggctggagtgcagtggcgcgatctcggctcactgcaacctccacctcccgggttcaagcaattctcctacctcagcctcccaggtatctgggactatgggcgcacgccaccacacccagctaatttttgtacttttagtagagacagggttttgccatgttggccaggctggtctccatctcttgaccttgtgatccgcccgcctcagcctcccaaagtgcttggattacaggtgtgagccactgcgcttggcctggctttgtgttcttttcctacctctctgtttttccccaggtgccttcatggtgtctgtctctctcttttcttcttttcttcttcttcctcttcctccttcctcctcctcctccttcctcctcctccttcctcctcctcctccttcctcctcctcctccttcctcctcctcctccttcctcctcctcctccttcctcctcctcctccttcctcctcctcctccttcctcctcctcctccttcctcctcctccttcctcctcctcctcctccctcctcctcctccttcctcctcctcctcctccctcctcctcctccttccttctcctcctccttcctcctcttcctccttcttcttcttcctccaactccaactcctcctctacctcctcttcctcttcctcctcttccttcagtgctggtgtttccctggctcctaccactcctcatgtcatctcactccctttacttcttctgggcaagttcatgtacattctttgagcatctgcacattgccaggcacaaagacagtgacttaactgctagagcgtccaagagctacctgaaggctgggctctcaaaggcagtgtccctactgagaagtgtcccaactcatggcagaccccagagtgtttgctgcactgcttccttttgctttgttttgatttcccacctctctctacctgttagtttctctctgagacttattgcaatgcaggcaaacaagtgaggtttggcctttgtaagagatcccttttctcacctccttgtctttggtgtgattagttactcctttgatgcagaagatgtcttccttaaaagctcatttctgtctcttttaccttctttctccaggcccccaatcaagggtgaaggtgttggacagaatacagatgtgtcctctttctaatagatattctgttttacgaaatggaacaaaaataagagatgagtttaaaacaaagtgctcttttaaaattgaagtcaacagccagatgtcctgtgaacaatgttcagggaaaatttgaaactcaaaatcaagctaagcagagagaaggcaatctaaatctaaagcatcatgtttgtgaggtttggggttgtggctgccacaacaaagatttactccttcaattcttgttttaatattgtgtcgttaaaagtcaaatatgagcaaaaacataagtctgaataaattattttaataatactggaattgccataaaaaactgatttaacaggttaaataagttaaaatgattactttccagatgtttaagtttttatatccccataccttcagatattttacaggctgaaaaaaaaagattttttaatcacaatgagtatataaatatctgagaaaattatacaatgtggcattaaacattaaaagttttcctttgtattcttagacttataaagcctttctacctgctatgattgctaatgaccatggacatttggtttgcatttcaagttcagctggattaagtggagtaaatgggctggcaggtaagaaaaacatagcaatttacaattgcaaaattccctataactttaacttacacaatagctctgaataattagcactgacttgatgccctaagataaaggataataaactaaaaagtatagtcaataagtggttgataacttcatcgtgtagcaaaactgcccatcagatagacttacatgaaattggactatgccctttggaatcattaggtcttatgcagtaccctgtgtttaaaagagagagaggcctcactgataaattttttgcacaagtgatcaacaaaacaactgtccaccaaagttcacactgacactgtcacagatggtaaggaggatgaccctgtcttctcctgaagtttcctttaagtggtctccccactgctgtgagtttggataaagtttctacacctcaagatacctaaagttaactgctttgtttttccactggttgaagacctgcaggaagtggtgggcattttcatctcccttgcaacaaccaactgacttgacagtagcagtggggagagggcaaagagatccttcaagaccctcaaccaaggaggcccaacttgggagctggctctagaaggaatagaaatcttgacctaacctaccacagcatcccctagaggaaatgtcccaagtcctggcttacaaacattgctaaaactcatccaacagaactgtagcagcaacattcggataacagataagccagtttgccagttgggtggttcctaatgcttttgaagcaaagtggcgtagttcaagattcacaaaaccagtcttagctcagtatatctattacatgaataggtttttcaggaccaccagtcaccccaaatatcaccagtctatcctccttatgacccaggacttcccttcctctctccttcttagaacttatcaggtattattcttacctccctcttatatatctgttgtcacgggcctttgaaatcattcaggtatatttacagctccttatcaatccttttcagacagaacattcctgtcttgagatacaggactctcgcacctgcagctcatcttagaaacaagtataagccttttgtatttcccaccgtgtgagtctttactcccctgcatcagaaccaccggggtgccagtttagcatgcagattccttgggtcatgggccatatctgctcatcagaatctcaggggtcaagggactcagctgcatttatacctgatgactccaatgaccctagaagctgctctggactcctcgtcccccttcccagtctctagcctctgacccactgtctggacagcactagggctggacaaccccacgcctggcgcttataaactggctcttgccagttgcagtagctgcaccgtaacatagcaagtttaaatatgcctcctctgaatgtgtggagcaaaggaaagtgttaatgtacctcaatgccatttcttctccaaacttcttcacttagtcaactgaatagtcagatgttttgttaaaacaggtatgattaaagacaaaaagctgaaaatggacacaaatgccactttccactccttcctctgcccccaccctacattttcaaggtatttaagaggtggaggttgaagctaccaagccctttttttttttctggaagtgaaggaaagagttatagttggaagaaaacttcatctgagaatcacaacccatgctggcctctcttgcctagattcctatatcacttagtgttttatttcttcttttgaatgtcttcatgccccaatgggattgcaattttttgagacaaggcaccatgtaagaactagcacaggggctcacaatgcatttacttgtaagtaaagtccagcagtgtgacctgagacaggatctctgcagcccttcttgtgctgggctctacttggtcattgtcaactgaccctgatcttcagttaaccatgtcccttcccactccctgctcacttcttccagtgggagtagaccaagattacacaaaaggagaactctgaaattgtcttattttctgtcgctgttagcgttatgggtaaaccttaatgtaatgccattttaaaactttggaatatacgttatcatgctttgtctttttcagattactgtgcaagtaaatttgcagcctttgggtttgctgaatctgtatttgtagaaacatttgtccaaaaacaaaaggggatcaaaaccacgattgtgtgccccttttttataaaaactggaatgtttgaaggttgtactacagggtaagtatgtcctttaatttcaaagaatctacactcttaaaaatgttttgctattttattttgttcttttttttaagttgtttaaaatatattgttctgggattcagtatgatttataaatggttttagaattctgtctttcttagtatgtgtttgtgtgaaggataccaagttgaatgggaatggtttatcaaggcagtgtctctcagctcccccaggccctggatctgctcctccatttcccagactctcagggccacatccccttcctgccatccaatcccattctgctccctctctgattccaggaggactagaaataactggagagacattgtcttggtcatatagaaggagctgctataatgaagtatcatacactaggtggcttaaacaagaaaaatgcctttctcacagttctggaggctagaagtccaagatcaaagtgctgataggctcttctcagacaggcactaatcccattcatgagggctccacactggtgacctagctacacctcaaaagccccacctccaaatgccgtcacattgggagtttaggcttcaacatgtgaatttttggggggacacaaatacccagtccgtagcagtcacagatgcccaattctgtatctcatggagactacaggcaatgtgttttcaacaacttgccttacaaatatttggaatatttgtttaatatggtttcacgtatatgtatattgtaatatcagtgtattaataatcatttttcatttcatattttagttatgttactacttactgcattgacacattgataataaaggagtaaatataaaaataaatgaaattgaaaagcaaagaaataagtgataacgtcttaaaaccttttatccctaatttgaaaaattatctttatttatgaatttggccttcagggttttttttaattgttgtcattttatatcctagctgtccttctctgttgccaattctggaaccaaaatatgcagttgaaaaaatagtagaagctattctacaagaaaaaatgtacttgtatatgccaaagttgttatacttcatgatgtttcttaaaaggtaattacatcagcttctattacttccctaacatgccagtctacagtttactccaaatcccaccaggagaagccactttaaaaatacctgataaattaaaattcattaatttaattctattaagtcctgttagtcctatcattgtgcccattgctgacacaataccaaatttacacagttgcagtgcccgccatgagtcaagaaaatggggtctaatccttcctgccaccttagtatcgaattattctgaaaaagaagtggatgtactgatagatggaaagatcgaaatgatttttttaggagagattttcttgcgctcatgataaaataatcctgttggaatagatattgtatccatgcctcctcaagtacagggtcccaaagtcaaggccagacagtaagccaagtgctatagaaatttgtggtatgggtacaattagcaatacataataaatttgagctcttaggatggttaaagaatttgagggaaaaaacttaaaaccacctcttaaaagcaaaagaacaggctgggagcagcagctcacgtttgtaatcccagcactttgggagtccaaggtgagaggattgcttgaggccaggagttcaagactagcttgggaaacaaaggaagaccccatctctccaaaaataatgaataaataagccaggcatggtggtgcacccctgtagtcccagctacttaggagtctgaggcaggaggattggttgagcccaggagtttgaggctggtatacacctatagtcccagctagtcaggaggctgaggcaggaggattgcttgaacccaggggtttgaggctgcagtgagccatgatcagaccactgcactccatcttggcaacagagtgagaccctgtctcttaaaaaataaaaaacgtacatggtggtgcacacctgtaatcccagctacccaggaggctgaggcaggagaatcgcttgaaacagggaggcagagtttgcagtgagctgagatcgcgcgattgccctccaacttgggcaataagagcaaaaactccgtctcaaaaaaaaaaaaagtgcaaaaaacattcttgtgcacccttccctgctctccatggagtttcagtgctgaaattcataggcactgaatgaacatttgacccacttacaaggatagtggtgagctgctgattcctgttatctcaattcattttctagactgtaacaggtcatctaattaaatctttcctcactgggctttctgctgtgtgaggaagcaccttgagttgaaatctgcctcatttgaacttcccctcattggtttgtgcttctcccccagctccatgtgcaattccatcagtcttgccaatgacaattcctagttatttgaagatagatattatacctcacttccactacatggccagcagccattgtccatcctgtgtacagaaatttcttttctcattagctaattatatctactttgtgcaatgaaccaaatgtcattcttgcatactatcatttttccaggcttcatctggcacaggatgggtcagaatgcctgactgaggctatgtgggacagagcaaaggatcctggacaagcaattcgaaattcaggcttacgatcccactattcactaagtctgtgactctgagcgtgccctttattctccaggtcttggcttcttcatttacattgtagagacaatgtttgtcgtagcttgtagattcgtgtaatgcactgtttattgggcagggtgtgcattcacaacacactaagttctttttgcttaatagatggcagattatagtatagtaatgccaatggtaagaacacggaacttaatttttctactttgaataactgtggagattatgtttagttttatgcaatactagttatgggacatgttttgagagagggctagatagctgctgagtaagctaaaggcaaggtgaagaagatcagtaaaggcaatcacatcaaacactccaccaaacattcattcagcaaatattcagagagtgctttgtgtgtcatgaatcacccaccatccaaggatctgcgcttagggttacaacaaagaacaagacaaacagtggtccctgcccatgtggaaatcacttcctgtggggtgagggggcagaaaagaaacaaacaaaaaagtaaggtaaaagaaaagaccataagtgctctgaagaaatataaagcaggaaagggaaaaaaggaaaccccacagtgggaggtagatgggtgcaagttgagttttacttttttttttctttttttttttttttaaagatggagtttcgctcatcacccgggctggagtgcaatggcgcaatcttggctcactgcaacccccgccttccctggttcaagtgattctcctgtctcagcctctcgagtagctgggattacaggtgcccatcaccatgcctggctaatttttgtatttttagtagagatggggtttcaccacattggccaggctggtcttgaactctcgacctcaggtcatccacccacctcagcctcccaaagtgctgggattacaagcatgggccactgcacccggccaagatttacgttgttgttttttttttaattttactctttaattttttttggagacaaggtcttgttctgtcacccaggctagagtgcagtggcttgatcatagcccacagcagcctcaaactcccaggctcaagccatcctcccacctcagcctcccaaatagctgggactatagttgtgcaccattatgcacagctaatttatttttatttttttagagatggggtcttgctatgttgcccaggctggtctcaaattcctggcttcaagcaatcctcccacctcagcctcccaaagcactgggattacaagcatgagccaccacatctaagtgagatttaatttttttttttttttttgagatggactcttgctctgttgcctaggctggagtgcagtggtgcaatcatgcctcactgcaacccccacctcccgggttcaagtgattctcctgcctcagcctcctgagtagctaggattacaggcgtgcaccaccacacctggctaatttttgtatttttagtagagatggggtttcaccatgttggccaggctggtctcaaactcctgaccttgtgatctgcccacctcagcctcctaaagtgctgggattacaggcgtgagccactgcgcccggccggtgagaattaattttaagaatggtgtttggtgggtggagggagtctcataaagaaggtagtacttgaccagagacttgaagctgtgggagggatgaaccacctggagatcttggggtgcccaaacaggggaacaaggagcatggggtcctttcctttacccccaccttaggatgagtctcaggtttcccgtgcctgctttgtttccttgctctgcagtattgaatgcaaaggccagtggagcagagtgctctgttgggatgatgatcatgcatgtatatggctttgcagaggggcaggtgtggatggagaagatggacagtgttagttgggtcttgcccaaggtttgaggagctattgcatctcatcctcacagtagcgccagaaaggcagactgatgacctcattttacagttgaggaaactgaggtctatgagctgagtcgattgcctaaggcggcactgcaaatgacagagctaggattccagccaggctcatctgcccccaaagcgcatgcctacaggacaagacttcactgcttcctctgtgtcattgtacagtggagtgatgctttggaaaccgaaatgagaagtgaattgaataacttaagccagaagacctgtcaaggccctgggcgagtgtccccggatatagtgaacaaggcccagtgaccctgaggcgggtagcactcaggctgcatagtgtgtgcatgagtgagtgacttcatctgccacaagaggtgacactgcttttcagtagaggtggtaaagaggctttcatgaatgataataaagaaagtttattcttgtgttctctttagctttttgcccctcaagacaggactgcttatagctgactatttgggcatccttcatgcaatggatggctttgttgaccaaaagaagaagctctaaagaccaactctatggctaaggtcatctgatacacagtgttacataatgcgtacttcaatgaagaaaagtatttttgtctgacagtggaatatatctggagaccacaagtaccactcctattctgttatctggactagaattttcaatcaatgtgtttgaaaataatgttgctatcacctatttggttgagttttggttttttctttttctttttttttccaaaaataaagacagcccatttttgtcatttccattaccacagatgtaagaaagtgataagccatggccatgagctgccctgagctttggtcgttggggaggtggctcaaatggagccagcggctgtggttgacctgccttggggagcagggctgaggggcgaagaggacatgtggatatccagccagaatgccctctctccagaggacacacagctctggatttctacccccttgctatcctctctggccattttgaacctgtaccacctaatgtagaaaaggcccgcctccagtgcccttctttccaaaacagctacacaaatgcttctgaatgccctggatacgcagaccgagtggcagtctggctaaaggcccatccagcactattgtgcccaagagccttaccgggcattccctgaagccccctcataggcagtgatcctagaccaaactcttaaatagaatcacttttgtttcctagaagagatcaaagagtggttgcttcttactttgaagatgaaattataccaagttaggttttttgctatctattgatccaaaaaatatattcgtgcaattaaagttaagtgttcaacttagtatttcaagttgggattcaggttgaggcattttcctgcagaatgggcaattttatgcatttatattcatcagtgctgccctcactttggatctattgtattcttacagtttaatcaactggcaaagtgctttcatgctttggagattaactataaaagcaagattaagaaaaatatgttaattaccatatccctggaactccttctcaggctggtgggggcagccttgcaagagaaacagcagcctttgtctcttccctcttgtggggagcaaggaggggatgagcggtaccttgggagacccggtaaaagtctaaagaattgagaatttgactatcttgggggtaaaatgctgtcataggggcagcagtctcagggggtgtaaactctggaatccactatggtttaccttgagtggcctgcacgaacatgacagccctgatctgtatttcctttccattcagaaaaccttaaaaaaaaaaaacttgttttatgataatattataacaatcataactaacatttactgtgcccggcagcaaattaagtatttgacaaacattatttcattaaacgagactgtcaatcattactcaaagaatgatgaaggtatttggtgtatgccaaagaataaaggcgttttatttcac

SEQ ID NO: 656 - DNA, 51407 bp, Homo sapiens
ctttagcccaacagtcaaaaataattgatgctaccctacaaatgtccaaaactctagtatatcatatttctaagttacagcaaatattagtcctgctaaaccagggagctttggcaaaaatgttttttgacagtaaatttgtccttgattatatattaactagtcaaagaggtgtttgtaacattattagagcttcttgttgtaggtgggttaacaccaccaatcaagaggtcattctaacagaaagcctggatcagaaaaccatcaccctaaaaaaacatgccttacatatttaacacactctgaaatccagtcaaaatatgactaaaggcccttgccatgactgatgtattctcctggccaacgccaaacaaatgggagcctggttacgagtcagccttcagggacttgtcacatttctacttggtttcttccttgttattgtcataataaaatgttttctatgctgtttagtgcaacttaggccctattctgtagaagtctcctctactattcaggccactcaaacaccccaaataattgagttcaaaatcgacatcaagatataaaggaatcagtgactaaatatatttcatatatggtatttttattgattattgtgctgtcttgacctagtatggaggccttggctagaggctggtcagtttcctctcttgagcagctgattaaatccacaccccaaccacttcccttatcaggttctcacactctggggccactatgtacccactctaatcaccacagggccagacatcagacaattaaggacagcgcccatgccccaaagcccgccaaaattatgcaaattattcaaaattattcaacctagctaaccccaccctttttgctgtacataagctgcccattccccctccagcctgtggtacccagtcctcaggtgcaaccccctgcgtggtcctctgtggcagccttctctcattcagagctgtaagtaacaaagacttctgcctttcatctagctgagcattgaagtgttttatccgactgccaaaagaatctttaaatcttgtaaaatacagtcctacctacatcttaattactattcaatgaatgaaagctgcaaagcttaaaaaacctttatagtttttctaaaccttttatatttatcaagcagatctctgtaaatctgtaaatctgaaaaggataatataaattaccttttttttttttgagacagagtctcacttggcagcctaggctggagtgcagtggcaccatctctgctaactgcaacctctgcctcccaggttcaagtgattctcctgcctcagcctcccgagtagctgggattacaggcacatgccaccacacctggctaattactgtatttttagtagaggggatttcaccatgtttgcaaggctggtctcgaactactgacctcaggtgatctgccctcctcagcctcccaaagtgctgggactagaggcgtgagccactgtgcccagccaatataaattaccatttaaaattattccatgactaatgttcaatttgacgttaattcccctaaacaaataatgcaattgatagacttggttaattaagttcctttaaatattatatattatatcaattacaaatttagtctacctgaatctctcaagcatttcaaatgcctgacacattagtatcttttatacatcttgcaagtttataaaaggagggagggggctctaataattaaagcaattccagtaaaagtaataaaccaaatttatgcagtagtaagttatgttctcttaaacattcaaacactgtgtatagactgaagaaaatgctcttgtactttaaaattgaaattatatggttcatatatctgattttctaatatatcaggttatattaaatgcttcaagtaacttaacaaacaatctttcataggttatctcaaggattaaataattaaatttctaaagttaatacaaatgtgttaatattgtggatttgactaacttcaacattcttatagttatttctctcttctcccagtattgtaaatccacttatgcaaataaagagaatagatagatgtatgatctgattgggctgaggatactgtatcagagaatcaaggccagggttgaagtgtcagttaaagaatttgagagagggtcagggacctaattaggtaccacacatgcccagggtgcctctacacgacccgaaagtcaatctgctgggcatctccttgaggtaacagagctttccaaattcacactgtttcatgcagtctagtatatcatgtgtacccttacctagttttatttatttatttatttatttatttatttatttatttatttatttatttttgagacaatttctctgtcaccaggctggagtgcagtggtgtgatctcagctcactgtaacctctgcctcctgggttcaagcaattctcttgcctcagtctccggagtacctgggactacaggcatgtgccaccacgcccgtctaatttttgtatttttagtagagacagggtttcaccatgttggccaggattgtctcaatctcttgacctctgatgatccgcctacctcggcctcccaaagtgctgggattataggtgtgaggcaccgtgcccggcccccttacccaatttttaaagttacctcttttataacttttttgtttttttgagacagaatctcactctgtcacccaggctggagtgtagtggcatgatctctgctcactgcaacctctgcctcccggttcaagcaattctcgtgtctcagcctcccgagtagctgggattacaagtatgcgctaccacacccggccaatttttgtatttttagtagagatggggtttcgccatgttggccaggctggtcctgaactcctaacctcaagcgatccaccagcttggaccttccaaagtactgggattaaaggcatgagccaccatgcccagcttcttttataacttataactgtgtaatttgatagttgaaattccctctataggatattattcactactcgactgaattcaatctctttattgcctgattggagtcaacttgctttttacatgttttatatccagttcaatatcaagaatccttttgtcattttattgaccattccctacgtgattaacactatctactgaatactgtatctcagaatattacctacatttgcatcaagctcatgatctatagctcacctacatccaccattctatttttgaaatttgggatagcatgtgccaggatacagttgttctgcctgagtcttcactgcacctcgagttattttgaggttcatccatcttatctgaactttctccgtgctctggattttattcctctccaagagacacaaactcatttagagcatgtagatcttcccttgggatgtttctgcctattttattccttgtttctatcatgccaacatttgttctaatctttctatttgttctaatcttttttttttttcaaaagaaaaggaaaaaaacaggtattttatggcaccactggtcagtgtagggcgggtgggtggcacatggcattagatgtgctagttgggcagagctgtgctgttaattttctgaaagtggtaacaaaatacataaaataaaacagtgcaatgccaggacaggccagcatgcgataggtgagttcttccctccgaagccttctttccaggctgtttcatgtgtctttctttagtgtgtccttcctgtctaattaggtttctctcattgcccttgtcctaatgttttacaattatctaaggtggaatagcacagtggagagaagcaaaaatgttggagtgagacagacttaggcagaggtggcaatattgtaaaaataatgatgcttaagctgtaagaccattcattgcttgatttacttccaagatcccagaagggcacaagaaatgtgttcacacaatcatatgttttatataaaatttgcaaaagatatttaaccacaatcagtcaaccccattatcattttactctgactgtacggcatcatatttcctgtatcaggtggtattggaggggctgtgggcatttttgagacccaaatggggaaagttgagttgagaataattttagtttggctttagtgggtcatatttatgtgggtatcagtcatttctgtatattgataatttattgctagccattcagggtagcatccactatgccaaaacaaatatgcagggccagaagtcatattgaaaagtgaaagtgtgcttcctaatggctcccaggttcagaaatttgtaggttattgaagagaaacagatggtgaaatgcacagagacagagctaatcgagggaaaataatttcaatcatccagtgtgtaaagctgcaggcagagaatttggttttagaatttgaccagaaaacctagttaagacaggttctctcaggaatgtatctgataatgtcttacgtacgattaaaaccacatcatatgttacaaaatttttttgatgaaaatagtacaaaattaaagaatcctgtgtattaagacacaaacctatagcagtacttcaaatgtgtgtgaagttttatgaatcccagtattaataagaacaaacaaaaattttaatcaaccatgcttgaaataagactgaaatatctttctattctctctacagaaaataatataaaatttttgctatatgaagagataatccagaattatgaaattaaaatatagataaaagctcttagaggattgtgtctggcagtggctgaatatgaaatattgttttttagattttgtgatatttttgatatttaactttgtaaaatatttgatttattataaatcattttcttgttctaaatagatattcacttttgtcactaattttattattaattttgtattctttttgtggtaaaattaaatttactactttaaacattttaaggtatacaggtctgtggcattaagtacattgacgttgctgtgcaacccccatcgcgcatcatctccagaactttttcatctttccaaactgaaactccatattcattaaacaataactccccactccttcctcccccgagctctggcagcaattactctattttctagctctataaatttgactattctagttatcccatataagtggaatcacacagtatttgtccctttgtatatggcttatttcacttagcatagtgtcttcaatcttcctccatattgtagcatgtatcatttctttttaaggctgaataatattcccttgtatatacagtagtcccccttatctgtgaggatacgttacaagacaatacctgaaaccatggctagtaccgaaccctataaacactatgtttttttccttatacaaacacatctatgataaagtttaaattataaattaggaataggaagagattaacaacaataactaataataaaatagaacaactataacaatatatcataataaaagttatgtgaatgtagtctctctctctctctcaaaatattgcattgtactgtactcacctttcttgtcatgggagatgctgtgatgcctctgtgatgagatgacaagaggtgaatgatgtaagcattgtgatgtagccataggctgctactgaccttctgtatttctgaatcagtgtaaccagccctttgcggcgtggtgtcaactcatttcttgcttgctgaagtcttcgcagatgctcagtgctttctggtgcaactggtggttatcaaaacatgttttctattcatgtcttccacccacccatttaatgtcttttccgtcttaacgaaacacccatcttgcactgtagctgtaacttttacagtttgagttgcaacaccaacactagcacgaatttctttttcctccttcacaattacctggatagaagatttgttcttaccgtagatcttagcaacctcagtatatgacttttttcctctccttattaagccaagagctttcaaattttcacttaaaggaaggactgatggcttctctttggcatatccaaattaccagcatcacaagtcttgggctttggggccattatgaagtaaaataagggttacttgaacacaagcactgcaacatggcaacagaaaatctgataactgagaagactactaagtgactaaggggagggcagcatgtacagaggcgatatgatggacaaagggaagattcacggccccatcaggatggagtgggatgctgtgagatgtcatcacactactcagaatggcatgcaattgaaaacgtattgtttatttctagaagtttccatttaataattttggactgtggtggatcatacataactgaaacagaggaaagcaaagctttggttaagggggaaactactgtatatatagtaccacattttgtttattcattcatctgacaataaacactgggtttgtttccacctttggaatattgtgaataacactgctatgaatacaggtgtacaaatatctgtagaatcccctgttctcacttctttcagatatatactcagaagtggaatgctggaccataaggtagttctgtgtttaattctttgaggaatcaccatactgctttccacaatggtgacagctctttacattcccaccagaaatgcacaagggttctcatttctccacatcatcgccaacacttgttttctgctgtatttttgtctggttggttttctttttgtttcatagtagccgtctgatgagtacaaagtgcattcttttttaaagagggcctcccaaaaacctgggtcttctctgtgctcgcgtctgaactttagttctaccatggcatatggtccatcgtccatgattttgtttcctcgcttgtaaaatgaggataaaaataaacatgactctaggattgttttaaagatttggtgaaataatatatgtgaaaccattagcacgtagtctgcacttaaaaagtggcaatccctttcattattatttacttatatgtctttctcctgtacaacattatgagctcctcactcatcttctgtcctcaacacccagcataggacctgacatatacttggtgtttaatggatgtttgatggttgagcttaaaatcatccatagaagacaggccacaattcttttagccacaatgcatgtagaagttcaaaagttcctcagtgaagaggaactgaaagtaaatatcagaaccttgctgctctgtaattcactgagtgcaatccagtctttatcaacacagtaaaatctttactgttctcattctctaaagtagcttcactcacgctcagcaaattattttatttttctcattaagttgtaaatcatattacctctccaggtattgctttagacaaatatttgtattgggtggaccctacctgactactgctgacaagattctggtgcaccaaagggcaaggatgctgccccagctgggctgatttctgcttgggtgtactacacatggcattaaagcctgcaatattcagagaccccgttctttgggggttgccttaggattcatgaaagcccagaaactgtattcaaaattgtatgtgtgtatacgcacacacacctgagaatatgtgcactttcaaaggaaacaaacctaacttttatcataatttcaaaggaatgcatgaccaaaagaattaagattaacagacctagaaagcctagggcgccagaatcattatcaagccagaggcttacctttaggaaaagaaacagatcttgaaacaatttgtggtatgagttcagatctttaggggagctagaacccccagttactaggaccaaggcacagaatcagctaaccaaactccaaggatgaagagtcattggagttggcagggtaatttaaatctcctttaaactccctctaactgcacataagttagatccagaatctgtggatccatcctaaagatggcagtagtcactatagctgggagctattcagagaggcattcagatatcacactgtgtcatatgttaaatgcagacaaccaaaggtgatagaagaattatgacatcaaatttaaaattcctagaagtatccagaatagtatgcaaatgtaaatttaacacttctaagatccatttaaacacaataatggcaaattatattttaacctattttgtgtcttaatctgataagaagaaatttgaaattgtgcatcttttaatacaggactgattaaaataatttctgagaaaagtcaataaaaataaatattagcgagaaaagaaaatctaagacataaatttaaagtagtgtatctgtacatacttatactacaggttgtcatacattttgacagcacttgtcatttttagaaaattgaaattactttctatttactctctgtaaataaaaagcatctctactgagacatggttactgagttccatatttacagaaatgagctagaatgttttaatctctaactacaataaaatcatccaaggtgatcataaagttcccatatctctttctaaaaaataaaaataaaatagaacaaagccagaagattttaaaagttttttttaaaaaactccaaggttttagtactattaaaaaatgcctaagtttagagggttttgattcaatttcctctgaatttcactcttcccatgataaccagtcactaccatttgtatccccagaggtttgaatgaagtctgaacaaagtttacttcaattgatttcctgccaatctgagataggctgagactgtcaaagtgaaggaaaaacagtacaaataaacatataaaatacaagaagcataaatctttatgggcttataaattacaggtattaatatacaacaaacactagttctctagaacagtcctaacctattctatggctgtgccatctagcccttaatgacggggttcagcttcaaagacagctggttcaacttcccccccatttcagttcctggcctgattctgaaaggtttggtgtcatgttatttctcactacagaggaaatagtttgctagacacattaaaccctaggtagccaaattccagggatcttagttggtcatatattacttggctacttgttgaactgtaatcctatcctctacatacaagtccaggactataacagtttcttaatcataagtaaaagtaatttccaattagtaagaaacagactaacatgggtaacaggcgtaagggatgagtggagaacatcaagattaacccaccatagtgccagggttcccattcatttccccttaaggtagctatttggagtatgcttttaaaagagaaccctgttcccatgctttctcttaagtacaacttttgcatcaaccaaagatggactagctattatgatgcaaaggaccacgggaagctgctctggctaaacatctccttcttgttggccctaccagtccacggcatttcattgttcaaaatgcatgtctttacttaagatctttggagtttcaaatcactatgtaaagcaaagatgtgactagaagttaccacattaagctattttctgtcattaatgctttgatatgaatgtgtttcaagatggttaactagccaaggttaggcattgaaagttggagagatgcatcctaggcaagccggggtaatctccaaagtggggtaaccaagagcattaggaaactgaatttggaaaagagagggtagcatgaaagatgaaatctgatataaataagggggtagcagggcaaagccatttcacagatctgtaaacaaactgcaatgctgacctctggtttccctaactaagagctttcacaaagtaaacatgttatttaaaaataatatctcaaatagccatgcagttatgatgcgcagtttaactgaggtgggggagattctcagagggaagaacccagagatcagggttcaaggctgggagagaaatggctacttccttggaaatgttcctaggtgtcctgatctgccactgagctacagccttcaaactcaaactgcaagggaagcttttttcgagcctccctggaaaaaacccatgaccccaaaatccttccctcgaagctctatccagaggcttggtactgcttcaagtagaaaatctgatttggtttctgggaaggaggacctgttggaaagttacaagattgacgtgacagtgacaagtctggaacctcctggctctgatgcacagtgcttgaactcccttagaaatgaagcattgcccccaagatagtataaagttacagttatctaaagttttctctcttttttttacctgtttctctttctccaaaaaaaagtttaattttaagaacaatgaaaaatcaatcttgaacaattatagggaaactcaaaagagcacactgtgcatttcagctacttcagtcacaatgaaacaatcattaaaaagatattatgtttgtttcacacaaagaaaatgtgaaaaaaaaaacacctccatattgttaaagcaacatgtaccacaactaaacacaggtagaatttttaaattttaaatttggccaggtgtggtggctcacacctgtaatctcagcactttgggaggcagagaagggcagatcatgaggtcaggagttcaagaccagcctagccaacatggtgaaacctcatctctactaaaaatacaaaaaaattacccgggcatggtggcacactcctctagtcccatctactcaggagactgaggcaagagaatcacttgaacctgggagacagagtttgtggtgagccaagattgcgccactgcactccagcctggcaacagagtgagactctgcctcaaaataataataattattattattactattttaaatttaatttaattttttaattttaaaattacaagcgattcataaacattctgtcctctcttctttcaatattttgtttttatttattgtctaatatgtataagtagctggaaaattgtacagctcatattcttttataagcaatgaaaagaaaataagtgagatttaatacatataaataattttctattattctttaatactttcaatttatttaatgcttttgttttatacaacatacaaaatactaccgcagcacatgtaatgtaatagcttagtcgtagtcttacttttcaaaaaattgtatataatacataatctcaaccccagtatcagatatcacttgtgtacatcttgcctttattcctattcttgcttctggaaaccttagctatttctgacaaagggtatacaaggaatatttctaaagcagtggctctctaagtgtggtcctcagagcagcagtatcagcatcacctgggacttgctagaaatgcaaattctcagcttccatcccagacctactgaatcagaaactctgaaggtgaggctgggcaatctgtattttaacaaagccctctgatgcacagaaatgtttgagaaccactcgcttaaaggaaccacaaagcaaagattttttacatgcttcagaacttatccctagctttgcttttctctttccaatcatttaatttaaatgttttctcttatgccacagagttgagtgaaattcccctgactcccttggtttttttcaaacaagtacatttcttttcctcttaggagtataatcatcatgtagattgtacaaaataaaataacttctccatgtgttcatctggttaggagatttccaattttataaggcaataaaatagtattcaaaagggggcacaatagctatattgacatgccagtagacatgtagaaactatagaaatcgttcttttcctcttataaactttttttattggttaaaacaagattttattaaaatattggcttattcttaaggcaagaataattttaatttttaaaaaattttaatttttaaattctataatctgtctctgaaattcttcagattaatatctcaaaatcttataaacttttaaatatgaggttaagaaaaaatttaaataattttattataaaaatgatatatgttctttgcagctatcaaacaatacagatgtaaatcaagtaaaaattaacaatctgtcatcttttagagtcatattctctttaaggcaacaaatgttaccagattggtatttctttctaatctctcttcactgactacataagtgtgcagatgcaaaaaaattttatatgcaaaatcaggatcatattatgccattgctcttcaattcactttttacacttaaagtatcacaaatgcacttgtctagtatcactatttaattccattcccgtttaggttattttgaaatgcctgctcttataaacattgattcagttagcatccttgcacatttatttccaattactcttgttaatttttcaatttcacagactcctaaaagtggaatatttgaatctaactctatgtccatttataatttaattaagggctgcaaatgaattattggagtacttcgtgcttccgcaggaatattatcagtcttttgaattttgcctcccattcccatggtctctcattgttttgatctatgtttttctaaacagtggtcacatagatgatcttttctcacactgttggccattggctattttgtgagcaaaagatcaaaagtcttccttggaggctaagggagaaaagtgaccttttgaagctcaaggtgagaaacagcatgatgggtagcacacagtaactcacacctgtaatcctaacactttgggaggccgaagagggaggatcacttgagctcaggagttcaaaaccagcctgggcaacatagtgggacctcatctctacaaaaacttaaaaaaaaaaaaaaaaaaaaggggaagaaagagcatggtggggcttctcccctccttaactgtgtggattaacaatagttctgctcaaagttgcagttcctctccagggctgctagagttggcctgcagaagcaagctgtacataggacattggcaaaggcaacttttctccaaagactgagagacatctactgggtttcattgattgcacccactcagggagccaagggttctgagttccttatcccagggcaaaacatcaaccctgtacctagaggagccactgccctctgcctgggtctataaaagccttcattattttggaggtccctaggccttccttattctactgattgactctcacctgcagggcactagcaagaaggagggtgatggatatgcaatgaaattgtcatctgtcccaatattttgtattttcttcatgtgtatggccacagttgttctccccgaacttaaaaataaattaacaagcccaggctatattgaaggtgaagagaagatgattttaaaataagatttaaaaggaatcaaccatttataaatttatttagaatataacacaagcaaagtgcataaaatgatttaccagttcttccaaatgctcattttaaagcaaaagctctgtgacgaacgggtgcagaacactgtggcacaaagtccatatttggcttccccagcctgcaatgtgagaaattccttttaccataataatattagggaggctctgtccagccaagcagtgctcactttcttaagtcatagaggtttatcatgtcaggcaaagttcagaatcatttaatctcacctttcatcatccattatggtagagacggagctacctacttctagatttatgtgcctgtaattttttcatgttgttctgaaatgaagcgcctgttaagtttactccccagataatcctttgtttctggaagttcatagaagtcaccctttgtcatcattaatgtaatatcgtctcacaagcaggtattataactcaattctgagattccctcacccttttatataccggtgatgccataactaattgctctgcttcatacagctcagctgtatctccaaccagggcctgaggcctcctcttaagcccctgccccatctgaccacccacctccccatctcatcctggacctcttgcccacagagggagagcagagggctgcctccagagccaagcggcagctgttgctgccagtaccgtctagaagctgagcacccacacccaccctcagcacctttctctccacgtgcccctcagctggcactgcagggtggataatgctcaagttaatttgatactcccagccctgtcagagttatgagctattaaaaattgaaacttatttattctccagttaggtttcacatttctggtactaagacgaggtcatatcttagggaaagaaatggtatctctttcctgaaaatagtgtactaagattctggcaccttttccagcataagatttttcatagctcagtgtgtattatagcagtgtagctgattaaaaattctgttactttagttccagatggtttttattttggatgtgctcaaagtgtttgttcaccacatcactaatgttctgtagaaataaatcgacaaaataagtcacttgcttattcattccaatatttaacaaaagtgtttgattatctactgaagagaatggaagactcctaggactgataaaattcggactctgattttaagagtcttactacccatctggtggagagacaagtatacacataaatataactacggtttgaatgtgagtgctgtcataagaaagatgtaaaacaaactctatggcaatgcaaagatgaaagactttattcaagaaatacctatcatctgagatgtacttttgatgataggttagattttcacaagtggatatgtgtgtttgggacaagagttgggcatttcacattaaagagcagcacatcgcaaagtctgaaggtaaagagagaaagacacagaataaatttggggttaatagccaggtgcagtggctcacgcctgtaactccagcattttgggaggccaaggtgggcagatcgcttgagcccaggagctcaagaccagcctgggcaacatggtgagaccctgtctctatttaaaaaaaaataaaataaaaaagaaaagaaaggaaaggaaagaaaagaaatttggggacaacatatagtcctgctttacaaaataaacagtataaaggaaactattgaaataaaaatctggaaaagtagatctgaggcccttgcctgctaggtggtggtgtttgccttttatgcaaagcaatgggaagctgttgaaaattccctgaccatgaatgagctgactggaacagggcttcagggctatcattcttgcagtagatctttagctggatatgagggagcaaaggcttaggcaatgaggtcagttaggatgtgatttgatgtcagcaggtaagaggcaatggtgatgaaaggagaagaaaggaaagaacaccagaggggttgtgaagatagaattggcagcatttaccacaagagcctaaggaaagggaaggagacacagataactccaagctggtgggcctggacccttacctttgataaggatggcaacagtaaccaacacactggaggcaggaagggaacaatcaccaattcatttggaggcaagaagagctcagagtgtgggcaagtcactcaggtggtgctcactttagcagaaaggctgtgtagatgagtgtttagttaaagaactgacattttcacggatatgccttgaaagtatgtaaatctgtatttcttaaatggttagcaagcggagccctcaacagcatttatcacctgcatgaacagaattatttattgtgctgtgctcctgtgaatggtattccaggaattggaaagatgcgggcaaagttttgttttaaaattaactcttaaagaactggaatttctctcattagtagtaaaagcaacaagaggttgccaaaagcaaaagtgttgagaaagaaacatgttccctttactttttctttaaattataagtgaatgggcatgacacaaaacagcgaccatgatgactaagcaaacctatgtagacttaacagcccttataaaataaaactcacattaccctgactttctttcgtgctattgtgccacaagggaactgaaggtaagcagttcacacagatgactatattgataatcattctgccaaactacacatctttagtttttttaattgcttcttctcaggtatctattgctaatatcagcattgatattttcatcaaaataatataagttatctgcctaaaaatttcaatagaatcaatagaatcaatggatgactcttttctgctacatcaactacagccaattgaatgatatccatcaatatccagagaatgatatgctttagtaatgaaactattcgtacattgtattatttcaaccatcactaactccccttgctcttcccctacgcaccacaattatactcccaattttgctttttagaaagcaaaatccctgaatctttttcagctctcagtgaagctaatttccttgaatcccatcccctcaaaatatgccaattcaattacacccagggccaaaaatcatcttttatttccagtttggcctgtttcctcctcaataccccagccaccaccaccttcaaacgccaccatcactaaatgagtccttgagaagttttcccttgcttcctacctgtagtaggctaaataattggccccaacaatgtccatatcttaatccccagaatctttgaaaatgtcttacacaacacaagggacttcacagatgtgattaaatgaaggatcctgagatgggagattattctgattcatccagatgggcctgatataatcacaaagattcttataagaaggaggaagaaaagaggagggagagaagattttatactgctcgctttgaggatggagaagggatcataagccaaggaatgtaggaggcacatagaaactggaaaagacaacaaaacaaattcttcccagagactgagaaggaatgcaaccctgccaaccccttgattttagccccaaaaacgtattttggatttgtgactgccagaagtgtcaggagaataaatttgtattgtaagaggctaaacttttgatgatttgtttcagcagcagtagaaaactactatattacctctctgtatggtctgccataaactcaataccataaagatgtggattgcctgcccagagaaggtaacttgcatgatcaatgggtaccttcagatgatagtagctggtgaattggtgctaatagcgctggtccagtgaagaaaggatgaggtgcaatccacatggagtttccacatagtaagccccactgagtgttagacatcaagctcaatacttcatgtctgttattttattttattttattttttgacagagtcttgctctgtcacctagagggcatctcacattgcacccagggaatgcagtggtgtgatggctcactgcaacctccaccccctgggttcaagtgattctcctgtctcggcctcccaagtaggtgggattacaggtggctgccaccatgcccggctaacttgtgtatttttagtagacagagggtttcgacatgttggccaggctggtctcaaacttccggcatcaagcaatcatcccgcttcggcttcccaaagtgctgagattacaggtgtgagccatggtgcctggccacatctgatatctctttaacattttcttctttattatctttttaaacgtatttgacacatacagtgcttaccttcttgggtatctggtggtcttcatgaactcattatttgatgatttggaggagtcctaaatccctaaactggacaatctttccttaaagagatcgatagccaggggtcatcagcaaccatgaaccagttcagctcccttgagagtgtctgagcagaagagtcacagattcagatttcccctcccagtggcctgagcctcagagttattactggcatccactctcaggatgggacaacatgtgcctctaaggtccagttctcagttttggggagttttgctttgtgtttagagggaaaaggtgcatttcctgaagggatcagttacttcttgcagaacccacattccctacaggagcgtggtctccccagggcctggtggttctgcaagagagaaatggtgatggcagatggtggtgcacaagtagatgatttaaattatgtttaggaggaagaagctattaaacttgctgctgatttgataaatagattttgtgaaaggaaatattcaaagaggactcctagatttcttccttaagaaacagggatggtgtaatgccatttacagttaccggagatgagaaacaagagttatgcttgtatcatttttaattgtttatttatatatttatttatttagagacagggggtgtcgcccaggctggagtgcagtgctgcaaacacagcttactgcagctttgacctcccaggctcaagcaatccttctgcctcggtcccccaagtagctgggactacaggcacatgccaccacgcctggctaatttttgtgttttttagtagagatggggttttgccatgttgcccgggctggtctggaattcctgagctcaagtgatactcctgccttgaccacccaaagtgctgggattatgggcctgagccactacacccagccaacgcttgtattgttttctaaaaaggctttactgttgagtgcccaggccattttaaaaattttttaccttttagattgacaggaaaaggtcagcagtgcctttaattttacatttaggcctactttcagggaaaattggtatttcatcttcttataaataaaatctggctggcttgatttttctatttaaggtatgaaaaattactagatatttcaagcaagttagggttagaggaggtaaaaggctacaaaatctcatattttatctttctagaaggatttatggaagaagggctatggaatttgttcccaaagactggctaacaaagattcaatgggacttgaaccgttctttctatatgtccatagcttgctttttcagtgtctgctttttaaccaaatgctacaaccagaaaacgtaatttgtctagaacataagcacatgttttccatggttttagtctccttattggtaaggaatttagtctccttattggtaaatcatacacaataccagtaagtgggttttaagccctgggactcaggtttcagggtatctggatgtcccagggtatatcaaagaggccagtgcacagagataagatacatgcccacatttttaggggcattagtggaataagcctttgttataatacctaccaagttatcaacaatatgtgaaagactgttgtgagcagcttcttctgtgctcttgcacaaacaaagataaacagaaaataaccgtttatgaaattggtcttttgtttctccagctgccctgtcctgtctcacgtcatttccatgcagggcttccttttcattcgaggttcagtgtctcttcttccaaaccctctccaccaattaatacaagaagggtcctgatatcatcatttacaagtggttgaatcttatttttcattcgttagcaattccacgtctttctatttttaagagttacttgaatttccctaggactcatccaccgaatgaagtcactgactcatagatctggcctgcaggaatagattctccccatactccactccaatcaaaacccaccatgttaattcttggatgtttcatgtgctcagaaacaagtctgctcatgttcttccatctggccttccagttacggcctttcttgcctcaaaagctatttttaaaaggcacttcctctctaccttggcttctgaaaaccattaagagaatatggctttgctgagtagggtacagtgagtagggtacagtaataagtcttcccttccttcaaacctgttaatttccattgtgtttaacatacagtaacttgacttgtgtaaggttctgaatgattgttttcctttctaaaccatctcacactaccttcacctgctcactatgcctcggctctgtttcaggttttttgcacatagaagaccacccaaaaactcagtggcttagagtgacaacttttttttcttctcactgttatggggttgatgggtggatatttctgttggttttacctggacttactcactgagtgaatttcagctgggtggctgaatttcagctgggacagctggaatgccagcaccttgctctccaagcagtatttcctcttgagggagaccagaccaggcaggactttctcacatggctcatctgtgttctaaacaagcacttatcaagccttcgctcgtgttgttcgctgatgtcccattggccaaataagtcatgtggccatgccctgagtcagtaagggaggagactacaaaagggtatggataccagaaggcaggattcattggaggccattagcatcaacaagacccaaatgccttgttttatttactagaatgcatcgggctcttttttgctttaaggtctttgcatagtcttccttttaatcattcaacaaatatttaggcaccctcagacactggacaaaatcctcagagatctcaagaatctttccttctaaagaggggaagcatataataaatacatgcaaaactagaaaagataatttcagacggttataaaagctccgaaaaaataaactgggataatgggtagaaagtgattggccaaagtggagagtgaaatgaagtttagcgaggtcaagaaggccttctgaggggatggcactccatctaaaagctggtgatgagaaagcacagcagcgaggtgtcacagaggaggagtgttctggccatacctcaaccttggtcatggctgtcctgtctcctcttgccttcctccttgtaagtagcccattcctgcccttaccactgcccacctagtttatccctttagaaaattcaccacaattttgggtgatttgctgttgatccttgtttaagtccctcataaactataatgctaatgaagatagagttgtttctgtatgtttcttggatattttcatagatctatgcttagttgacattcaaaaacaattgctaaatgaataaataaatgaattcacacagtcactcgtgcaggttgaaagcatgaccacagatgctcagagtgagacaagttcctatgtccaattcctcatgggcccagactacatttgcctgtctctcagttgggaccaacccactatgcaagttctttctaccctcctgggggtttcatttcaggggttctttggactctttggaacttccctgactctgagctgagaatagttgctatcccgtccagcctaataggtttcaataaatgttaagtcccagagacaaagctttggggccttgccccttttccctttaggaagtctgctggaattcatatacaaaatttctaccccttttccctgctaccttcaaatttgaaataataaaaaaagagattttattctatttcattagataccacctctcatgaacaatgatagcagctatcaatcatactgtaagtaccaggtaactagacacctggcctatattatcattaaccctcgccacaatcctgcaaggtaggattcttttccccattttcagataaggaaacagaggcttatagaggtgaaataatttccacaataaatccgaggattaaaaggtagatcaggtgttcaggcctacttgagtctggatctgatgatcttcctaccagacacgttgcctttgtgttgacccgctccacattggggataaaaatacagctccactgtctcttatctccagctctgaaatccaaaaatttctgaaaaccaaaactgttcctgaaaacacatgacctgatgtgacctgaactcacctgtgggcctaacctgacctgacacgaagctatttatagtctttatttattccatgtactatgactattcatacatttgctccaaaaatagtaatgtgttcaattacaaggtactcccccagaccctgataagggcattcatatataatatttgtgttgtattgctttccaaaaatctgagaaattctgaattctgaaacacatgtggccccagggttttcaggtgtgcaactgggattctgtaataataaattatgtttgtcaatggttttagagctcacaaagtttttaagggttgaggaaattttattttgttttcctctagtacacaaagaataatttaggagattcatctgcaccttattttcttactcttccataaagcagctttatttctgatttcaggctattaatcatacttgatcccaacagaagtctcgagttatctcttcttgcagaaagacatttagttttaagattaagtaaaatgaaaaaaaaggaaagcacttttcagaagcgttggtattcacttcagttaaactaattttaaatttttaatttcctaaaataatggcttagaatagcactaaagtgaatatactaaatggatccaaccattaaaacgtattctaaaattagtgaataaatatttttaaatgtaagaaaataattataataagagtaccttgcatttatcaatttgcaatttataaaacattttcacctacctgatctcctatataataataattattatcattataggaaagttgccattcactgagtgctatcttttcatgagacactttatatatactatttactcatcctcacaactgtgtaaggttgttattgttatttctgcctcacaaacaaaaaaactgaagctcaatgaggctgatatatttgcttccaattgtgcaaatagaaggttagagtgagtacatgagaaaagctgtgtgtagaaggcattttctttttggtattttattcttaccaacatatgacaacattcaatgtgtttttaatctcaaggttcctgattgtcatagaaaaaactcttgggctggaggtacaaaaagtaggatcaaatatcaacactgccaccctgacatgggacttctggcaagtgacaaaatatttcaatttcaatctcctcatttgtgaaatgaaggacgttatattcagtccacacgttgtcatgggaattatgtcaaatactagaaggattaaatgctagtaaaggaagccaagaaagtcatggcaggctgaggttcttgatctttcaataagaagaagaaaaaaaaactagacctgccatttatcactgatcaaaatggcttggttcacataataagtttagcttcaagttacattaaaacaaaataaataaaatgcacttaatcacttttttaaaataaaaaatatatacttttaaaagtaaaaatttaaatctgggccaggcacggtggctcatgcctataatgcccctactttgagaggccaagacaagaggatccctggagcccaggagttcaagaccagcctgagcaaaatagcaagactctgtctctactgaaagtaaaaaaaaaaaaaaaaaaaaaaaaaggaactagacatagtggcgtgcacctgtagtcccagctgcttgggaggctgaggtgggaggatcgctagagcccaggacctggatgctgcagtgatctgcacccagcctgggtgacagagaaagaccctgtcttttaaaaatttgtttttaatttttaaataaaaaataagtgcataggtacatttggttgctttctcactaagctttaaagtttctttctttgtatattcaccttcatacttcagttagagaaaaacaattttggggtgatgtttctcagtgttcgtgtataccagttcttcctttgcagctacagtttttctcgcacagcagtcagtgatctcagtgccctgactggctgcatttctctcaacctctggttcaagcagtcacttgaccctgaactcaactagtggtcagtatcaggccatgaaacagggtgagataagagggtactggagtagaagctgggctgagctggcaggaaggggatgggcagagcagggacatacatcctgacacaggcagcagtcattggctgttacataagaccaaccacaggtcaaaggcaacgtcacagtctagattggaagactggggctaaggtccagaaagctgagttgctccagatggcacaagacagaatggaaagcaggcatacaggtataggttggacattcaagctaacctaaatctagcttccagaaaagacaggttcatacatgtctattccaggatgtaactaaggtatgctcccttggttttaagactgtgctcacaaacttgttttctctctttatatcaaacacaaaagttgtcctggagagctatttataaagacaatgagactgctcctgcctcgccaccaccacacacacccttcagtcagaagctggttccccgccttgaaagatctctcttctctgttgtctcagtgacttccactggtgactccaccttgaatctgctatcaatcatgtaaaagtcgtccttgttctataagctatttgctttcctttactttgtatatgtgtgaggaaacagatattttttagagaactctaaaaacagatcatcccaacaagattttgtcttagcactttttctggaaggaagaatggacttctctgctaaaaggtggtactctggggtgtatctaagagattaatttccttccattcaactttccctttaaagaaagctgtcacctttgcctctctctagatatgtttttccttatgttaaaaaaaaaagaaaaaaaagaaagaaaaatgggccaggcacagtagctcacacctataatcccagcactgtgggaggccaaggtgggtggatcacttgaggtcaggagtttgagaccagcctggccaacatggtgaaaccgcattcctactaaaaatacaaaaaaaaaaaaaaaattagctgggtgtggtggcacaggcctgtaatcccagctactcgggaggctgagctgggaggatctcttgaacccaggaggcagaggttgcagtgagccgagatccacatcactgcactccagcatgggtgacagtgagactctgtctcaaaaaaagaaaagaaaaaaaaaagtatgtattacctttccctccctgtcaggatagttattagaatctaagcagtgagaagtcattgagaagaacaaaaatctatgtatttatttacaaggtattcatattactagaccccttttcctgtatccagtagcagtcctctccatatacaaggaaatgtaccattcatttcaactttgtttataacaatgagaaataacctaaatgcccattgattgaggaatggctaaataaacaatggcaagccataaaaaagaacgttgcaaagccaaaaaaaaaatactctttgtataatggccaaattccaagaaaatgaattaaggaaaaaaagtaaaacaaaacatgtaaaacaaaaagaaaaaaattactctttgtatagtaatagggccaaattctaatgtattaaggggaaaaagtaagggacaaaaaaagcgtatacagtatgtattatttgtatttttttcgaaagagcaaaataatacgtgcagttatacccatgtatatgcatcaaatatctctttaaatatatgaaataaattgataactttggttttctctgggacagaaaatgggagaagattgttttttactttgtacccttttatacctttgaatttgaaaccacatgaacatagtacccgtccaacaaaattaaattaagatcataaataaaaatatccctgggtgatttttcacaatgtgtgagaaactcaagatgcaaatgctacccaagtgagctgaattgcaagtctatagcgtcatgttagttattagtgtggcacaagattaatggctcatgttcttcttgctttcacttttctcccgcttaagccagatatttctcctcaaatttttgaccactggagagcacacagtgccctttggttctggctcaaagcagcctgtactctcccctctgggacttgggtccttcagcaatattcttcccaggcctaaactctcagcctctggtctaagcagtcacttgagcctgaactcaactagtggtcagcatcagatcatggaataggatggtgtaagaggtcctggattagaagctaggctgagtttgtgaccagtctgtccaacttggcaaaaccccatctctattaaaaatacaaaaattagccaagcatggtggcacatgtctgtagtcccagctacttgcaggctgaggcacgagaatcacttgaatctgggaggcagaggttgcagtgagctgagatcacaccactgcactccagcctgggcaacagagtgagactatgtctcaaaaaaaaaaaaaaaaaatggagctgagggctgagctggcaggaaggggctgggcagagcaggggcatgcatcctgacataggcagcagtcagtggctgtgaaataagaccaaccacaggtcaaaggcaaggtcacagtctagattggaaaactggggctaaggtccagagagctgagttgctccagatggcacaggacagaatggaaagcaggcataccggtattggttggacattcaagctaacctaaatctagcttccagaaaagacaggttcacacatgtctattcaggatgttactaaggtatgccccctcaaatggttttaagcacttttcctgctgaggaagtagagagagggagccaggattctgcaagtgccacttgtaacatgtagcggggccaaatgtgattctctcccctcccacactcagtgctgtctagcccaaattttacaccctaagaagccatggatcattgagttcaaaacatactttctccatccaccccttgaggttaggttgaatgatttggatgcagacctggtgtttcaggagacaggttggtgacattaatggtaatatgcaactatgagttacaaaatcaacccatagctaatttcaacaaccagaagttgtggtgcctgagacagtgcccaactgccatggtaccgtttgttttgttccttgttcatattatgatgaagggattaagttgtgttggaattagcttcatctagacactgcagttcaagtctttcatcagtagctgcattttaatcctactgggtttaataacagtactaaaaatctttatggtatgtcatttaatcatcgacctttgcattacttcaacagcagccttacaagtaacaaagaataaatcctgtgcttgcctctaggttttccacagaggtagtgaaaagaactggattttcaagttcactttgcaagaggcaagtaggaaggagactgaaagctgctcgtaaatcagtaaatcagttgctttaggccggacacctgccctgtcagtctcagctacatccaaatggaaaaatgggtgatctaggattaccctcaggcgatgccaatggccaaggcactaaaaggtcacatctattattgctggcatttctttccccactgggctgttttttgagtggatgtcatactcatctcatacagaaggcatgtccatcatgctagagcagtgctgtcaatattagatctaatgaaatacaccctatttttcttttctgcaaacttcattatacctagctgccgctaaaagatgattccttttttccttactactccaacattacattttagggacatgaatccttaagcaaagtttcattcgccacctctgattttaaagttaaaatgagtcttttaaaaacattaaccaaaataaatggcacagtgagtgccatacccagaagtggctacataaagccactacataaacagtcaatgctcccttggaagaagtcactggcctttactaataatatcatgttcatcagcaaacaatttggcaagtgtgtagtatcagaagttgggggaggactagaaacacaatcttaacacacaaaaataaatgtggataaaaaagtgtagcaacagctgttgccagctgcaagcaaccacgcagtaaaatcctgtccaactctgcaggggactgtatgaggactcttggagcctgagacaggagtgacaaaagatcgcattgtaagaacatcgaacgtgaaccctggctagcaagcacccctaggaattaccaataggaggaattgagaacattgccaagaattcatcttccccagatcgaatcactgcataaaatcagccctatttgttctaagaagtccacattcataagcttcattctaactgagcttggttcttagcctataaggcccataagaactcctttggactctgtggatctccattttaaaagcgttattgactcgaacctggggaggtgtttttcctggagttctttctcaccagactagttctggctgcctcctgggtgatgatggaaaactgaggcacttgccaacatgtcatcccctcattttgcaaccctcaggcagttgcacaaaggctatgtggaactttaccaactagttaaaggcagagtccgggacagtcttaaaggaattaggactattacaatgtccaagtgttgcatattaaggaactccatcacagggccagataaactaggtgcaaggcgatgcaattaagagcctttcattcaacacctcttcactcataaccctggggttttgaaatgcagcgcctttcaagtcacacttgaaaactgttgcctaagcagcctctccagaattttctgattccagaagctaaaagagccctaagaaaccacaggagaagctgccctgcactccttctgtgggagtcactgaggacagaagagttacgtgatatcaaacatctttaagaggcctgaaaattcttcacttacttagagctaaacccatcttagaaatctgcttattgtatatgtttaggtaactctcatttgcctggagcaacttgaaaaaaaattttttagaaagtaaaacaggaaattcagaataagacatggccttgaccagctaaattaattgcccaagtaaccttttgcataaaggaaacaggatcaggaaggatttccattcaaaccttgctattttgccttcaggtaagaggacaggattcttttctaaaattttgctgtgaagaccctaataaataattttgcttttttctcctccctattctagaaatagaagggaggaggacctattttgttccatcctgtaggctgatcctttacacctaggactggaagaaataaggtagatttttgtggaaatgtagaatatgcattcaccagctacactggaatcaggaagcataaatcacaagtagcttggtctctccacagaaatgtggaaatggtaggccctgaaagagcctcagtagggatgcatgtgatagcttcatgagctgggcaggctagctgtggagatgcaaaaaccacagcatgcagcatgcattctctccaaagataatggtggtccataccccatctccagcacccatggacaaaatcaagccaaagttatagggtctgttttagggaaactacaatgactgttgtgaggtaatagtttcccacacgactaaactcttttgtgataataaagtaaaaagtaatgaaaaaaagttactgttagtttgattttataatttatcatagtgggaagaattcttgacccagagtttaaagacttgacattccacttttaacactttcatctgactttggacaagtggcttaattttctcatctgtgaaagcctctttcttccttttgaaatggaaatactgatatttgtttttctcagcctccgaacttcttaaaagttacaaattaagatcatgtgagtaaaaaaagtacaggagtaaaatggtctcattctattgggctattctaaaagaaactatttctatttctttctttaaaagcacctgttgtgtccttagtgtagaggctaaaaataaaaagattttttaaaaatcagaaagcacttgtaatcattccatttattccttccccatttattagaaaaaccccggggtgagggggtcagattatgtcccttgatttcaaggctgatcagctaatgtacatcatcaaatccttagaagctcagacatagccttgtgtcctccttaacacctggctgcattaaagtttcaaccatagcccacaaagttttctattagtagtagcacactcagtaaaaaataaaagccatcttttactgtgcatctgctatgtgtattaatcgttaatcctcatttagaaaatatttttaggtattttatacttattaacccagttttatcataaagaaacagcattactcaaagaaattgggttagacagatttaaaaaattttactgttaatgctaattcttaaaaataactgtgaaacaaaagacagtctagagactaaaggaacgttgtagatactacttcatcctcgttacatgtctttgtttactcttttaagatcagtaaagaggacctctataatgtactttttctgtgaaacctgcccttgagtaatgagtcgttctgcaaatcattaattcaaatagtgctcttgccacttttctttgatagatctactaagacaaagatcagagtaaattaaaatgacaatctcctgcaggcaacaactggtattgccagtactagaaggcatttagttattgtacctgtctttacttaatcatggctctgacttgagcatttgatttaaaaactactgcagagcaagtcaccaccctgtatttagcatactgacttaataattaaaagggtatcacaaaaaatgaatgaaaaaaaatttattcactggagttaggtactagtaaaagcattaaaaattcaagaaatcttatgggggaaatctaatttagaaaaacagtgagtagtttttgaagtggctgttgaagtgaatattaattcagtattcttcctaaaggagaaagcatgtcaagaaaatagcatttaggatttttaaaaatgtttgtaaaagtctacaaatatgtttttaatatattacctggaaatgtttgttaaaaacatagattcccaggtcttgcatgcagagattttgattcagtagtgttataattatacatcacttcagtataaataacttttgttcatataatccaatgcctaataggaatgcttgatagtgtcctaatcaggacccgccctcttcagaggtggctacttagctatttgtagtgaaatcaacacctaaagttttgttatttactataaaagatgtcagaaagaattttgtacaattagtggtatcaagagtagtaactgagaaggaaaaattttctggacccagaaaatgtcttgtatgaacaagacataggagtggagaagcccagcactcaaatgtcattgatggagtatgtgaggtctaagccccactgaactcagctgcctgacccaaaagaggtcttgatgtcattgatgtctgtttggagtgaacttttcatgcaaggtgctggttggtgagcctcacttgcggccagcccacctgaaattacaggcaaggcatatgactattttctggctgtttgtttataacacatgtacacttgggaaatttgattgttgaagacttgctttcactgaaatacacctcttggtaattagattgtgagggtggagtcatctaactcccagatacctctaacaaagctaccaatacttactaaaagagcttatttgttgatcatctaaactggccaagaccattcacaaaaataaaggattggttgagacacacacattgtattttaatatcacttcaggtgacactgaagcaggtgatttacaaaccatacattgggaaccactggattaagaaaagacatgtcattacaaatgtattttagaaatctaatctttgataaaaggatttaagagctaaaaaagctgatttcaggagtaagaagacatgtttttttaaccttaaaatgattttaggtagctagaacccccaaacagatgaatgaaggatgttactacaaggtaattaatagaactgaccttcacctcccttaatatttacacttgagaacttatctcttttcatatttacatataggatttagtttaatctacagcaaacatgtatctatgaagcaagtgtttgaatttcaggccacatgcaatattttcactgttttgttttatatcatcatctatttgcctgagagttaaaatcaaactcttttttttttgaggcttatgttgatcatttatatttgtgcagaattttattatttatttatttattttgagacggagtttcactcttgttgcccaggctggcgtgcagcagtgcagtctcagctcactgcaacctctggctcccgggttcaagcgattctcctgcctcagcctcccgagtagctaggattacaggtgcctaccatcacgcctggctaattttttctattttagtagagacggggtttcatgatgttggccaggctggtctcaaattcctgaactcaggtgatccaccggtctcagcttcccaaggtgctgggattacaggcatgagccaccatgcctagcagaattttatgctttataaatcattaatgcatgttattttctttttaggtgaaaaatgttacttaatagtgtcattatctgttctataagactcattaatttcccaaacagttatagaagataagatacaaatagtatgttctcaattttaaaaataaatacggggatagtactattaacttgcccaagttatccattcatgcagtagaagagattcctaattattagcataaaagttcactagatattctctgaatatcagtgtgtctttctagccagtaatttcaattagcatgacagtcaatgagatatacttaaaatttaatattttcaaaagcctgaaattgtaagacactgcgaatgtctttatgctgtgtattaaaatgattacatataaagagttgacttggttgttaataaaaaacacccattagcagatttaacaactgtgttaaaaataaaatgttccaagacaggaaataaaaggttgaaacttttctttagttacagcaataaaagccataaaagtgatggatttttgaaatttatatgtcaaaagttcaaactatatttgaagagttagattttgacacttacaaagtgtcaaaaatttgacacttacaaagatcagtgttctcattctcccagtaatgactgacagacacagacgggtcacttcattcctcccattaatagaactgagaggggaaaggctttttccttaatccaaaaacaaacatgagtatagcaaagctcattcacatgcccaaatatcaatgtaccacacaacctgagttcagatcagtgcacttgggtaagcatagtccctgataacattctgctcttctacatctttaaaaatatacaatagtttaaatttaaaatgaccatttaattattctctctataagtgtctattgagcaccactgttttccaggcatattatagatgaagagaacatggtggtgaaaaaaatgatcaaggttttatcatatcatagagatgccattttagagatggttatagacattaagcaagtaaattaatttcacaatacaagcaagatgtgacaaatgctatgaaagaaataagacagaatgatataatggagtgactgggaaaaggaggacatgtgaatttggagttcaggaaagtcatttctaagcaggagatatttgaggctatacaaaggtctgggtacagagcaatctggacagcaggacagcaagcacaaaggtcctaaaatgggaacaagctcggtatggatggagacaaatacaaacattggaaggaataaagttaccaacacagctttgttacaggtgatgagaaagcccaactgagagaaaatgatagctgtgaaatccagataacccatcctgccacttcagttgattaatcagaatttctagttgtctcaatgcagaaatgtccaggctaatatcaccattttccatgacccacttctccactggaaataagatttatcttgccaccccaaatgataccatctctagaggggcagggaatttaggaggcaatgtgagagtcaggccaaatttaatagtcaacaatgacattattttcacaatatatatttcctcattttagggaaaatatgaatcccaggaaagccacttattgttgtggaactctaagcattgtagagcagctctggctttttggaatttggtcctgccaaggtgtggatttttcctttcagtggcatttagcagatctcgtccataactaggcacggatggcactctttttcactttttgttccttttatagcagagagttattttctaagtacaaatttaaatttgaaactcaccataatttatttgcttccagaagagttcatgtttttgattttaaaatattaaaataaaaattagatgaaaagtatcaaaggaactagaagaacaaaagttaaaataagaaatactaaggctcttaaatataatttaaaactgatttaaatagatacttaaaaacactgaagaaatgcttttttgaaaaacattttagggtactaaaaaatatttagtaccctaaatttagtaccatttaatttagaaattaattggtgttaataaataaatgtaataatctaatatacataatatatgtataaattcaaattatatattatatactgtataatatataattatattatatactgtatataatatataattatatattatatactgtatataatatataattatatattatatactgtatataatataattatattatatactgtataatatataattatatattatatacagtatataatatacagtatataatatataattatatatataaatttaaattttatatatataaaatttaaaagtatatatatatatatatacttttagtttagaagagcagagtctgtgtagattaaactccttcttggtaggcaaaagtaacccaaagatcatcctggaaaagtatactgggaggaaactgttggtgaaagtgaagtgaatacaaaactaaacatcttgaatttggcatagattcagctgagagaagcaaaatttgtaagcagaaaaagaaggataaaggtaaatgggaagggtgtttggacttataaaggctcattaaactttatatcctttctctatataattttctgccagtacaataacacaccctgggtacataatgaaataaaaggtgataatagttagggtccagtgtcattctgtgcctaaaactttaaataaattgccattccatatggatgttaaagcattcatgtgacaaatcatcacatagtcgtgtaatgaaagggggttgctgtttttcaaatttgttgattaatagagtagttcaagctaaagttgctttttacaaagtatacaatattaggaggcaaattacctggcagggggtagcctgctcctgtcactccatgagcttccggagtgaagtaagcccaaggatgaagcctgactcttggtcatcttgagccaaaccaagctacatcacctaatccaatcctccagaaaatagaatcaactggaggtcagtggacaattgttgacagtggaaggctaagcaaatgtattagctttggaattacacagatctaggtttaaaccctaggcttatgggatataagcagccacttgcaagttttgtaactctgaggaggtgtcttcacctctgtaagcctcaatatttttttaatgtaaaacacaatttttttctttttccagaaacagagtatcactatgtggcccaagctggtctggacctcctaggtgcaagagatcctcccacctcagcctaaaacacagattttaatgcccaattttgttataataagaattaaataagttaatgtacgtaaagtttttagcacagcagttgatccctgttgggccttcaataaacagtactttggaaaaaaaaaaagaattctcttttaagcaatatcttcttatgcttactaaagccatagaatgggagcttgggcctcttcccactctgtgaatgttcatgaccacagcccactctgcatatgagacaacgaaccatcactaactgcaaaggagcaaacaacgtgtctccagtcagccttagtgaaaattgctcctgatccctctcttctttcaggggttgcagcagctcagacaatccttaccatgtgaaaggaggaatgactgtcatggcatgaaaaaagcatcactatggtagcttatttttccggttttcttttctttgagcatgtttagagctttgaacatgtagaactggccagagtctggcacatcctaatcagttttctttgccatcctgaaaagtcctgtgtaccttctcatcattcagttggcatcagttctcatcttggtccaggcttaacttgcacttaagagtattgtgagcataggaggggaattagtgtggcatttggtggaggtacagtgaagaagggaactggattaggaggctgaagtcttggcttcttggcttgttgccagttgtggcaaagtacctcaacatctctcaattacaaatgctaattcttactatatagcatttgtatgtatgtgtgatggtgaaataaaataataagaaactggtttataaattatatagagctattaaaaaataagacctttattcttgtagacctatttgatgtataaaataaatattgtgttatatttaactttaatattaataaaatcttctccatttatgaattccaatattgctccaaaatggactttattcttaccctgtatatctataaaatgtatcattataaataacatatattacaaatgattagtaatttaattatctgattttaaattaacattaagatactagttcagatcagcctgtaaacacacaaattattttcctgataaattacttttgcatatattgcttaggtaactaacaaaggtagagttggaaatcttgagtgtacaaagtatttttcatttagaaaatctaaagaattacatattataatattaagccatatcttctactaacatgagtgaaacaggacttggctttataaaatctaggatctgataattctcttttacaatataagaaaattaagcaattgaaactaacatagcccttgtagaattttttacaacaccttttttttagatatgtgtacttcctgataagcagagatgatgaaataatggcctattaaaagcaagtaagtttctataaaaacgcccaagcagggatttaaggcatctcctgcatgcacagttgcagttagttattccaggtattatttttgttttcagaaaaagaaaactcagtagaagataatggcaagtccagactggggatatgatgacaaaaatggtaagagttctcctgtttatatagatcaaaatgataacttgttcccatttccaacagaaaagatattaagtatttaaaataattgtacagctataggttaattgttgaactgtctgctttaaataattatactatctttgcatgtattcttagcattgtcttttggggcatggctgactacaaaatatgtttgatatatatatatacaggcatacctcagagatactgaaggttcagtttcagacccctatcattaagcaaatatcacaagaaagcaagtcacataaaatttggagttttccatggcatttacaagttatgtttacactatgctgttgtctattaagtgtgcaatagcatgtttaaaaaatctacataccttaattaaaaatactttattgctaaagtatgctagtgatcacctgagccttcagaagtattaatttttttttctttgacacagagtcctctctgtcgcccagctagagtgcaatggcatgatctaggctcactgcaatctctgcctcccaggttcaagtgattctcctgcctcagcctcccgagtagctgggactacaggtgcccaccaccacgcctagctaatttttttgtatttttagtagagatggggttccaccgtgttagccaggatggtcttgatctcccaacctcatgatctgccctccttggcctcccaacgtgctgggattacaggcatgagccaccacgcccagccaagtattaatctttttgatggtggagggtcttgcctcagtgtggatgactgctgactgatcaggatagtggttgctgaaggttgggaaggctcaaagttatccatgactttggaattaacttctttcaaactcctgttaatgttgataacttgaccttctcccatgaattacaaatgttcatgcagaatggtgaatcctttccagacaacttccatttcctttactcagatccatcataaaaaaaattattatctatgggaactacagccttacaaagtgtattcttaaataagatttgaaagttgaaattactccttgatccatagactgcagaatagatgctgtgttagcaggcataagcataacatcaatctccttgtacatctccatcagagctcctgggtgaccaggtgcactgtcaatgagcagtgatattttgaaaggaatcttcttttactgaggagtagagctcaacagtgggcttgaaaatagtcagtaaaccaggctgtaaatagatgtgctgtcattcaggctttgttgttccttttacagagcacaggcagagtagattgagtataattcttaagggtcctaggattttcagaatgttaaatgagtgttggcttcaacttaaagtcaacagttgcatttgaccctaacaaaagagtcaggctgtttttaaaactttgaaaccatgcattgacttctcctctctagctatgaaagtcctagatgctatctccttccaaaagaaggctgttttgtctgctctgaaaatctgttgtttagtgtagtcaccttcattggttatcttagctagatcttctgtataactgtctgcggcttctgtatcagcacttgccacatcacctcacactttcatgttatggagatggcatctttctttaaatctcataaaccaacctcgactagcttctaacttttcttctgcagcttctttgcctttctcaggcttcacagaattaaaaagagctatagccttgctctcattaggattcggcttaagggaatgtggttgttggtttttgatcttctatccagactatgcaaactttctccatatcagcaataatgctgctttgctttcttatcatttgtgtgtgcactggtgtagcacctttaattttctccaagaacttttcttttgcattcacggcttgactaactggcacaagaggtctagtttttggcctgtctcaactcttgacatgccttcttcactgagcttaatcatttctagcttttgatttaaagtgagaaacatgtgactcttcctctcactggagtacttacaggtcattgtagggttattaaacagattaatttcaatattcttgtctcagggaataggcagacttacagagagggagatagatggggaatagccagtcagtaaagtagttaaaacacacacaacatttacagattaagttcatcatcttacttggacatggtttatggtgccacaacactattataatagtaacatcaaagatctccatgatagatatatgaacaattaaaaagtttaaaatattgtgagaattaccaaaatgtgacacagagacgtgaaataaacacatgctgttgaaaatatgcccctaataagcttgcttgatgcaaggttgctacaaatcttcagtttgtaaaaaatgcaatatctgcaaagaacaataaagtgaagcgcaataaaatgagttaagcttgtattagaaatctattgctaataataaaatatgtatggtctgattctatagactatgagtatagatctatattagtagtattgacaaatacactattttatagtacaatatagaaaaggggccgggtgcagtggctcatgcttgtaatcccagcactttgggagaccaaggcaggtggatcacttgaagtcaggagttcgagacaagcctggacaacatgatgaaaccccatctctactaaaaatacaaaaaaattggccaggcatggtggcatgctcctgtaatcccagctacttgggaagctcacgcatgagaatcgcttgagcttgggaggcagaggttgcagtgagccaagagcgcatcactgcactccagcctgggtgacagagcaagactctgtcaaaaaaaaaaaaaaaaagagagagaaagaaagagagagagagaaagaaggaaagaaagaaagaaagaaagaaagaaagaaagaaagaaagaaagaaagaaaaagaaggaaagaaagaaagaaaagggacatcttcaaacacagaatttctattaatcttaagagaatatcatttaatacactgaaataaaccctaatctaataagcaaacaggtaactatactcctaaaacttggaatcaagcatttgataagacattgattttacacgtgtttgtcctggtaggtcctgaacaatggagcaagctgtatcccattgccaatggaaataaccagtcccctgttgatattaaaaccagtgaaaccaaacatgacacctctctgaaacctattagtgtctcctacaacccagccacagccaaagaaattatcaatgtggggcattccttccatgtaaattttgaggacaacgataaccgatcaggtgagctgaaagacccttctgatatttttttcttacagtctactgggaaaatttaaaaaatagtgctcgagaaatatgacacccattctaagtcttttgtgcttgtgtgcagcattgctgtaatctagtgaggcatcttggacttctggaaaacgcccaggtggtaaagacaatttttggaactcccagctctctattttcagtcttgcttctcaaagtcaccatcacgtctcttctcgtcattccagtatctgtatgctcacttcactgtctctgaataaacagcatttatccagaaaggtctagtgaaccagtcattacaaatataacaactaaaaagaaaaatattttctaattgggatgagtatgaatgagcacagtagaaaagaaaaacaaagcagtgactgaattatccttatactccagaatctagaacaaattttgctacagagttagcttttcatgaaggtttattgaatattttattaaatgacaattccataaaacagttctactgatttaaaatgctaaatttgtttatgagtttctgaggcctaaattttaggcaccttgggactatgtccattattaatattagattaggtctggtattatatgcatttaactaatattatcattggataggctctccaaacaaagttttataagtgccccactgccccactggtactctctcttggtccctggccagggattctcaacaaagctgtcaagatatacttttgtgtcttcatcagttacacagtaggtgatgaatggttcattactcaaaataaactactaaagatttttgatgcatactgtctttgttgaaagaatgaaggaataaacttgcaaattaaaggagattcaaggacagccctgtaatgatataattcactcacattgcaatatgctttctaggagttagaaataggtaaaattgtagctcgtgtggctgggaaatgtgtataattcatggaatagctcatcaatgccacagtcaggggtgcaccatacatatgactgtcatcctcatggatgtgggggaaaacaagatgaaagtttaggcactaatgtttgttttcacttctactcaatacaatttagtgttggtttatattaaatgcaaagataagctagagtttgtggagcatcaggctaacaatcggttcccttttcttccagtgctgaaaggtggtcctttctctgacagctacaggctctttcagttccattttcactggggcagtacaaatgagcatggttcagaacatacagtggatggagtcaaatattctgccgaggtaatgtaatttagtaagtgagagataattaccctgagagtactcccagaagcagcttctcccttcttttctaagacaacatcataatgactccaaaggaatgggtattccagtaaggaactcccagtttccattaaaatcaagcacagacacataatgtttggcaagagagagaaaattttcatgtggaaagaggcagctaaactcctgagcccaagattcacctttccctgagaatgcctcaaaagctgttaccttgatatcaaagctagcttcaaaggatgacactgctcctcctttaaagctgtaaccccaaatggaacacaccatcatttcctctttatttaaacgttcaagtttggatacaccagcagtatcgttgtggccaagccaggacaattcaatgagactctactaagagctcgaatttaaccacagcaatggtcacagaacagcatacacctagatgagggtctaaccttccctggctcttaacctgctctcacatggaagtttgtgacttatttcaggacattattatctgtatatccaaagaaaaatggagacatgtacaccaaactctcagcagagggtctgggagattaaaatgtgagaaattttgctctttattttaggtgtatgaattatataatacatgtgtacccatatatgcaggttgactttttaattttactttcatcaaatgaattctataatatatataattttgcaacctgctttttttctatttacccacttatcatgacaatttttaaaaatcagaagattgaattccaccttttttactgtcagcatagtatttcatttgggtgaatgcatcagaatttatttaactgccttctattgatgaacaatcacaacatatgatttttgttatattggtttcttttgcttttattaaaaaatgcttcagtgaatatatctgtacatatatcttgtgcactagtgaaagtaattatgtacgatagatttttccagggcagactgctacgttacaaagtatatgtatcttctattctgatagaacatcagcagattgtatacaaataaaacttgctttaccttgtgttgtaaagcatgactaacacctttcaatgctgcagaaatctgttaattgggttttcccctccataaaattgaaggtagattaaaattaaatggactaagagcctaaattagtattatctttttggaaggatagttggtagtatccaagaaaactaaattagtgactctctcatctaaattgagaaaaatcaatataatccatgctagatattgagagacacttagccacaaagtttagcatatgattaaattcagttcaataaaccttcttgagatacctataagacaataggtttgagaggcaatgcagcctgttgcttaagaatgcaagtacccagctgactgccagggtttgaatcaaagctcgaccacttactagctgtacaaattcaaacaaatcactctacgctccagtattcctatatagagaatctagataatatagcattagtatctatcttaataattgttgacagcatgaaaagagttaacccatacagagcacacttagaccagcacctttcatgttgcatgtgctgaataatgttacttaacatttccgtagagacacaagcaaacatttttcaagcagggaagtataggcataaattattgtgattaaataaatatagtagcaaatggcagtatgactattcacaaagaagcataggaatacagatgtaagaataattaattacaagtagggacagaatctacactggcatggtcagaggaaattgcaataagtgatccctcttaatatactgtcttaatcattcttttttcattcaacaaatattcactggacacctacaatatgccagatactgtctttattttttgtcgttatttatttatttatttttgagaaagagtcttgctctgttgcccaggctggagtccagaggcacgatctcggcttactgcaacctcctcctctcaggttcaagtgattctcctgccccggcctcctgagtagctgggattacaggcatgtgccaccacacccggctaattttgtatttttagtagagatggagttttaccacgttggtcaggctgatctcgaactcctgacctcgtgatccgcccgcctcggcctcccaaagtgctggaattacaggcgtgagatactgtttttaaaaagtacttgctatcagaacttgcatttgatagggaaaataaaaatttcagaggaaggaaggcaggaaagaagggagggaggaaggaaggaagggagggaggaaggaagggagggagggaggaagggagggaggagaataggaagaagagagattaaataagtgatatggatagaactgttttgatttgtggtggttactttatattggatgatcaggaaagaattatttaaggagtggcatttgagttcaaccctaattcaagacaaaagtctgccatttgaagatcatggggaaggaaattccagagaaaattagaagctaatgcaaaggctcaaagttgtgaacatgtgacgaagtataacctgtaagatgtgaatgttgataggtggggaaagcaagaaatgaatgatagttgttgtacttattgattgagcatttaaaaaccttatcctaagaaggtaaaattaagcaggtttggcaagaaggaaatctagagttctattttggccagattaagtctgaaacatctattagacatccatgtagagatatcaagaatatatcaagaatacatatatacatacttggatgtacaaatctagagtttgcagagacgttaagctggagatatttatttgagagatgtttggaaagggcacgaacgtgcctgaaagaatctgttcttggccaagactcccaggaactccaggaaccctttctcataaatttactataaagtacctcatgtgagagaaaattacttcaattattttcccaaaaactagttagtcatatttcctgatcttttcaaaacaaagagagatacatttaaaggagtaatattaaataacaatatcgtaggaaaggacattttgcttactggttccaggttttgtaatctctacctggcacacagataacccttcctacgagtgagaatgtaactcttctaatccactggataaaggttcacataagttttatgtatctaagccaagatacatcatcatatggtaacaagttaacttataacttatcttttttcatcacactggtataaataattaattaaccatagtatcatttttagcttcacgtagctcactggaattctgcaaagtactccagccttgctgaagctgcctcaaaggctgatggtttggcagttattggtgttttgatgaaggtgagttacagataattacacagctctgcttccactgtcttaccaattagacctcaaaatagaaggaaataaggcaacatatattttagaatttcttattttaaagtttccatttaaccgatgactacaggtgaacaaatagttccctagtattttattgcttggttttatctctgcttttccctcttaaagagagaaatgagtttcaggtggaggtgagatagaaatgtgttcacagggaaaaaggaatttctattttccagctcttccaaattccctttcctctaaatttcctacatcatagattctgaaatttattaatttaatgtctcatcaggaaagaaatattattaaatattaataaggaaacctgaaatcatagattcagaaatttatcaatttaatatctcattaggaaagaaatagtaagagaattttttcttacaaagaatattcaattgattttttaaatgggagatgttgctcaaatcctctatagaagaatccctgaaaagttctatgaaaaagttattattaaattgggtatgcccgggtaaccaagtaactcttgaaattatagcacttctacttaacctttactgagcacttacaatatgccaaatactgtagtaatgaaaactaatataacagaccaaaataagagatttgtttttgtgtcagttttgataaattactagattttgccctgtataactttgaacatattgccaataattaagtttaaatcaaactttttgtttgctacttttatctgtaggtacatattataaacaatttatagagtacaaaggccctcaaagacatacagcttgaaaaatctccccttctaaagcagagagaaaataccttacctcttgtcagttgttaattgaaaaaaaattcaaaatttagctaagcagtgttcgattgataataatctttatctcatactttattttcttaaatctccaggttggtgaggccaacccaaagctgcagaaagtacttgatgccctccaagcaattaaaaccaaggtaaacacactaaataagtagtttaaatcagagaacaagaatttacagatctatggaaatcatttaatgaagtattaaaactggggagtaggaaggccatagtaaaagctaccaactgaaaatcaaggtgctacttcaatactgcctacctctgagaaagtctctaatgcagggaattgttttggttttctgtttttcatagttatggtttatttatttcagcagaatatggcctgtagaaaaccagattacatagccatttaaatttgcttgaaaaactatatctaacaaaattgtgattttccatttgataaataaagatatctctagttttttagcagtagaaaaattcagaagtaaagggcattcttttgagatatggttgatatacaatctttgataaccataactcttgtcaactcaaaaaaaatggattttttgatatatacaaacttagctttattgttttaaaggtaagcagttaaaccataaatcagagatttgtcatgttttgcagcatggagaactgtcatatatttgtgtaaaatgaatctgatttatgctgattctagaaaagattaaacttaaatgattgtcttataaagtataaatgacagagataaaaaataagccctcaactcaagagttatcaaaaaaatatgaaaagaaaatataaggaaataattagtgaagataaaagcagaaaagaataaaataagaaagaaaaatgatggccgggtgtggtggctcatgcctgtaatcactgcactttgggaggccgaggcgggtagattgcttgaggtcaggagttcaagaccagcctggccaacatagtgaaatcccatctctactaaaaatacaaaaaattagctgggcgtggtggcgcacacatgtagtcctagctaatcaggagattgagccaggagaatcgcttgaacccaggaggtggaggttgcagtgagccgagattgtgccactgcactccagcctgggtaaaagagtgagactccatcttaaataaataaataaataaataaattttgaaaagaaaaatgatggctaagtaaggggtaaaattttatcaataaattgaaaagttgattctttggaagaacaacaaaaaagtcagactttggggaagctggataaagagaaaaaaagccgtacatataaaacattattagaaataaataggttgtgactaaagatatagaagaaaattttaagagacaaaattttttataacattatgccagtaaatttgaaaatttagataaaatggataattttccaagaaaatgtgaaataagggaattgactcaaaaggagttagaatacctaaatagactgagaacctaaaagtaaatttaaacaatagtcaaaatgtatctattaaacaaaaagactaggcccagaccacttcatggaaaagggttactcaacttttaagaaacaatcatgccagtgttaactaaagtgcccagatgaaggaacagacagaaaacttcccatcaatttaatggaatctgataccaaaaccaggtatgaaaactacaaaacagacaaacaaaacaaaaaacataggataaactttcttaggaatatagctaaaggaaatcctaaaatttattataacaaatcaaattcaacagtgttttaaaagagtagtttctgaactagtagagtttatcccaaaaatacaagaatgactcaatattagaaaatcttaaattaattcattatattaactagttaaaggtgaagaaaacctcatgatcaacttgttaaatgcttaaaatcatttgataaaagttaatgccctttctttaggatgaaacaaaatgaaagaaaactgtctgaaaacttattgaatttgataaagaatttacctagaaacttgtatcaacatttaacttcatagtgaaacacttgaagcatttacatttcagtcagggacaagacaaaagtgccactgtgaccatcacaattgaaaattataataagggtcctagtcagtgcaacaaaataatgaaagagtacatattatgatagatatcgaaagagcaaaaacaaaactatcattatgtgcagttgatatcatcactaacatccacctgaaaactccagaagaatcatctaaaatacagaatgcataaaagattagcatacaaatatcagtatatttcctacacaccagtaacaatcagaaaagacgataggaataaatagaataaaactgaaacaaccaatatgcatgtcaataaagatttttgccattgaaatagaatctggcatcattcctagagaaaaaaataaaagctttatactagaaattaaatatgttttaaagatatagattgtaaaaaagatttttgaatctttgcttatctgcaaccaaatgaagaaggaagacgtcttggtcaaaaacttacatataacacatttttcatctttttttcttctgttgatattattgtttatatccacaaacacgccagtcatgaaatactaaatagtagaaaaatcaatgactcttagctaaaatctctaaataatgtataacaagataatatagcatatatatgtcacatatattcatataagtattttatatcatgctgtaatgatgtattcttttcttccagggcaaacgagccccattcacaaattttgacccctctactctccttccttcatccctggatttctggacctaccctggctctctgactcatcctcctctttatgagagtgtaacttggatcatctgtaaggagagcatcagtgtcagctcagagcaggtagagttgtgaatgaatgggaactgggaatgcgtagcaggaatattactttaattgatagtatcagtgagagagattattatttcagtcagctttgtgagaagttcatttttcctcccaacttaaaaatattaatttggggacataggtttattaaactatccaaaaatgcattataatactttattttgcctttatgcagaaaaaaaatgactcccgccactctttcctccttaataaggaaaagtccaaccttgttaaatatcttcttaagcatttcagaaataaaggaaaaactgtgactggacatttcaataagactttggggaattgtggctcccagctggcataccttgatagttggcaaaatatttttgttccttttgtggagcttaaacttttaaatattcaacaaaatatctcattaactgttgttaataatggtgattatagtaagtatcattcattgctctaccatgtttattacgtgccttacatatgttttattagccaattctcataacaaacctacaggacaagcattgtagcctgttgctaactgacatttattgagcacatgctatgtgtcaagtatcattctaagggctttgcatgtattaacccatttaatcttcacaacaacacagtgaagtaagtacttatggaaactaaggtaccaagctaataagtcgctcgcccaacgtaccccagctgaaattaaaaagttgatactttaacccagtcatcaataattaaatcaataaaataaagcaaataattaaatttgctttatttaattgatttaattaaataattaaatcaataattaaagcaaaatgcctggttcaaagaaatgaatgtaaaggatttggggctttctctcttcctattagtgatattactgcaatttctaactcagttttctaaatatcagtgcgttagtaatcctgtaaataaaacgctttatgtaactttaaaaactttttatttttaaaatattttatccttctagctggcacaattccgcagccttctatcaaatgttgaaggtgataacgctgtccccatgcagcacaacaaccgcccaacccaacctctgaagggcagaacagtgagagcttcattttgatgattctgagaagaaacttgtccttcctcaagaacacagccctgcttctgacataatccagtaaaataataatttttaagaaataaatttatttcaatattagcaagacagcatgccttcaaatcaatctgtaaaactaagaaacttaaattttagttcttactgcttaattcaaataataattagtaagctagcaaatagtaatctgtaagcataagcttatgcttaaattcaagtttagtttgaggaattctttaaaattacaactaagtgatttgtatgtctatttttttcagtttatttgaaccaataaaataattttatctctttctttctgttgtgcattcagtttctaaaaccattaagtttctactccatttacattcaaaaatcttaaatactttacttgcaagagtattttgcttcaaatacaacaacctaagagcagctggagatgaaatattgggaaattcatttgcttactcctgaagacaaaaatatagctgagatgaccactggatttaatatcgttatgctggcccaacattgctaccatttgtgttgtctgtgatcaaaatgattatcttttatataggaagatgacgcttctggatattgctttcacttcttctccccacgttagcaaggacaatgcttctctgccattattacaactagttagtttgcatggagaatctttactttaaaattggaagaaaagtcacaagtgaatggtttataaaaatgctaaagaagtcattcttgcttagaatcatatagaaacatcatgcaatcttttagtcagatgtgcgcttcaccttatgctatttttatctttaattgacacacaataattgtacatgtttatggagtatagtgtggtgttttctgtttgtttgtttgttttttgagacaaggtctcactctgccagtcagggtggagtgcgatggt

SEQ ID NO: 657 - DNA, 6699 bp, Homo sapiens
atatgacactggcagattaaaacgctctgatggggaagggcttaaaggctgagtcaaaagccaagaagtctctttatttacgcctacctcccagcccttggcaatctgactaataacaaactgagctaacaagaaatactagaaaaggaggaaggagaacattgctgtagcttggatctacaacctaagaaagcaagagtgatcaatctcagctctgttaaacatcttgtttacttactgcattcagcagcttgcaaatggttaactatatgcaaaaaagtcagcatagctgtgaagtatgccgtgaattttaattgagggaaaaagggacaattgcttcaggatgctctagtatgcactctgcttgaaatattttcaatgaaatgctcagtattctatctttgaccagaggttttaactttatgaagctatgggacttgacaaaaagtgatatttgagaagaaagtacgcagtggttggtgttttcttttttttaataaaggaattgaattactttgaacacctcttccagctgtgcattacagataacgtcaggaagagtctctgctttacaggtaagatgaatgtttccaggcttttcttatacttatttttgcattatagtaaagtgattgaatttgtatgttcgcttcctttaaataaacaactttgcattaaaggatactcaatttcattcttgcttactggcacaactaacactggagcagatgcctgtattctctgagaagcagacatttagtctaacagctggctacagagaagaacaaatataatattccactatttcttttgcaacatgcagtttgttgttagaaactaaatatgtgtgctttctgaaggaaggatcacttccaaatgcgaatgttgaattgcaaatataagcagaatattgaataattctttgcattttgtatgctacttattttctgatttgaaaatacgtattctcagaaaacatgtcaatgagtatcttttgacctctttaccactgtatcagatattgtcagtagagaaccacttttcacatctgtgtgtgtttctgaaaagattagaaactgtttcctagcacgttttgaagagcataaaattcatacaggatttacaaaataacaagagtttatcactgaaaaattatttactattttctctgatgctatacctggtgaaataaatcttattctttcttggtaatttatgaataagtacttttagtgattgtggaagctaatccacaagttgaagactccaactacaagctgcttgtttataaactcagcacacaaagctgtttaaaatcaaattatttacctacagaaaaataaaatcttctaactttccctttacacagaggcagtatgttgttttgtttcttcagttgccttttgcctttcaggaactttgtactatatgtgttttcaataaaacactatgttttcagggaatgcaagtttactttcaggattgttgattgggttctggtatgttttacctgattgtgaattttaatttgattcagttactgttcatatttcaaacaacaaaaatgaaaactgattactattttgaaaagttgaatagtcataagatgtgtttatatttcaatttagtttatataagtttaaagtataatatttaaaggaaggaaataaaattagatctcattagagctataaatgtttaccttgcataactgtcatttaaagggcaaaacctttttaagaattgctgtttcagatgcatttgttatgtgtttcaggattagaatacgtgatgttattctgaaccatcctttttttcttttactgaatttgaaatatcatcaaaaagtttaatatggtacagtttgtttcagatttcattgtttgcgactttaagccttttaataaaggcttaaagctgcttaattatgtgatgacattccgtgccctaaagactgtttcaagacctcattaggaagtcatttgctagaagtttatatgaagcattgtttattcttttacaacagcctgaaatgtgtgttaaagattaatcttgcttctttagtttttatcatttccacctcatctataacgtaattaagaagcagtaagcaatatactgcttctagaaattcaatattaaatataatgatttaagtgaaatttgaatggtcacacttaagtgtatgtatctgatactattacgcttatacaaactacccttgattgaatagttaaaagagttcttatagtactgtactttataacatgatcaaagacgcattttcctcaaggttttcaaaataaacaataaaattagtatatatatatatatatagccaaaaccgaagcaggttaaaacacagacacagttattagatgttattgtgtgacacccagttcaacaatataaagacaatgcatgctacatgcgtacatgcatacacacatacacatatgcacacatacattcttttatcattttttacattccctacagttctctatgcttacggctaataactatgtaattgtcttttactataatcctccagccttaaatgtatgaccataaggttaaaaaatattttcaaatatataactttgcatcacagtgaagtatcagtgctctaaggcagcatctctctcatctgttaaaatgcaggttattcatcagatgtgagcacaaattttatgatataatattttaaatcccccttgacctaaattttatattttgaacacaatgcaagttaaaagtcagccagacttgcctgtctgagtattaggaaaaaaaaaaaagaaacaaatgatgtaaatgcagcaaggtacccatattttcatggtaatccgtcatttgctttttggagaaaaacctattattttgaaaatatcagcttcatctcctccccagttctgcccactaaagtcccttgctattgcgttttattttacagaatcggatttcatcacatgacaacatgaagctgtggattcatctcttttattcatctctccttgcctgtatatctttacactcccaaactccagtgctctcatccagaggctcttgtgattctctttgcaattgtgaggaaaaagatggcacaatgctaataaattgtgaagcaaaaggtatcaagatggtatctgaaataagtgtgccaccatcacgacctttccaactaagcttattaaataacggcttgacgatgcttcacacaaatgacttttctgggcttaccaatgctatttcaatacaccttggatttaacaatattgcagatattgagataggtgcatttaatggccttggcctcctgaaacaacttcatatcaatcacaattctttagaaattcttaaagaggatactttccatggactggaaaacctggaattcctgcaagcagataacaattttatcacagtgattgaaccaagtgcctttagcaagctcaacagactcaaagtgttaattttaaatgacaatgctattgagagtcttcctccaaacatcttccgatttgttcctttaacccatctagatcttcgtggaaatcaattacaaacattgccttatgttggttttctcgaacacattggccgaatattggatcttcagttggaggacaacaaatgggcctgcaattgtgacttattgcagttaaaaacttggttggagaacatgcctccacagtctataattggtgatgttgtctgcaacagccctccattttttaaaggaagtatactcagtagactaaagaaggaatctatttgccctactccaccagtgtatgaagaacatgaggatccttcaggatcattacatctggcagcaacatcttcaataaatgatagtcgcatgtcaactaagaccacgtccattctaaaactacccaccaaagcaccaggtttgataccttatattacaaagccatccactcaacttccaggaccttactgccctattccttgtaactgcaaagtcctatccccatcaggacttctaatacattgtcaggagcgcaacattgaaagcttatcagatctgagacctcctccgcaaaatcctagaaagctcattctagcgggaaatattattcacagtttaatgaagtctgatctagtggaatatttcactttggaaatgcttcacttgggaaacaatcgtattgaagttcttgaagaaggatcgtttatgaacctaacgagattacaaaaactctatctaaatggtaaccacctgaccaaattaagtaaaggcatgttccttggtctccataatcttgaatacttatatcttgaatacaatgccattaaggaaatactgccaggaacctttaatccaatgcctaaacttaaagtcctgtatttaaataacaacctcctccaagttttaccaccacatattttttcaggggttcctctaactaaggtaaatcttaaaacaaaccagtttacccatctacctgtaagtaatattttggatgatcttgatttgctaacccagattgaccttgaggataacccctgggactgctcctgtgacctggttggactgcagcaatggatacaaaagttaagcaagaacacagtgacagatgacatcctctgcacttcccccgggcatctcgacaaaaaggaattgaaagccctaaatagtgaaattctctgtccaggtttagtaaataacccatccatgccaacacagactagttaccttatggtcaccactcctgcaacaacaacaaatacggctgatactattttacgatctcttacggacgctgtgccactgtctgttctaatattgggacttctgattatgttcatcactattgttttctgtgctgcagggatagtggttcttgttcttcaccgcaggagaagatacaaaaagaaacaagtagatgagcaaatgagagacaacagtcctgtgcatcttcagtacagcatgtatggccataaaaccactcatcacactactgaaagaccctctgcctcactctatgaacagcacatggtgagccccatggttcatgtctatagaagtccatcctttggtccaaagcatctggaagaggaagaagagaggaatgagaaagaaggaagtgatgcaaaacatctccaaagaagtcttttggaacaggaaaatcattcaccactcacagggtcaaatatgaaatacaaaaccacgaaccaatcaacagaatttttatccttccaagatgccagctcattgtacagaaacattttagaaaaagaaagggaacttcagcaactgggaatcacagaatacctaaggaaaaacattgctcagctccagcctgatatggaggcacattatcctggagcccacgaagagctgaagttaatggaaacattaatgtactcacgtccaaggaaggtattagtggaacagacaaaaaatgagtattttgaacttaaagctaatttacatgctgaacctgactatttagaagtcctggagcagcaaacatagatggagagtttgagggctttcgcagaaatgctgtgattctgttttaagtccataccttgtaaataagtgccttacgtgagtgtgtcatcaatcagaacctaagcacagcagtaaactatggggaaaaaaaaagaagaagaaaaagaaactcagggatcactgggagaagccatggcattatcttcaggcaatttagtctgtcccaaataaaataaatccttgcatgtaaatcattcaaggattatagtaatatttcatatactgaaaagtgtctcataggagtcctcttgcacatctaaaaaggctgaacatttaagtatcccgaattttcttgaattgctttccctatagattaattacaattggatttcatcatttaaaaaccatacttgtatatgtagttataatatgtaaggaatacattgtttataaccagtatgtacttcaaaaatgtgtattgtcaaacatacctaactttcttgcaataaatgcaaaagaaactggaacttgacaattataaatagtaatagtgaagaaaaaatagaaaggttgcaattatataggccatgggtggctcaaaactttgaacatttgagcttaaacaaatgccactctcatgcattctaaattaaaaagttaaaatgattaatagttcaggtggaagaaataagcatactttttgggttttctacacattttgtgtagacaattttaatgtcagtgctgctgtgaactaaagtatgtcatttatgctcaaagtttaattcttcttcttgggatattttaaaaatgctactgagattctgctgtaaatatgactagagaatatattgggtttgctttatttcataggcttaattctttgtaaatctgaatgaccataatagaaatacatttcttgtggcaagtaattcacagttgtaaagtaaataggaaaaattattttatttttattgatgtacattgatagatgccataaatcagtagcaaaaggcacttctaaaggtaagtggtttaagttgcctcaagagagggacaatgtagctttattttacaagaaggcatagttagatttctatgaaatatttattctgtacagttttatatagttttggttcacaaaagtaattattcttgggtgcctttcaagaaaattaaaaatactactcactacaataaaactaaaatgaaaa

SEQ ID NO: 658 - DNA, 18233 bp, Homo sapiens
gcgtgaccagagcgcgctggcccggcccacccggggcggttgtggtcgctatatataaggtggggaggccgccggcccgttcggttccgggcgttaccatcgtccgtgcgcaccgcccggcgtccaggtgagtctcccatctgcagagacgcggacgcgccggcccgcagttggcctgcggagcgcggtggacggtttggcgcccaccaggcgatcaatactttggatttttaatttctagatttggcaattcttcgctgaagtcatcatgagctttttccaactcctgatgaaaaggaaggaagtaagttttaaaaacaattgaaaatcttgactaaagttttcatttttaaagatgaaaagatggcacagattttgaacaaagtataaaataaatacagttgttttgctgtgtttcaaatgtttcatattgaagtgtccaaatgtgtcccctccacctgttatttgttagctcattcccttggtggtgttcatgactgtggcggcgggtggagcctcatctttcgctgtgtattctctttggaaaaccgatgtgatgtaagtaggtctcaatttataaaaacgtttttggcagtgtttggatgacttttagtttatgaaatgtataagtttcctatttttttcccatggatgagaatgccaaattgtgaactgggagtcagggttaaaaagcatcttttatcagaaaactcttatgatattgtctaccaatgggtcagaaaatgaaaattagaaaaaaaaaagaaaaaatttaaaaaaacccatgatattaatcaaattagtttatttcttgtgtttattcttttacccattggcccttctccactctctggcagtgaagtaaagcttgtttttttttttttaagttttgaaatttaaagttcttcagtggttttgggagatatatatcatgaaacaatcattttaattaaaattttaaattttagcttattagatttttactaatgtggtagaattgatagattcagttgtctacgatgaacctaatctcaactttgggtagaagaaagtaaaaaacaaaaacatgtatcctggaatatgaggaaaagataaacttgaaactgttggaggctggtgcagggctggagagggcagtcctctaaccgctggcagaggagcctagagccctggagttcaccacctgcagagttcaacctgcccctcccacagactgagataagaacattattgcatgtccttggcttggcagtttcactcccatggttatttggtttgtgggatccttccccaatgcagcccaatcaagagaatacagacctcctaccctttaggggaactgatgtttaatgtttgagccacaccatgaaactcccttagagaattttcaatcaattttagttgctactgatggttcctgatcattagcagacacatgccttagtatgagactggttttgtccctaacatgtttataaacccagtatcagtgttggtttaaattcacatcttttaatgtttaattggctttctttaattttagccttgatcgaaaaaaaaatccagaaccttgggaaactgtggaccctactgtacctcaaaaggtattgttaaattaaaaacaaatgatttatattttgcccaaaccttagcacctttgtgagcaaaatagatttagtaccttacccttattgtgtaacttagatcaattgtgccttcatcgagtaattaaaatgaggaaattttaagagcctactctatgccaggagcattgtccatccactcatgagaagcatatacacttttggaactatggctcacataatacctggcaaacttaaaaatctggataccggccaggcacggtgtctcacacctgtaatgccaacactttgggaggccgaggcgggtggatcacttgaagtcaggagttcgagaccagcttggccaacatggtgaaattccatctttactaaaaatacaaaaattagctgggtgtagtagaacgcacctgtaaacccagctactggagaggctgaggcacgaaaattgcttgaacatgggaggcggaggctgcagtgagttgcagttgtgccactgcactccagcctgggcaacacagcaagactgtcttaaaaaaaaatctggatactgctaagtgaaagtagggcacatgtgtttgatctttccctctgatctcataacacttaggagcccaagggctttgtaaaaagatggactgatagaaaccagctcacattactattttgtgcatgttttagatatggaaagaggtaggtacaaacacaatggtgatgctttttctaaaggggagtgtggacaaatccgaaagagggacatgcaaatgaaagtcaaatttttaacaaaaggttttttttttttccttttttctcttcagcttataacaatcaaccaacaatggaaacccattgaagagttgcaaaatgtccaaagggtgaccaaatgacgagccctcgcctctttcttctgaagagtactctataaatctagtggaaacatttctgcacaaactagattctggacaccagtgtgcggaaatgcttctgctacatttttagggtttgtctacattttttgggctctggataaggaattaaaggagtgcagcaataactgcactgtctaaaagtttgtgcttattttcttgtaaatttgaatattgcatattgaaatttttgtttatgatctatgaatgtttttcttaaaatttacaaagctttgtaaattagattttctttaataaaatgccatttgtgcaagatttctcaaagattaggtatatatttaaatggaagagaaaatatttttatgggagaaaaatacatttgaaccatgaaatttcatcttttaaataacatccagtacagatttctgtgtaagcttttttttccaagttcattcattcactagtagtttattgagcatctactatttgcagtatagctaacaaagccaaaatttggtgggatacgaataaaagatggtaagtacaatgaggaaaatgaagtggggatgaggttggagactcgcatgaggactgaccttggaggaagtgtaggattctggagatgaattggaatgcaaggcatactgagatctgccctaaagatgccaagccaggctgggcgcgtggctcacgcctgtcatcccagcactttgggaggctgaggcgggcagatcacaaggtcaggagattgagaccatcctggctaacacagtgaaaccccgtctctactaaaaatacaaaaaattagctgggcgtggtggcgggcgcctgtagtcccagttactcgggaggctgaggcaggagaatggcatgaacccgggaggcagagcttgcagtgagctgagatcacaccactgcactccagcctgggtgacagagtgagactccgtctcaaaaaaaaaaaaaaaatgccaagccatactgtgatgttcctgtggaggctagggagaggaagatggggagccttgccagcgctcttcagagtttggggccactcttccctctggccaatggtaacttgaaggctgaagatacattcatatccagcatgccgctgggctcccctgcctgtccctaaaaatgaaataagaagaaagttgcttttcattaactttttttaaaaaaatggagatataattcacatgtcatagtattcacccatttaaattgaacaattcagtggtttttagcgtattcacaaagttgtgcaaccatctccatctactttcagaacatcttccttaccccagaaagaactctgtaccattagcagtcatttccctagtcccaacccctctgctcccagccccagggaaatactaataaactgtctctatggatttgcccattctggacatctcatgtaaatggaatcaggcaatatgtgacctttgggtttggctcctttaacttggtatagtgtttttaagagtcatctatgttgtaccatgtttatattatcagtatttcattactttttctgacagtactcttccagtgtaaggatatgccatttttgttcattggtaagttgatgaacatttgggttgtttctactttttggctattatgaataatgctgctatgaacagccatgtacaaatttttgtgtggccatatatttttggttctcctaagtaggtacctaagttcgttaacttttttttttttttttttttttttgagacagggtcttgctgtgtcacccagactagacaggctggagtgcagtggcaccatctcataaactttgcctcctgggctcaagcaattctcgtgcctcagcctcctgagtagctgggattacaggcatgcaccaccaccacacctggataatttttgtatttttagtagaggcagggtttttgccatgttggccaggctggtcttgaactcctgacctcaagtgatccaactgcctgatcacttgaggaaaggagtgatcccttccctccccattggatcatggctaacacccctataacaaaagacaggttaactagaaaaagcataacacacttatagtttacttgacatggtagccttcagaatgaagacccaaagatatagggaaaactgttcatttttatgcttatgttcaatgaaaagtcgatgtagaaatatgattggacatgtagaaatatggacaaaaaggatatggtcctaatgctatcagaatagactacatggggaagctcaccaaggcctgtctgcagcatttccttctgctgggtgtgggggtgggatccctctggaatgagtgtcttaatttctttatggccagctgttacatagaaaggtgggggaaatttaagagcaatatatttaggttttatggctggctttcaggaaacgggattctggcttctatggccggtcttggagaagaggaattctagtttctatggctcacctggggaagaatcagggtcaacagacaggagggcagagaaactttgcttctgcggccttcatttggggtatcattttttgggctccagcgttaccttcacagcaataacaaataactaggttttgccaggaacttggcaactctgagaggattaaagcaagactgctgccaacttctgttgcttccttatcacctcaagtcgtctcagattaaagtctctgatagttgatctcaaggaattacacgtagcaattgggaagcacatttttatttgcttaagcttctaaagtctaatgtaatgtcatttgcacaaataaaaattaacggttggtcaactaagagagcaaagtatagagtgtttttcaagggatgactgtggctttcaactttaaaacacaaacctgattgaaatgtggtggtgtgaacatggcaatgggaggtacttttctgcaggtttaggagggagagaggccaaaagcaatgttgatgcttaaatttcaaaagatttgggttttgttgttgtgttcttagcatttccttcaaacattttattttgaaatttttcaaatatgcagagaagttgaaagttactcacacttcttatcaattaacattgtgccacatttgctgtatctccctgtgtatgtatgcttttcaaaaattaactcgttgaggccaggcacagtggctcatgcctgtaatcccaacactttgggaggctgaggcgggcagatggcttgagcccaggagtttgagaccagtgtggacaacatggcgaaacatctccactaaaaatgcaaaaattagccaggtgtggtggcacacacctgtggtcccagctacttgggaggctgatgtgggaggatcacctgaccctgggaggtcaaggctgcagacagccttgatctcacaccactgcactccagcctgggcaacccaagtgagaccctgtctcaaaaaaaaaaaaaaaaaaaagtgttgagaacaagttacagacatgaggcttttttccctaaaaatttaagcatgtactcactgcctaagataaaagacattgtagctgactagaataccattatcatccctaagaaagttaacattcattcaataatatcacctatcataaatatgatagtgatatcataaatatcacctttttttcctctaattgtctcaaaaatatcctttatatctgtattttaaaatccagaatcatctactccaaggtttacttgttgcatttgtctaagttgtactgagtacttgactgacttgtggtcatgaaaatgactccaaagcagcttttatagaacggccatctctacagataacgagaacattacccggataacattctcttacatgcagactttacaattttttatttacaatctaataatgatgtattttcatgtagtttataagaggttgtacaattgatgagcactcactatgtgctagacgctgtgctggccttgaggctcttacagcttaggaaagggatacacacatgtaaacagcatgagagcaatgccaggacaataaagcaaggacaggagtaggcacatggtatgaaggaaagcttcccaaagaaggtggatccctgaaagtctacttcggctgatttcttgaaaaaaaaaaaaaaaaaatcatcatcattacaagtcagcaaggcaattgaagtagaggcacatttttaccaagacagagccacctaaagtagcatggtgtctcttggaaacttggagtagattaatacagggaatttttttttttttttttttttgagacagggtctcactttcattgcccaggctggagtgcagtggtgcaattacagcccactgcagcctcgacctccccagctcaagtgatcctcccactcagcctcctaagtagctgggactataggctagagactgagtttcggcatgttggccaggctggcctcaaactcctcgcatcaagcaatcctcctgccttcgcctctgaaattgctgggattacaggcataagccatcctacctgaccaatacagagtatttttaatattaagagagataattggagaaaaagaagtaggtggaatgtgtaggacatttgtgctattatcttccaggcacaaaggaaccagaaaaggattttaagttgagggaggaggtaatagtctactgccaggggtgtccaatcttttggcttctctgggccgcgttggaagaagaattttcttgggccacacataaaatacactaacaaaatcacaaaaaaaaaccaaactcaatgttttaagaaagtttacaaatttgtgctgggccacacaaatactactaaaataacaactacaaaaaaaaaattagctgggtgtggtggcgcacgcctgtagtcccagctactcaggaggctgaggcaggggaattgcttgaaacggggaggtggaggttgtagttagccaagatcatgccactgcactccagcctgcgacagagtgagactccacctcaaaaaaaaaaaaaaaaaaaaaaaaatgggccagttcaggccaggcgcggtggctcacgtctataatcccagcactttggaagggtgaggctgggtcacttgagatcaggagtttaagaccagcccgatcaacttggtgaaacctcatctctgctaaaaatacaaaaattagccctgtgtggtggtgtgcgcctgtgatcccagctactcaggaggctgaggcaggaaaattgcttgaacctgggaggcagaggttgcagtgagctgagatcgcgccactgcactctaggctgggcaacaaagtaagactctgtctcaaaaaaagaaaaaagaaaaaaaaactgggccagttcatacctgtttaggttagtagtaatgattacttacaggagataatagctataaagtacctaaaatggtgcttaacatggactagctgttcagtaagtattcccttcttcctaaagaaaaaagattatccctgtaataacagcaccttgggaggctgagacaggcagattgcttgagcttaggagttcgagaccagccctgggcaacatgtgaaaccctgtctctacaaaaaataaaaaaattagctgggtgtggtgacgcatgcctgtggtgctattcgggatgccgaagtgggaggattgcttgaacccaataggtggaggttgcagtgagccgagattgcaccactgcactccagcttgggtgactaagcaagaccctgtctgaaaaaaaggaggttatcactattaaaactgccgtatgtgtttaggattacattccatgagtgggagcattgcgtgtttcaaatccatgcatacccagctctgtttgaaatctatgcatacccgaggactcctggcccatctttggttcacaacgccccagttacaaaccttttagacagagtgcacacacagctgtagataaatgcatcccatattcactctcacctacgtagatacctagcttaaaataagaacccctgcacacataacacatatagatgatctcacaaccagaaaagacataacaaaaacatacatatctccttagaaataaggcccggcatggtggctcacaatcagtaatcccagcactgtgggaggccgaagcgggcagatcactgcagcccaggagttcgagaccagcctggccaacatagggaaaccccatctctactaaaaatacaaaaaactagctaggcgtgttggcgcatacctgtaatcccagctactcgggaggctgagaattgcttgaacccaggaggtggaggttgcagtgagccaagattgcaccgctgcactccagcctgggtgagaaagcgtgactattatctcaaaaaataaataaataaatgtgcatattttagtaattacatatattctcacattcaaaagtaacaatctgtggtttgaataaggaaatgaagttgagtgcatgtacctaagatagcggtaggaattttcaacctaaagaaggacactgaggcaaaattaacagagagaatttattggggccaaggttgagaactgcagcccgggacacacttcccagttgccttgcagagtgctcccgccagggtttgctgcaagcaggtttttaagggcaaagggaacaaaaggtggtctgacaaagttgtttgacaggagtgctccttggtttatagaaacaacactgattaatgattaactgtacattgttgaactatagggtatgcacgatggtgtccagtgtatggcattttatggctgcttggcgttagtctagagcccacatagcaaatggcttcaagaggtagtcacttagctcaaggatgtgactgctgtcacactctgtcacatttcaatgcctctctgggcctgataactaaagcattcctcagataaaagtttattttctttctcggaatggaattagtttttctagtatgattgtcccttaaaatgtctttttaccatgcttagaaaattgcctcagataattacatcatttctctgtagaaactaaggctgttttttgtttttgtcttagtcatgtttgactatatcagttgcctgtttgtacactacttagctttaagatgaaaattagaataaaattaaggaaaatcccaaatgttataattcttgcagacatgttaaaaccaacttgctcattcacttggtgaatatataataagacattatattacatatattacatgtataatagcctattgcttatttggagagtgggcatactattttaaaaaataaggccagtggctgggcatggtggctcatgcctgtaatcccagcactttgggaggctgaggctggcagatcacctgaggtcaggacggggttcgagaccagcctggccaacatggtgaaatcctgtctctactaaaaatacaaaaattagctgagtgcagtggcatgcacctgtaatcccagctactcggatggctgaggcaggagaattgctggaacctgggaggcagaggttacagtgagccgagatcgtgccattgcactccagcccaggccaacaacagcgagactctgtctcaaaaaaataaaaaaataaggccagtcttagtggctcacgtctgtgatcccagcactttgggaggccgaggcgggtggatcacctgaggtcaggagtttgagaccagcctggccaacatggtgaatccccgtccctactgaaaatacaaaaattagccgggcgtgatggtgcatgcctgtaatcccagctactcaggaggctgaggcaggagaattgcttaagcccagaaggtggaggttgcagtgagccaagattgcgccactgcactccaggctgggcaacagagcgagacttggtctcaaaaacaaaaacaaaaacaaaaaaaactcaacttttttgtatttacatcaagtaatatatatgatgttttctaaagtgtgtgatcacaaagttgatactattccttggtgtatattaaggctctattgctgcaggcaagttaacctgacttataatgtctttggttatcccaattctccttaacaaaaatgagaaatggatttgagaaatgaactaacaccacaaggcaaatgtgacctattgtttgcatattaatttggagactatttcattgagtcaaccactgtatgtttcccacattttaattgtgccagattttttaaaaagtagtgccatttgcttttaaaattattatttaaaaattatttaattaaaaaataataatgtttaattacataaaattaaattgagttaaaatagcattttaatttgataattaaaaattactattttaaattgagatgtagtttagatacaataaaatgaacaggcctcagttgttcagtttaaggaagaattttgatggaatagtcatgcaaaactagctgtggaatgtttctatcactccagaaagttctcttgtggtgccatttaaaaggatgaattttatgtgaattatgtctcctcccctcaccccccacacacaaatttgacccacatttacctgctgtgtcacttccagaaataacagaggttagcataattttttaataccatataaagtacctgactcttctgtgtgggaaacacatgaagggagaagaaaagacacacacacaatacctttaagggtaaacaacctttatcccatgtaaatggcaatgcagatataataagcaaatgatataataataaacagttaataagcagattgatagaataagcaaattgcaatgggaagggaagaagggaaaagatatttacacttaccagactatggacgattcaccaccagactgggaagcaatagcctgggctccagtgttggccactcgtctgtgcagacgaggagaggtctcatgaagcttaggcgcagtctggaactctagcttctttgtaactagttttttggcatgaggcccagtcatgagggcccttcctgactgagctcaaggaacacaaaaaggtgaacttgttttgtgattgtctattgtttttcaataactaacgtataggaatagattgaaatagagatttctccgaaacagtgcggatgaacgtctcaaggggctcacacaacctgttctgggaattggtgatcattgtttttgtccatgtttaattgaattcaaatttaatatttaacttttcctccacaccgaccccacatataacattcaatttacttttttcctaaaacagaaaattgggagttcctgaacattgtaagaaatacaccagccgggcacagtggctcacacctgtaatcccagcactttgggaggctgaggcgggtggatcacctgaggtcaggagttcgagatcagcctggccaacatgatgaaaccccatctctattaaaaatacaaaaaattagccaggcgtggtggcatgcacctgtaatcccagctactcagaggctgaggcaggagaatcgtttgaaaccaggaggcagaagttgcagcgagctgagatcatgccactgtaccccagcttgggcaacaagagcgaaactcaaaaaaaaaaagaaagaaagaaagaaagaaatacaccaaggccagttgggccagggcagtgattcggtctaccactgcagtgacaataaataggcttccctgggctctggggaacagagaagggcattgagtttacctagtgtctaagtgatgtaaatttatcccccacagaggaagggcctggcctgaatgcaagagttaccacagcagcaagactatcctggcaataaatcccctccagggcaaggctgcaaccgattgaggcagcagtgtgcagttgaccccacagctagattatcaccatatgcttcacaaactcctcctccactggtgaatgtcagagctaacccagagagcagggaaccctccatgccaccaaatcaaagcctcccaagccatactaggaatctggctaattctctcctgagaacggcagttctcaaaccttagctgtgagtcagaatcctggaaggcatgttaagatgtgggctgctgggccctaactccaaagttgttgcttcagtagtcagggctgggatccaagtgtttgggtttcgaaaaagttcccaggtgaagctgatgctcctggtctgggtaccacaattttttttatttattttaaaaaattctttaatttttttttttttttgagacagggtcttactctgtcagccaggctggagtgcagtggcctgatcatagctcactgcagcctcgaactcctaggctcaagcgatcctcccacctcagcctcctgagtagctgggactacaggcgtgcaccaccatacccagctaattgttttaaaatattttttagagatgggggtctcactatgttgcccaggctggtcttgaactctgggtctcaatctatcctccagcctcagcctcccaaagtgctgggattacaggcatgagccactgcacctgcctgggaccacactttgagaaagtgctaaacccttggtgctaaagctttctactccttataacatttggtgcttgagaattctcacacagtcagtaatattctaggacagtcctgacctatcagtcatagtcatgctatatggagggcaggatcaagccagacatggaagacccaagcgtgggaatgcctctctcagctaggctgctccggccactgttcagacacactaaccccagcaccctaacctgagaagcagtgggatttatcaggtgtatagatagctgcacgtgcatttgtgaacactgtgtgggtagcagagatgacagttctcaccagccatgtcaccatgtctggtgatgtttctaccagtgacaatcaatctcacatgaattcagtgactcagtgggccaggaccaagcagacaggttagcacttggatccaggctgtgccaatcaaaagctgtgtgacatgggcaaatttccttacttctcagaaccttgctttgcaaagaactcattactttgcaagggtaaacctgtggagtaggtcagtatttgggaatgtgttaagtgagatatttcttgcctgcatcttttccttcattcctcttctcccctttgactttaagctgggagcattccttactttggggtgagggctgaggtttcgaggacagtcctgctccaggtggagttggtggactggcagcatcagcattacctgagagggaagcaaattctgggaccacagcccacatctactgaatctcaatctcagtctctggggatgaggccaagaaatctgttttttttcgtttttttgttttttgagatggagtctcactctgtcacccaggctggagtgcagtggtacaatcttggctcactgcaacctccgcctcccgggttcacgccattctcctgcctcagcctcccaagtagctgggactatgggcacccaccaccacgcccagctaattttttgtctttttagtagagacagggtttcaccatgttagccaggatggtcttgatctcctgacctcgtgatccgcccgcctcggcctcccaaagtattgggattacaggcatgagccacagcgcctggccagaaatctgtgttttgacacataaactcctcaggttattatacacaggtaaagactgagcagctctggcctagaacaaaaaaagtttcaatgtagaggcttcaaaagccatagctgacagcatgctctgaaaaccagcatgcatatgttgtatgcagtatgttgagaaagggtttttctctggaggccaaagcttaggaaaccaagcacagagtttatgttataagccatggtgtcaggaagcatttgtgttgaagccctctctatccctaaaggaagaacagttggatcagcgggaagcagagcaggaccagatggggtgagattagatcttggaggacttgcagggtacagcacccttctcagcccaccagaccctggcttgaaaaggtttactgggtgggtcagactgtcccccaagaggtgaagtaagagacagagttccagccagaggcacacaactgaaggaaagaaagggctgagagaccatcacaggggcacctggcgccccaatttatggagggagtagagatggaaagggagccagtctggagaaagaactgcgcagaaaatcagaaggaagccgaggcgggacagcacgtgtccagggctggcgggattattattatgagccaggagccctgaaaagcagtgagggcagcttcagaggcaacgcgtgagtgagtgggaacagtcatcgccctatcctgagtggtgagagacatgtggtctatgtgactcttcttgctggtctgagggtcattccaggcctgcctgtgataacctcaccctgtgctgatcctggggaaggttctatctgggtttgtcacctgcagacccgtggctgtggaggagctggcactgaggagggcaaccccacagcgccctccggcccagaaaggggcctgggaggcacttggctccactgccctgagggattgggcaacctgggtgtgtccccgctgttcctggagagttggctcattccctccctcctctccaaaaacaaactcagacgcccatggtgaggtcagtttcagttgaagctgctttgcataaaaaaaaaaaacaaaaacacatctccttcctcttgatgggaatacttacaccaaaaagctttacgagcatatggttttgacggctgcgaggtcaggagatgggggttttcctcttgctctgcaggaccttggggaaatcactcaccagctaacgtgtgtcagtgctcaccgtgcgccagccacctttgaatcctccacagcccttgaggctttttcagtgaatgccgagaggcaggtgctttgcctggctgccatggccctgtaatcagcagagctgggatttgcgcctgggggttcaggatgtagccaagtgttagagcatttccgagatccttcccagtgcccaaacttcccgcttctctagttctaagtcactggccatctgaccgtgggagactatggcttaggctggccacacttgttctaatcttggggtctaggatgtcccagagggctgcatcctgccatgaccatgggtaaacagcttcacttgtccctgaagcttcctttacagggagaacagggcacaaccccacagcagacacagcagacgcgtgggtctcaccaccagcctgtgtttttaagggcatagaccttgtgttctcacttttgtataactgaccccctaccccatgctacagagtacatggcatgtggtaggtcctccttaaatgtttctgattaagcccagtgacaagttcttttgcaaagatacataccacagttgagctctggatacttactcatgagattttcaagtattcatttattcaacgaatatttatatatgtatgtatgtatgtatttcattttttaaattacttttcttgggggaggggggctttccagcaaaaaccagaaagcctgctggacaaattctaaaagagctgtaacacttcagcaaatatttaaatgaatgcctactgtcggccaggcacacaccaggtgataagtgatccaatggtgagcagaacagtaggtcctcatggggttacagtcttgtgggggaagaaataaactaatcagtttcccaaatgcacataaaatgacagctatgagaaggtgactgaaggaaagggtcacacgactgtggaagcacaggcaagaggcctgcctgggcttcagggaggcatccctgaggtgaaggcttgcacattgatccacccacctaccatccagtagggaccacattccagagagaccgaccttccttccttcccttccttcccgtccttcctgtccttcccgtccttcttgtccttcccatactttctgtccttcccttccttcccatccttcccttccttcccttccttccattttttttgagacaggatctcactctgtctcctaggctcaagtgcagcagtgagatcctagttcactgcagtttcgaactcctgggctcaggcaatgctcctgcctcagcctcctgggtagctgggactacaggtgtgtgccaccacgcccagataatttttaaaaatttatagtagagatgaggtctcactatgttacccaagctggtctcgaactcctggcctcaagcagtctctgcccgtctctgcctcccaaagtgctgggattacagatgtgatgtactgtgcctggcccacaggagctccttttctagtaggcaggtggatactctatgcaatgatagaaattaaataaatgtccgttcaaactatttggaggccacactgcacacccattcattatcaaaaataaataaaaatatgaaacctaccattggcaaagctataaggaaataggtacaaatcatatactgctaggagcactgcagcttaggccaacttttttgaggacaacctggcaataggtaagccagagctttggatactgtaccctagggtttcactttggggagtatttcttttcttttcttttcctttctttctttctttcttttttttttctttttgtgagacggagtcttactctgttgcccaggctggagtgcagtggtgggatctcggctcactgcaacctccacctcccaggctcaagtgattctcatgcctcagcctcccaagtagctgggtttacaagcgcacgccaccacgcccagctaatttttgtatttttagtagagacagggtttcattatgttggctgggctggtcttgaactcctgacctcaattgatcctcccacctcggcctcccaaagtgcttggattacagacatgagccaccacacctggccagtttgaggagtgtttcaaaacaaaatgcagtggtatttataataacaaaaaaaaattttaaaggaaataagacctgatacaggggaacactatattaatatatgaaaaacaataatatataaatacatggattgcagcaggcactgacaggttgtcattgtttttgcgccttcctggtgttcatgaacatcacctccttggatgttcatgtcacttctatgaggaacaggaagctctgggcacccagctggtgagagcaagagtcctgtgtgccccacatgacaccaagctgccaacttccatcttaccgaaccccaggctgtctgctcctgagggggctctggggcatggtgacattccccagtgggcgaggaagctgaggtcactgtctgctttcaacacttgtccctgagtcactgcctgggcctgagtaggggaaatccagcccctgcccattgcagccacacggcctggctcccctggctctgggggatgtcaccattctgagggcgtccagcagtgtgatggtgaagccaggtgccctctcctgacagccacccttgccccacagagcctgcctgctgggatgtagaggaggggggttccagcccctcctgtcccgcgtcaggtctgtagcacacaagctgcctgcccagggtcctcaaatcagctgtcttcactctgacctgcaggtctcggctcctgcatactgcaagctgggtgccttccttctacagaacccatgcccccttgcaaggaaaccatggaatttccccaggagtcttcgacaactccaggccacaggaaggtcacaaatggtcagaaaaggaatgaatttgaaggaggaagaaccagccctgcccacgttgtctggggcccctcccaaggggacaggaaagctccac

SEQ ID NO: 659 - DNA, 13961 bp, Homo sapiens
aataaatctgttcttcagcaaccctacctgcttctccaaactgcctaaagagatccagtactgatgacgctgttcttccatctttactccctggaaactaaccacgttgtcttctttccttcaccaccacccaggagctcagagatctaagctgctttccatcttttctcccagccccaggacactgactctgtacaggatggggccgtcctcttgcctccttctcatcctaatcccccttctccagctgatcaacccggggagtactcagtgttccttagactccgttatggataagaagatcaaggatgttctcaacagtctaggtaactgactggggtaggggaagcggggggttgacccttgctcatttctcctgttcttaaactctagctttgtctctatcccatcccaagatcccaaccaagcccaacccctgatgagggctttctacactaccctacccgtgtttgaagtcttggctaaaagctgaggttttcctgatgaggaggaagaggtggaggagaatggtagctgtaatttatgaacactcattatgaaccaggtataatccaagttttacgtagattatttcatttaattcccacaaccattttatgaggtaaggacaactattacttctgctttaaaaatgaggaaactaaccttaaaagctgatgagtaggctgattctggacacagtgtcacctccaaggtagaagacaatttggaaggggataaggggattatggggaggatagctcatgggatgtaccctttcttctttcctactcagagtacagtccctctcctataagcaagaagctctcgtgtgctagtgtcaaaagccaaggcagaccgtcctcctgccctgctggtgagtaactccctgagagggaatggcgactacgatgccctgtatcctcccctgtccatctccctgcacctacgtcttcccccatgtcaggtctgtatcaccctggcaccctggggctgagtcatgactcttggttcccagagaccccttgcccattcttgtttccctgaaggatgctactgggggatcttgggcttctgcctcttcctttcaccccttcacttcatgcccctgtttctcagcccttcctctcctccattgtcccataatgatcacatacttcatttctctttccaatctattcctctgttttgatgggtaggggccaacagagaggtgaatttatcacaaatcgaagaaaactgaaactcccaagttccaagtctctcacttgcatgagtctctttcatggcagcaaatatttgtttctgtgatttctgtatttcttttcttgaaatgagctcgcaaaattgaatgagcttgaggccccacgaaacctagctctacccctgactgcacagggttgaaagatggttgtgggtagcccttcctcctcttaaattccaagagctctgatgtctgtgcttcatgtgctcatgcagggatggctgtcactggctgtgcttgtggctatggctgtggttcgtgggatgttcagctggaaaccacctgccactgccagtgcagtgtggtggactggaccactgcccgctgctgccacctgacctgacagggaggaggctgagaactcagttttgtgaccatgacagtaatgaaaccagggtcccaaccaagaaatctaactcaaacgtcccacttcatttgttccattcctgattcttgggtaataaagacaaactttgtacctctctgtgcttatgtcatctctgttattgtccccagcttggggctcccctatccagaaaatgttgtcagtgtcccagtggtgacatctcagtttgggaagtgggatgggaagttaggaaagatatgggaagaatgggaaaaacaaactgacactccaaacccccacttccctcatttttatttatttatttatttatttttttcttttttttcattttttttttttttattatactctaagttttagggtacatgtgcacattgtgcaggttagttacatatgtatacatgtgccatgctggtgcgctgcacccactaacgtgtcatctagcattaggtatatctcccaatgctatccctcccccatcccccgaccccaccacagtccccagagtgtgatattccccttcctgtgtccacgtgatctcattgttcaattcccacctatgagtgagaatatgcggtgtttggttttttgttcttgcgatagtttactgagaatgatggtttccaatttcatccatgtccctacaaaggacatgaactcatcattttttatggctgcatagtattccatggtgtatatgtgccacattttcttaatccagtctatcattgttggacatttgggttggttccaagtctttgctattgtgaatagtgccgcaataaacatacgtgtgcatgtgtctttatagcagcatgatttatagtcctttgggtatatacccagtaatgggatggctgggtcaaatggtatttctagttctagatccctgaggaatcgccacactgacttccacaatggttgaactagtttacagtcccaccaacagtgtaaaagtgttcctatttctccacatcctctccagcacctgttgtttcctgactttttaatgattgccattctaactggtgtgagatgatatctcactgtggttttgagttgcatttctctgatggccagtgatgatgagcatttcttcatgtgttttttggctgcataaatgtcttcttttgagaagtgtctgttcatgtcctttgcccactttttgatggggttgtttgtttttttcttgtaaatttgtttgagttcattgtagattctggatattagccctttgtcagatgagtaggttgtgaaaattttctcccatgttgtaggttgcctgttcactctgatggtagtttcttttgctgtgcagaagctctttagtttaattagatcccatttgtcaattttggcttttgttgccattgcttttggtgttttggacatgaagtccttgcccacgcctatgtcctgaatggtaatgcctaggttttcttctagggtttttatggttttaggtctaacgtttaaatctttaatccatcttgaaatgatttttgtataaggtgtaaggaagggatccagtttcagctttctacatatggctagccagttttcccagcaccatttattaaatagggaatcctttccccattgcttgtttttctcaggtttgtcaaagatcagaaagttgtagatatgcggcattatttctgagggctctgttctgttccattgatctatatctctgttttggtaccagtaccatgctgttttggttactgtagccttgtagtatagtttgaagtcaggtagtgtgatgcctccagctttgttcttttggcttaggatttacttggcgatgcgggctcttttttggttccatatgaactttaaagtagttttttccaattctgtgaagaaagtcattggtagcttgatggggatggcattgaatctgtaaattaccttgggcagtatggccattttcacgatattgattcttcctacccatgagcatggaatgttcttccatttgtttgtgtcctcttttatttccttgagcagtggtttgtagttctccttgaagaggtccttcacatcccttgtaagttggattcctaggtattttattctctttgaagcaattgtgaatgggagttcactcatgatttggctctctgtttgtctgttgttggtgtataagaatgcttgtgatttttgtacattgattttgtatcctgagactttgctgaagttgcttatcagcttaaggagattttgggctgagacgatggggttttctagatacacaatcatgtcgtctgcaaacagggacaatttgacttcctcttttcctaattgaataccctttatttccttctcctgcctaattgccctggccagaacttccaacactatgttgaataggagtggtgagagagggcatccctgtcttgtgccagttttcaaagggaatgcttccagtttttgcccattcagtatgatattggctgtgggtttgtcatagatagctcttattattttgaaatacgtcccatcaatacctaatttattgagagtttttagcatgaagggttgttgaattttgtcaaaggctttttctgcatctattgagataatcatgtggtttttgtctttggctctgtttatatgctggattacatttattgatttgcgtatattgaaccagccttgcatcccagggatgaagcccacttgatcatggtggataagctttttgatgtgctgctggattcggcttgccagtattttattgaggatttttgcatcaatgttcatcaaggatattggtctaaaattctcttttttggttgtgtctctgcccggctttggtatcagaatgatgctggcctcataaaatgagttagggaggattccctctttttctattgattggaatagtttcagaaggaatggtaccagttcctccttgtacctctggtagaattcggctgtgaatccatctggtcctggactctttttggttggtaaactattgattattgccacaatttcagagcctgttattggtctattcagagattcaacttcttcctggtttagtcttgggagagtgtatgtgtcgaggaatgtatccatttcttctagattttctagtttatttgcgtagaggtgtttgtagtattctctgatggtagtttgtatttctgtgggatcggtggtgatatcccctttatcattttttattgtgtctatttgattcttctctctttttttctttattaggcttgctagcggtctatcaattttgttgatcctttcaaaaaaccagctcctggattcattgattttttgaagggttttttgtgtctctatttccttcagttctgctctgattttagttatttcttgccttctgctagcttttgaatgtgtttgctcttgcttttctagttcttttaattgtgatgttagggtgtcaattttggatctttcctgctttctcttgtaggcatttagtgctataaatttccctctacacactgctttgaatgcgtcccagagattctggtatgtggtgtctttgttctcgttggtttcaaagaacatctttatttctgccttcatttcgttatgtacccagtagtcattcaggagcaggttgttcagtttccatgtagttgagcggctttgagtgagattcttaatcctgagttctagtttgattgcactgtggtctgagagatagtttgttataatgtctgttcttttacatttgctgaggagagctttacttccaactatgtggtcaattttggaataggtgtggtgtggtgctgaaaaaaatgtatattctgttgatttggggtggagagttctgtagatgtctattaggtctgcttggtgcagagctgagttcaattcctgggtatccttgttgactttctgtctcgttgatctgtctaatgttgacagtggggtgttaaagtctcccattattaatgtgtgggagtctaagtctctttgtaggtcactcaggacttgctttatgaatctgggtgctcctgtattgggtgcataaatatttaggatagttagctcctcttgttgaattgatccctttaccattatgtaatggccttctttgtctcttttgatctttgttggtttaaagtctgttttatcagagactaggattgcaacccctgcctttttttgttttccattggcttggtagatcttcctccatccttttattttgagcctatgtgtgtctctgcacgtgagatgggtttcctgaatacagcacactgatgggtcttgactctttatccaacttgccagtctgtgtcttttaattgcagaatttagtccatttatatttaaagttaatattgttatgtgtgaatttgatcctgtcattatgatgttacctggtgattttgctcattagttgatgcagtttcttcctagtctcgatggtctttacattttggcatgattttgcagcggctggtaccggttgttcctttccatgtttagcgcttccttcaggagctcttttagggcaggcctggtggtgacaaaatctctcagcatttgcttgtctataaagtattttatttctccttcacttatgaagcttagtttggctggatatgaaattctgggttgaaaattcttttctttaagaatgttgaatattggcccccactctcttctggcttgtagggtttctgctgagagatccgctgttagtctgatgggctttcctttgagggtaacccaaccttcctctctggctgcccttaacattttttccttcatttcaactttggtgaatctgacaattatgtgtcttggagttgctcttctcgaggagtatctttgtggcgttctctgtatttcctgaatctgaacgttggcctgccttgctagattggggaagttctcctggataatatcctgcagagtgttttccaacttggttccattctccacatcactttcaggtacaccaatcagacgtagatttggtcttttcacatagtcccatatttcttggaggctttgctcatttctttttattcttttttctctaaacttcccttctcgcttcatttcattcatttcatcttctattgctgataccctttcttccagttgatcgcatcggctcctgaggcttctgcattcttcacgtagttctcgagccttggttttcagctccatcagctcctttaagcacttctctgtattggttattctagttatacattcttctaaatttttttcaaagttttcaacttctttgcctttggtttgaatgtcctcccgtagctcagagtaatttgatcgtctgaagccttcttctctcagctcgtcagaatcattctccatccagctttgttctgttgctggtgaggaactgcgttcctttggaggaggagaggcgctctgcgttttagagtttccagtttttctgttctgttttttccccatctttgtggttttatctacttttggtctttgatgatggtgatgtacagatgggttttcggtgtagatgtcctttctggttgttagttttccttctaacagacaggaccctcagctgcaggtctgttggaataccctgctgtgtgaggtgtcagtgtgcccctgctggggggtgcctcccagttaggctgctcgcgggtcaggggtcaggaacccacttgaggaggcagtctgcccgttctcagatctccagctgcgtgctgggagaaccactgctttcttcaaagctgtcagacagggacagttaagtctgcagaggttactgctgtctttttgtttgtctgtgccctgcccccagaggtggagcctacaaaggcaggcaggcctccttgagctgtggtgggctccacccagttcgagcttcccggctgctttgtttacctaagcaagcctgggcaatggcgggcgcccctcccccagcctcgttgccgccttgcagtttgatctcagactgctgtgctagcaatcagcgagattccgtgggcgtaggaccctctgagccaggtgtgggatatagtctcgtggtgcgccgtttcttaagccggtctgaaaagcgcaatattcgggtgggagtgacccgattttccaggtgcgtccgtcacccctttctttgactcggaaagggaactccctgatcccttgcgcttcccaggtgaggcaatgcctcgccctgcttcggctcgcgcacggtgcgcacacacactggcctgcgcccactgtctggcactccctagtgagatgaacccggtacctcagatggaaatgcagaaatcacccgtcttctgcgtcgctcacgctgggagctgtagaccggagctgttcctattcggccatcttggctcgagatcctcatttttaaacaaaaagatggctgtgccagacatactgcttggcaaggggtaaagagaaataaaataacacacccttacagagctcaccaactagaataacaggctccgagctatgtgtgagatttttcaagggatgggcaagcaggggtagctttaagggaatctatttctagattttcagtgtgcatatgtactctttactaaattcaagtgcctgagacgtgctttgatcaaggtgacttctttcaccattgcctttctcccacataacaaaagaaaaccacagccctcacctgtcactgaatcttattatcctggggtataaaaatctgcagaatgccaaacaagaagtgattaaaaatatgggcatccacaatgagtgtatgaatgatccagtgatggggtaacaagtcctttcacggctcgggaggcttccatggtttggtctttataggattgaaggaggatataatgcaattgtcaattgatgaatcaccaaaaataatttttaataataagttggtgtgtgagattgttgacaagtcattcaaaaggaattcagacaaattgaacggcattactacaataaacactttttctttctatctacttaattataaaaagtagacatgtcaaagctggcaattatgaaaagaaatagtaagaatggctgggtgcggcggcttatgcctgtgatcccagcactttgggaggccgagggggtggatcacttgaggtcaggagttcgagaccagtctggccaacatggtgaaaccctgtctctactaaaaatacaaaaaaattagctgggcgtggtggctcatgcctgtaatcccagctacttgggagcctgatgcaggaaaattgtttgaacctgggaggcggaggttgcagtgagctgtgatcgtgccactgcactccagcctccagcctgggcaacagagcaagactctgtctcaaaaaaaaaaatgctaggaatataatggttctagactgtatgtcactctagcgaaatgtccatgagtatataaactacttgggtgggaggagaagctctttctcatttaaaaaaatatagttatgaaatattgtttgggtttattaattacttataaaaatttgttataactgctctgttcaaatatgcactgttaattattataataataggtatactcttatttatagctgctgcagtgagtcttttagaatagaaagcagataatgtcaccttcctgttcaagtctagtgacttccacaacatgaaaaaataaaatctcaaggccaactaaatcctgcattccctggtcactggctatatctctaacttcatttgtaacccttgttcaccctggccatatctgcattctaggtattctctgtcatagccaccctcccaccttgaggccttcctacgtcctgtctcccagatagttacacagttctcacacaaaaggtcagtgctcaatttttttcagaaaacctttcgcatcacctctaactcttgccctgttttttttttcatgatgcttctcagtgttgacttcatattctatttatgagtgtattaactatctcttgcattggaacatgtagtccatgaaagagaaaactttgcctaacttgcacaccattgactccccagtgcatagcacagtgcctggcccatggaggagctataatgaacaatgcgcctgctactgggtctagctctgagtctgagtcagctccctcttttgctttctattcctcttcttttacctcaatcctggtcattgaggaacaaatgttgttttaatggagatccttgggtttaattctcaaagtgtcagtaggagaaatagctgttcattagagggcactctgagaaagaaaagccagagagtgaagatggaggtcagagaggttagctatagcagaagcaaaagtagatattgtagctttgtccaatataattagctgctcacttggtggcccatttcccctttctcactgttaacagaatcttgatgtcattcagggtattgatgtgtccagtcctgaaggataaaatattggttaaaccaataatataactttcacttctcttggccaagtatttctttttctagccacctttgcatggagtggagttgcatggggtggcaggtgacccaaatcagaccaagaagacatacatgggagggttcttcttgggcctcctgagaaagaattcacttcttgaattaaaaacagagactcaaaattgtccatgtcacttcttgcttgggctgttggtgtgaggatgtgatgtctggagctgtggcagctatcttgtgtccatggagttagttcaatcatcctgtgacttttgagccaaaactgtaagcatggtgaagcagaaagaggaaaaagaacctggagctgtaatcacattattctaccactaaacaaactctgaaatcatttaaactatttttcttcttaactaaataaaaagtattcttattcactcatttaacaaatatttattaaattctttatacaaaggcactgggctgcagtggttgccaaaacaggaaaagattactgccttcatagagcctccattctaattctatgtctcccccagctgaaattttgtgttactggtctatggagagaattagtcaagggcaatgtcatgttatctgaacagatgacaataagggcccttagatcatactctctgtaccttttcccaatgaaggaatgaacaaaaggcctataatgagatatatcatccaatttggtgatttctggcaaagtagctgccgagcttgtggggctgccaagaagaaaagagaggagaaagaaaagcaggaagaattccttaggcagagaacgagagcaacggcagctgggacctctcaggacacaaactggagattgtcccaggctcattctaaaagtttgaccctcccaggctaccttagttcctagttactgccagagtgtgtgttggtggaggggagacaatgccacaccagacacaccgccagatataaaaagtccctgtcctcccatcttcagcagctccttcctcagtctggcaggtgaacctgagcaaggctaccttcttgacatctctgcttcgtaggagtgctggaaggggacccaggcatcccaagcatgacagctgcctcttccctgctccctacagtacctgctcctacctttcctgctcctttccctcccctcccctatgaacccaggagctgcttttcatcttctcttcattttcccttcagctcaggatgctgcctttttacaaaacgaagacctctttccacctccttctcatcctccttctccaactatgcctgcaggggatgcccagtgctccttacagttagctgttaacaaaaggataagagttgctctcagcaaactgagtaattgatatggggatgagggtggaagttatatccctgattctcaatcctgttactagaccacaagccatttcctaacccatccccagattccaacctctaactggaagatgcatcctcaacttgctgccctctctatgccttttgggactcttagaaccaatggcaatggcattggtaaggactatacctagcattcttgagcatttactatgtgttaggtacctttagatattctattactacgttattaactccttacaaaattctgtgaggtaagcactgttatattttgcattccacagaagaggaaactgaggcttagaaaagttacataatttgcttcacagcactcaactattgatgtgacttgataatggacacagtgacttatttgcatgagcagaagggtgatatgggattggccagtgaaagcccctgtgtttgctctttatctcttcccacagaatgcaatccctcaggctgcccaaaacatctctcctgaaccaacatcactaatgaaagcaacctgtcctcctgcccctcaggtaactcgctgtatgaagttaaaggggattgcctcccccatgctcattcctgtgtgctgagcttaggctgccaacccatcgctgtatagcaggctgtccccaacctcaggattgtaatgttgctggattgagtcacaaccccaatacccataatttccctttccatcttttcatcccaaggggctacttagggatctcatgtttattctcatgctctcctttcttcctaaatctcccacatcccaaatgtttctgttccccattgtcctccatctcactttcccaatctaatcccatactatttcaaccccatcagaagcgagattactttataggacaaaagaaaattgcaggaggtcttctctcaggatctctgatgtccttgccccttctgccaccgtccaggccatgcagggcacatcatcaccagatgttcctctggccatgcctgtgactcacgggatgtctggggaaaaccacgagccaaggccattacaatcccctagagtcaaccgctgcccactgctgccacctcatctaagaaaagagggctgacacctcagtctggaggccatgaaggcaacaaaatcatgatcacaaccaggaaacctccacccccactcatccaaaccataactttttaactcaagtctctctgcctatggcatctctcagtgctgtgtccttggtgctagtagcctctgacctgggtcttctctattcataggatgttacctccatgtcacgtgttccaacttctgcttgaaggggaggccttagggagaaccataagaactgaaatcagctttccaccctcaccaccatcatctcattcttcaacaaatatagggccacactgttccaggatctgtttgttctcagcactagaggtacagaaaagtaaaactgtacacatgctctgtgcatggtcaccatctatagcattccctaaacatcaaggcacatatgctttgtcttggcttgggagcaacctggatgatctagtcatcacttctctgatcaccagtcactactttaaaatataggttccatgattatttaggtgtggcaaggccaacagatcaggaaatgactgccatggaaaagaggattatactcacagattccaagagaaggcggcatgccaggtgatggggagccacacggagaagcactggggtgggttgggaggcagagggagaaaggggaaaatgtggcaaggactttattttgatttccatgggaaaggacacacaagacagggtaagaaggattaggattggctagcttcaataatttcagcaggctctgagacctaggggctgcccttagttgtctgacacctggccctacggtgagtagcacaggtagagagtggcctagagagtgagaccccagtaaaggaggtgggtgaagttatgaccctggattggttgttttgcatataaaaagaagggaaggtgagttgtttgctacctctaggaattagccaacctaggcgagggccgtccttccagggtcagggtcagcaaggcctcaaggtgtcaaggcatcagggaaaaaaggcatggttcatttatgcactttttacaggtggtcagttttctcaccacatccttcactgaagaagcctggcatgtaattcccctttagactgctatgatgctccctccatgtgggaattcctacacaattgcctcagatccttcccagtatgtagagtctctatgtcacaagtgcaaggatacatttggcataatatgaggaatttttgaggcttaagttgtaggcctctgagtgaaatgtaagtaccacctgaccacagattcttctagcagagctgagtgcttaagactcactcttagagtcaagctgtctcactatacctaactgttcattcccccttacatgggatttaagtggttttttttttcctaagaatctggaaccggatcctctaatgatgtcataagacctgagctgtattcacctaggaatcatgttgta

SEQ ID NO: 660 - DNA, 2990 bp, Homo sapiens
aaagctcctactctgtctgacctgacaagccacctcaagtggacaaggcacttaccaacaggtaaaggggcattacaggagaagagcatgtctaacgtgggattttctcttttcattttgaggtagatacagggtgattttctgaataaaagatcccagtagtaatgaaacttaagcaagaccaaagctgatttcgggtaatttggcctctgttatccccaaaccaaaagagaaatatctgggagtgtagctatctcagtggacctttcggctcacaggaattcagagaggagaggatgttagaaagataacaggtgctctgctctcttcttcaaaccctcttccctgtgttctcctacagagattgctgatttgctccttaagcaagagattcactgccgctaagcatggctcagaccaactcgttcttcatgctgatctcctccctgatgttcctgtctctgagccaaggtgagattttcccccacacttcccacaaccccaactctgaattcttccctccatcctcatgtataaggttcacttgaaaaaaagcagagtcaacatcagggtttttttatgttgttcagtgatcattatggctgattttatcccattcaaaaacaccctcacctcattcatgggtttgagacagaatttaataggaccacttataggtgaccattgtggttgagtttatctgattgaatctatatgcgatggcagtttgggggatgtttttatgtagtcattgctaggatggagagctaaggcaaacgtgtgcagggaaaccgagagaaacttgagaaaggaggaagcctgggtctttaaaggcagaagcctcagcctcagaattaaaggaaaacgaggactcatttatttagcctattcattgtgagctcttgtcttgagcagaggaaactagagagaaaagagataggatgcaggagggcagaagtgagcaatcgccccagtattcactgtatccatatgttcttataaaggacaccaagaagcccctaattcaccttccagccttttccttgccctgcgattctttcttaattatctccttttttttttccccaggccaggagtcccagacagagctgcctaatccccgaatcagctgcccagaaggcaccaatgcctatcgctcctactgctactactttaatgaagaccctgagacctgggttgatgcagatgtgagtgaggagagcagcaggggaagggaggcttatgaaggtagaggcagctgctaatttgcagtgtgttctgtggctgcaatgagataagattgatcccttccctattccaccactggtcccaaacttcccaatctactttatcccatcatttgacacattcccagcacagagatgctggtggtcagtgacagcatcatcagggacatttctgtgctgtcctttttctgttacatcctctggaaggtctcagtatatccctcacaccttccttctccactgagtgctccattttcttctccaacagctctattgccagaacatgaattcaggcaacctggtgtctgtgctcacccaggcggagggtgccttcgtggcctcactgattaaggagagtagcactgatgacagcaatgtctggattggcctccatgacccaaaaaaggtcagtctgcagccacctctatctccttataaacatttttgagaggtaagagggacgtttaaggtctggcaccgcaatcaccaacttttatctttttgtttgtttaaataaaagcaacctctttatagatcctataatgtatgagttgtgaagttcagtgtaggtagttagagacatgagctgaaggctgaattttctgggctctgggaattcatgcacccactcattgtgtctacttctagaaatgcatctttatgtacaactttttccctattttgctattgtctgtcttggaagaggtccctctgtagactatatagaaaatgagtagtggaggagaatctactgctggcatttgttatacattttatacaagtgtataaaactgtacagtatattatttagtttaacactataaactaaataatatatcaacgactactctacagccaatgttatgctggatatgagagttctgagattcaggaaaaaaatcagaaaccactctctttaatgggcttttatgggtctctgtatcaaattctgaacacttattatttgctggaagaggaggaggaattcggacattctagagaaggagaagcttagagcaaaagcagaggaaatgatatgatattcatggtgacaacaatgtttattctttctgctataacttggcctgtttctgagtgtgcacacaggcctggttattctattgatttttgagtgaccatggcccctgttctggcccttctccatctagaaccgccgctggcactggagtagtgggtccctggtctcctacaagtcctgggacactggatccccgagcagtgctaatgctggctactgtgcaagcctgacttcatgctcaggtgagaggcagacaatctatccacctgttgccatttccttcccacttatctctggggatgaacatggggactgggatagaggaaaggtaagctccttatctggaaaataaagaagtatttcctctagttttttgttctgagtcctaggttgaggaggggctacactccttctgatcctctatgtctgacacttctcattgtaccataggattcaagaaatggaaggatgaatcttgtgagaagaagttctcctttgtttgcaagttcaaaaactagaggaagctgaaaaatggatgtctagaactggtcctgcaattactatgaagtcaaaaattaaactagactatgtctccaactcagttcagaccatctcctccctaatgagtttgcatcgctgatcttcagtaccttcacctgtctcagtctctagagccctgaaaaataaaaacaaacttattttta

SEQ ID NO: 661 - DNA, 144413 bp, Homo sapiens
ccagctccagtcacgccggaagcgcgggcggagcgcacgggtccggggagagtcgcctgcgcccgcgagggggacccaagtacctagggtggtggccgagtcccgcctcccgccagcgggggcgaggacctgcgacgcgcacccctgcctggcccggtctcctcagcaccagccccacgcacaccctacttcctcagcttctcgccctcaccctgccaacttccctgcgaggagggacctgccgccagcctgcttcctcgtccgcaggccctgcgctgaacgctgccgcgcccagggttcaccttgcgccgtcgggaaagcccatgaactctccagaaacggcgtaaaggagggtcccgccgcggcgcagggctggggcgcctgggttccccctgggtggagcagcggcagcagagcgggaaagtggtggaggatgatcttgcggccaaaggggacctcggcgcagtaatgtcaacatgtaagtctcacctttcagcttggaattccttcactcttttatctgtgtccaccttctgtcgccccctccccgaccaccccaccctcaagagaaatgattttataaggacttcaactgcacggagggaataaaccggtttgtcttcagtttgcccctcgaggcactgaggagtaggactattgccaagtggagttgtgacatgtgtgtgtggctgttttttttcccccagcgaggtaaacctcacatttgggcggtgtaaagcctaataagaagggcagggcttcaagaatggggaaaacgtgttttcaattcaaattaaacaaggagtaacaggcaccgctcctcagtccagaggcctggccctgccaagaaggcgctctccggaatcaacacctgggggcttggaaggtactagtatgccgagaaaatgttgactttacacattgtcaccattgactgtagaagttattcttggatctttggggtgtttgaatttttttaaggtgtgcagaaaatgttttcagtgtgctttgtagtttaggaagtaattaagggttacgccacgttacgtgataggatttgaggggacttccatagacttatggggggcgtggggaattggggcattgaaacagagaaacctaaaaggttttgcctccatagaattgtcatcctaatggtgaggtggcgcacagcgaccccatgaaagggtcgccaagcaccgtctggctttccagaatgggaaaaggaagattgtactccaaagggccaagcttatttttgtggccaactaagaagtttctttttcttgtaataggtaattttccttctgatgttttagttaatcttggacggacaccgtgacagacattttatccccttccactaactcatgtacaacaatttctagaacttggtacttaacactccttcccccaactcctggatcttacatgaatttactctttcagttcagtacatggggaaagacctgccccctaggtcctgtttttccacactttcctgcactttccattccctacttccccactccccaacacacattttaaaataggagaaagaaaggatagtgcccacaagcctagcactctgtaactctgttccaggtactgtgagatgtaatcagaaatgaaccacttatttttactgaaactgcatgtgaaataattccacacctgggagttttaaagtttcatttatgccagtggaatcggcaaggtacaacttgaaaaaatttattttgggatacagccagcattttcatataagacttgttctcatatacaggctacacattttgaagtaatatgagcttgttttcaacttcagtttttcttgaaaatatactagggattttacagcaggtatttgcccagtttttttcagctttcctaagcatttagatcttatgagaaaaaaagcatattacacatgaaagtataaatacctgtttttaaaataaaagatgttaaacttatcaacaggtaatgtaaaaatttcctgatcatgaaattaagttatatagtccatttgaattcttcgtgattaaaaaatcatgtcattatagggtaaaagcgtgaatatgaaatcacatagaaaatagggcttgatacctagatttgagattcttttttgagctattttgactgaaagttttcattttttaccagatggtaagtatatttttttccattttgctatttacgattcatatggagtggtttaggatggcctgattctttttaggtattggtttgttagaatatatggaaagaattaccaacctttccaagattaatattcttactatcttgttgaaaaatgttaaaatgggtaacataagctatattatcctttaaattttaatagattcaagttcagaaactacttaagtgtattttctgcctcctccttgtggagaaagtgtatttgtatattgttatactcaggttctttaattatagactttacgaatatatttgggagttgtagtgactgcatatttttcataccctaagaaatttagcagatgtagcaagacttgcattaattcgtctcaagctgcatgaagctactgttccatttatggcttatataaattacatgacattgtgctttttcaatatgaatggtgaataaggctattgtctcttggcttatgggaaatattagaagcctgtagttttgtagcctaactggacacatgactctgaagtctggaaataatgatttgaaagagaattagtttacatattaaaaataaactaataactgctttttaaaacctgactatttttctaatggcctatatatcttacagagtttacgtttctgatgggatgatttttaatcaaaagtttctacagtctatttagaatttagactaaatggaaaagactttgttcaatgtttgtggtatgcatgggcaaaaactgtatctttccattttcatttctaattggatgagattattatctacattggatgatgttaagatgcatactaattgacaggggtggtgccatataaaggatatattgatcaaaaaatgtggctacctgagtgtcatgttactttccattataagcattacttgaaatggaattatctggaatgccttaaaaaaaagcttcaagatccatttatttaaaacagagcaaatatgacaaaagtttaacatatttaaaataagtcgttaagaaatcacaaatcaatgaagaaaatatgtatatttgtaatagaaaaccatacaaatgacttgaacatgacaatccaaataaaggaaattcaaatgagatgcaacttcttttatcaaagtgacagggattaaagcaataatactcaatagtgaggagagggccgtgacatgaaaacagtgatatgtttcaatgtaaatgtgaattttttaactcttttagaaatcattttaaatctacaggacgttttcaaaaataaaagttatgcaaagaacacacctctataccttttacccagaatcacctattctaattattggccccatttgtttaatcattcccgttcctcctttcctgcccccccccacgagcccctcctgtacacacacacacacacacacacacacacacacacacacacaatttttttctgaaccatctgagaacaagttgtatgcataagggcttaagagtttaatttttcaattgaaattttaaagatatttctaactttaaatatagttgccaaaaaatagagatcctgtatacctttgacccagttcccccaatggtagcatttggaaaacctgtagtacaatattaaaacaagtatattgacacaatttacttctctttttcagatttcccaagctttatgtgtagtcattcttgtgtacctatgtatgtaattcttaaggctgagttttactctcacctctagtataagccagttatgcatgttactgttcaaataaagtttaagatttgtgcagggttgaagaataaatcagcctttttgaagtggaggtacacccagcttaataaaggtactcaaatcgagttaatagaatagcacttttttttaaatacattgctttggctcaggaacatgatctttaaccaaaaaaaagaaaaacgattatgagcagacttgaataaaccaaattactgttcttttcactctggaagaattaaggtattttctctgccattccccagtcccttttatgaaaagatttgccatagaaacagagttgggatatggcgaaagcagttatttctgacagttgctggtattgattgcattagtatcgtatcaatttctccactaatatcaaaatttcttcactaatttctctttaaattgtgacttttggggaaaccagtaggagtagagagatggaaagtggtaggtttttaagattatttcggtgatccatttggataaaataatgcctacaaggaatcatatcgacatttaaagcaattctgtagaagggttacattctaaagcttccggaaacaggactaaagcaaattgtattttgtagcctatgtagattgaaaaagagaacaagtttgcaacagaggtagtgtgggtctcaaaaaggacgctaggttggaagccaagtgacaaaaaggatcttttggctctgacaccactgatcttatgatcttgggcaagtagtttagtatctcagtttttcacctgtaagatgataggttttttttgcataatctttaggtttcttccagatataggagtctatgactgtcttttacttaaaaaatgttcctgctgtcttcagtagaactttaaggccacaatcaaaatggtgtaagagtgtacttttgtgtgtgtgtgttttttttccttgtagttcctatttagaaccttagtaaccctgttcaggattttccattcttgggagatagttatttaaatctcagggatatatctttgctaagtgatcccctgagaaaacacatagtactttccttcctctgttctattcttaatttatttgtttatcttcttcagtaaacagtaaagtggatgaaagttggcctgtcctatggtttgtttagttacaagtgcttgccttgttgggtttcttttctgtctgaagtgatagagtctggagacatggaatgccttaagccatggtcatcatttgcaactgataggattgcaggcagctttgataagacagcttcagaattgaatatggaatccctaaatgctgaaaccttttatagcaaagaagttgcctgagcgcataaacagtgttttgtggccaaactaatgagcaggaatctatgagtattatttagagattaaatgaatctgagagaaagctattattcacacattgatgaaagataattgtcgtatgtcaaagagtgtaagaagctgggaattctcttgagctgatacatccttctgttaatatctgtaagggtgacagccaggtttgattggtctgtctctttatttttctggacctaagtttcctttttttgtgaaatgaggttagattagacttcagcattggtcctcctagctctaaatttctttgaatatgtaattgtgcttttgttttaaaagcatactcattcatccagcatcagtaggaaacaggcctattcttccaaataagtgaactttctatgggacggaagtttgtcacctaccgttttaaaagcccctacagattaacctgtactgttatttccagttctttttggtgggtaatatcctatttacagaagaaaagactaagggtttaagtacttgccctacaaaccacacagtttatagaggcaccaggaggtaagttgttgctgtttgagagtccacatccattattataattactaatttcttacttactaaaacatacttctcattagcagtacttcttttaatctcaaatattttggatggatggatttgaaaacaacttgcaaacaagagatactcttcaaatcttaaccttttcctggtttcgaattttcctagtttagaatttccatcaggagagctgcatgattttagaacttctagtttggtgaatactaaaacatggcttgagtttcagatactacttaacatttctttattcatagcaaacatgaataaccaatttcatttctggcccaggtgatcccagaagtgaccacaaagtcaattgattggtgttggcatatgagattaatcttgtttactcttgcttgagtcttttcctttgatttcactgtggacagaataacaccacttaaatgagaatgcctggaatgatagtaatcataataatagctaatatttattgagtacttgctgagtgtcaggaactgttcttgaaaggcatcgtcttatgtaatcatctcagcaacactgtggactaggttcattgctgttccttattttacaggtaagaaataggaggcacaaggcgatcaagcaatttcccaaggtttgcagcatagttcataagtagcaaaccagatctgtctcactctaagcttattctcttggctatgagatggagatggtctcttaaagtttaaaaatgcagtcttgaggcaagtgcaggagtcctttgatgtctaattttgctcatttgagtatttctctttctgcttttctgtttagtattacacattttactcaggtaagcaaactgcaggctttagggtagatattactgtaaccctaaactatcttattagttactccttgctaaaatgagtctcagttactacttataggcaaagtaactctctctcaggggattttcaggtttcctggagatttctgactattgcttacttaccttcctgcctcacaactcttctgctcaccagtccacttatggtcctttttgatgactgatttttgtaatttcttccttctttgctggtttgccttttttttttgatggtgctgattcaatgaactgtattataccattgttttgagacaatataatatgaatgttgctttctaaatcattattaaatataattttcagaattaaatgagtaagtcatgcagaaggatagttgagttttcaaagcaccacctctccatctaatgtcatttactactttctataatacctggtgttcaatagccatttaaaaacttgatagctattttatatataaagacttcaccttttttggaatgttaatgcttcaatgtatcactttaggggatagaacagagtttgggcaatttggttttatgttaaatatttccgtttgtaaagcagcagacattaaagaaaacatttccttacaatctgaatttctgggagattataaggaaggttgatagaaacatccttcttctacccagatgaacatgagtctggtgaggctgaagctaacattgctttattttttaataaataatttttttgaattgtctgactacccattttcatgcagaaatcacctattatatatattttgataaggaaactgctaccatgtggcaaataaaatgcatggatttattttcttttgctaattagcttgaaggaagtgatcaagtcgtcatcatcttttaagttcctcctctatttggaagcaaggatgaaaaaggtttattttccagtccctactggaaacctatagtttttactttatttgtcataatgctttactgaatgttgaatgtcctaattgccatcttctttctttgcaggatgtttcgctcagatcgaatgtggagctgccattggaaatggaagcccagtcctctcctgttcttatttgctttatatatcatgtgtgttcctcactcaggtaagactcttcctctttcacacctggaatttaatcatgatgacattgtctgcagtgtaagcatgctacttatttatgttgccttacttttacttactgccttttttttttttcctgtttctatccttatagggcagtttttttctgtttatgatttgtctgttctctttgaattttgtgtgaatactgtttctttgatcattgttttattttctaatgagtttatttctttaatctttgttgtcttttatttatttacgtagcccatattgagtgatgagataactacataaatcgcatttaaaaagtggtagctgtttcttctactgttgaataaatatacagtacttctcttttcaagttttcatgtagttatttatggaaagtacagactttgctagtttcattcatcctcattttattagcatgttgcaatatgaattaggaattgaaaattcagtttttagactatgcagtttaatttacttgatatgaaagttaattttaattacagcatttttggaattaaagtattttttctagttacatttttttgaactttgaaataagatcttggtggctgttgaaaaaactaaattttctgtaaacagcaaattatatgaataagccaattagaggctgaggaatgtgaatgatatctaaaagtaaactgtttcttcattttctggttttgtcactgaactgagcaaatttatttaagtccgttctattttattctttgttttctcctggtgtatgtattaggcttattatgttttcctttagaataaagctaaaatgtcaattaagaaaatcataattcttgaagtcttatgtatttattacttggaatttaatcaagatttattaatttcatatttataatatatattatcataaagaatacattttaaacatcgtggaaatagattatctgctaaaattgcttattcacgcatcaagaaattaaacttgtattgagatgtgaaaacttttttttccaagcctccaagtgttttaagagtttcagttatttacttgcaaaatccctggcacttatttaatggcttcaaaacagaacagatctttcagtgaattttgtgtgtgtgtttgttagaattttattgtaaagccattttccttattactgtcattattagaggaaacacacttgtaaacagattggaaaattaaagataggttttatgatgtacagtgttgaactactttcaaaagtgattctctaagaatcaattacatgatatgagataaattatgagattaacattattagttgaagtctgtttactttcatttttgttaggtcatgtatttatatatttttaaggcttcttgagaccacggcacctccaatttggacttttagatgtcaacattttaatgaatatatgcacattcttgaattttaatcatttgaataaatgaagcacatgtttttaggctaaagaaaaggaatcaacttgtctgggaccaggctgagggaagagaatcacctggggtacaaaatttaaggaggcactcattctcaaggccaccagaatcaaagtacttacacttgttaagttactctctcacacaagattttcttattttttgttatttcctgcattattaaactttttgtgtatcagataaggtcttgtgacagatagttttctgtttcacttttgaggccagaacattttgtattaatacctatatcactctaataatgactcatttaaaatgccaccacctcacaggtaaatatctgaattcacaaacactctttagagggtcttataggtattttaatataaaatttttgccttataagatgactcagcatggggttccttataatgaactcccaagccatttaaaataatgcatattacaactttggatatatatgatatttaaaatctttttttgcataaatcaaagtgtaatactgctatgtttttgaagactagtgcttaactgatgttatatccctgtttacacttttgttgactaatttttgcttctctaggtaacacctagatgatctcaagtggctttaaatggtatcttgatgccagtgtccactaaatctgtattgtccatcctggctcctagagccatctcttgagttgctgatcctcatctacccttggatttataataggccttaaactttaaatgtgcaaacaggactcctagttcctatctcctatcctcaaatctacttctcttttaacctttaaaattcctccttctatcctcctgttctctcctactctcactattttgtagacacattggcctttctattccttgtctatgccttcctagtctcctcttctcccttacctggttctttttgacactcagatctcagtttaattattaccacctcatgtaatccttccctatccctcaattcaaaggagcgccactggatcatatcatattcttagtgataatctgcatagattttggtttttgtcttgtttgttaatgttttgttaatttgactgtgatagctaggttaggagattggcagatctcttttggttgttacgattgacacttaattcagatgattaaaattagaatcttatggtttgattccaataacatccatagtttaattcttataatagaattgcagtattaagtttgctagtaggtaagttaacatttatatttcatgggacacttaaaaaagaaatatgtgagttttgtgaccttctggattttcaaaagtagtgtggaaaaatagctcactgtgtcttgacaagtgatgattataacctttaataagaactacaataaaataacaatttagaatatttacacttgtaccatagaagtatgccttaaaacaataaaaatgcgatttatttttacccactatcttgaaaccatttagaaaagttgacaacatccaatacaatcaaaattgttaggaaaagagtgtgcactgacactgttgactcttttgggagagtaattaggtaacacataaaaaaatcaagaatgtgtacattggtgtatcactctcacatgtaggcatataccctataaaataaaaaaacataaatatgtagagaaatctgtatcactgtgttaactagcattgcaatagcaaactggaagagacgttgttcactgaaagggggatggttatgtgcattattttacattccttctgtggaatactgtgcagtgcctcaaaacaatgtggtcaaactgcctatttgcttgggaagctattcatgataataatgttaaattaaaaagcaaattataatcaggcactgtggctcacacctgtaatcccagcacttatataagactttgtaaacatgttaacaaaacatggaatgatactcatcaggcttctaaaatgggttgtctcagaggcacagtttggagaaacaggagggatgacgatggaacttcatacacctctgaatttttttgccttcttacaacgatcaggtattactttactaatctgaaaaaaagctgatgaatttctttttttaaaaaaagccacataaaaatgaccagagaggcatagaagtgtatgaatatttaaattttgttagttacttaactgttactctggctctttcttcacttaataggaatctctaaaaggagtttcagataataacttcttttttgtggcctaacactccatgactctgaagatgaatgatgatatctcaagcagacagagggttatggattcaagtagagtgggaaacagccaagagccaatacatttctaagcaaccaggagcttgtttccacacagatcgtcttagtcatgagcagtgcaggaggagcctcccttctctcctgaaaatcagtgatatcagcagatcgtttcaaagcacagtgttactctgatatctatgagacatcaacagctaccaggggaaatgtttctgaaagtaaaatctggcctgaattgtgtactttctagcccagggcacagcatagttctggaaggcaggtgattgtgtaaaaagaatcttgtgcttttttgtttgtttatgtgttaatttttcttatcataaaatgaacagttatttagtagtatgtgttaatttttcttatgatcataacatcaacaattattatttagtatcaattacattgcaatctatatttaagaattaaatcaaagtttggtcagaggactttcaaatgtctaaaaaaatccttttatgaatgtcccctttttaaaaaaaaattcagtattgtgtattgaaaattactaagtgtgtcttaaaggtcaaaaataaggctctaattgtacagaccattttgcatataatgataaatgtgtgtatgtgtgtttcactcagaatcaaagtgctccaaattactgtctgaagctttcagctaaaaggctgtttttctgtttcagacctcagattagcgtcagtgtgagtgaataaagtctagaaagttttatacagatatttccttgaggcaactttctagataattttcttcatacacctttggatggcctgaattcgatgttgttcaatatgaaatcatacattgaggggtcataaagccaattacataaacgtagaaggggaatgacctgccttgtcaccacagtgacaatctcaagtgacccgcagtgtgatgggaccactaatgaaactgacaccacttaaatgatattaggaagagggagatgtcaggtgtcctactttttattggtgagatcacgcttgtctccaggcatgactgtcataatgtggagagggttggtaaacagagaatatttagacgaggcacaccagcatactgatgagtctcaagctatctgaggaatttttggagcagtccctgtcaatactgggtgagtgaaacctctttagaggtgggctgcgactgtgaactccctttgtgtcagctacaacgttcttgctttcgtgtatcaatttgtttgttttttaagtacaaattttgttgcattgttgcattaaaaatggatgtagagaaatggcacatttactttaaagtaataaagtcagtaggaataagatactggcctttagatatctggagagtggtcatctggaagtgataacagacttcttctaagtatctcaaagagcagaactaggacaagtgtgttaatgctgtaagaaccaaatgactctcttagtaattaattgtccaaagataaacctagctgtccttcaaattcccctatcactagtaatcgggacatgaaggaatctcagtattgaggaatttgtaccagaaacctcgaagacctccttagcctacagtccaatcatggagtgtgtgtgtgtgtgtgtgtgtgtgtgtgtgtgttatacagtctattttgttttgtgcacatagttttaattgttttacctgtaaagtttcttctgtgtacttccaattttagcgggtacttttaataatgaactagacctagaggttgggcgggtaactttcttggacaagataaacctggggagctgtagagtttaatggggacataccaactctgagactttcgcagacacaaaattgtctaacacttttaaattctttttaattctttaaggagttttctttttattttcagcaagtagaatatgtgctctttggcactgttcttactattctttcttctttggcattgtttgtacttgcaatatcatagtattcagtaagtaaagaagatggaaaaaaaaaacagaatggagaaccaaagacaaaccccaatatattccagatgtaatgagcaaatatactttatagggtggggtagtatggggaggaaggttttgaggttagatgagaaaagtgtattaatcccacaatgaggatcaagtcacataaacatcctttcccctccattgaactaacatgattatacacctgaaaagaaagcaaggttcctttgggaggccgaggcggcgggcagatcatgaggccagaagtttgagaccagcctggccaacatggtgaaaccccgactctactaaaaatccaaaaattagcctggtgtggtggtgcgcgcctgtaatcccagctactcgggaggctgaggcaggagaatcacttgaatctgggaggtggaggttgcagtgagccgagatcgtgctgttgcactctagcctgggcaactacatctcaaataaataaataaataaataaataaataaataaataaataaataaataaagcaaggttctttggcagcacatggatggtagctgtcaccagttcaggttaaccttaaccatctcctgtgaaaaaactctcagagaggaataaagtatcccagtggggaatatgtggccaccatatttctatggttaagactaattatcttgatttcttaaaatcattaaaaatatttgtaatcgtttgaatgagatttttctcaggaaaatggtttgaattattaggtctttcatgtcaacatatcttggtttttagtcattcctaaactaacttcatcttaaacttgtggtttagaaatgatatgctttataaaaaaattacataattttctgcaataaattattataagtcaaaaaagatcccttcctctactacattctcctccaagtttggtgctgctggtttagataaaagagaaaaagtgtttgtactagagctcagaagatggattgtgtcaaccatttaaaaatcaggatcttttttctaataatgacagaattacactagtcactcttattggtttgggcaaaactacaagaatgagaaaatgctcataatttttgcaaacagaaggatctttttagaagattccttacctggccaaaacttgattaaagagaattattgaagtaaaatatagatctggaggaaaaaaatactctggcaatattaatcactgtttttatacacacagttcctttcttctgtccttcatttatttgttttatgccttaaatatgtccagaaatatgacattatgtacaattgatactggcccctatgagtataaagaatagtttagctgtatcactggccttattgaatagagttttaaggcagagtttctgatcacagtgatttcagtggctgcagtagcagtgctatgaggaggaaaagctagacttttagagataatttaccttagtgtttttttttaattttagagaaaatgagctccaagtatacactgaggttgtggaaatgtagtctgtcaccttttccagaattctcctcatcagattgtgtacaccagttgtctcctggttggctcatcagaggtcaatattagtgttttatttgaactgctaatctcatctctctttagaatggtaacctgaaaatctattacttgtaggcagctcaagaccacaaacatttttgtttcaatactgctgataacctaatgtttcaccaaacaatagggtttgtggtttttctctcagagcttttgctaagttgatacaggacattttccttccagcttggtaagcatccttgatgctttacttggcgtttggttaggactcttattacttctcatcatctgactggcttccatgtcccacacacatgagttagagatgtctgctttttttattgacctttcagaagaaagttctctttgaattttaagccttttctgatatttaaggtagtgtccatttgcaaacatgatactactaattgtgacaccatggaagacagaatcagtaaatgtgtagcaaatgaattgaattgctttccaagctgtcttgacagaacttggattttccttagcagggtgtgtctagcttatcaaagagttaggtatctttaatcagagtcccctcatttccccaccattattaaaatatgtttaacatttgtgagagcattatagtacttaaataagttacagagaacatagagttaatgttgctgttcttagactcatttaaacgctaaaggctatgtcattgtaatattataaatgagcggtgtgtgtgtatttgggtgtatattatatatataggactttgaaatgagcatcttactgctcattcagtaaatatatatatatttatattatatattaatatatatttatataatatatatttatattatatatatttatatcatatatatttatatataatatatatattatatatatttatatatattaatttatattatatatatttatatataatatatatttatattatatttttatatattatatatatttatattatatatttatatatattatatatatttatattatatatttatatattatatatatttatattatatatttatatattatatatatttatattacatatttatatattatatataatatttatgttatatatattatatataatatatatttatgttatatatatttatattatatatatttatatattatatatttatattatatatatttatatatattatatattatatatattatatatttatataatatatattatatattatatatattatatatttatatattatatattatatatttatattatatatatttatatattatatatatttatattatatatatttatatattatatatatttattatatatatttatattatatatatttatatattatatatatttatattatatatttatatattatatatatttatattatatatttatatattatataatatttatatatatttatatatttatatattatatgtaatttaaatatatatataatatatttatatattatatatttatatatcaggctcatttcaaagtcctaattttgcaaagctaaatcattgcctttaatgttaaggaattttagtgttattggggagactaacgtgagaaaaaataataggatgcagtgtgatgtgcgatttagtagaattatagacatgatgtcaagagataacagaagagatctcagaaaaattctcatggatagataatgttaaaactgtgtcttctgatgacaacagaaagggagaatatggagaatggatctagaaatggagaagggggatctgggcagagaagggagcagggacaaggacaaatgcacagatgcattataaatggctttgtagaagcatgcatatttctcattactagaataaagggtctctgcagaagaaggtagggaatgaggctagatggggaagtgggagaccagactggaggatgttaagtgagggccgatgctgacaaagctgaatgaggacttccagcccagcaggggagatagatatgtccccactagctacagttctgtaagtaagatttgtgcaattgcagatgaagatgaatgctgaagggcacagaggttgagagcttccctagggtggtagggcactcaatgaaaaaattgttttttgtttgttgaatctgcagttttatgatttttctctgtcatactgttgtgccttagaaatggcagccttagtttcctcattggtgaacagccctgacacacatattgaaaacctggagatagtaatagcacttcaggtgccctggatgccttctgcttcttgctcaaacgcatatttagttgtgactgagggttggtgaatctagatcagaaataccttctttgtctttataactatcgcctttgaggctttcatctccactgggtatattgtaagagctcctaagtaaaatccctgggtccaaagtaaatcggacaaaaatctccttttttataggaagtctggcttaagggtgaaattgtgtgacagaatgagatgactaatgatttaaaatttagtctattgacattcaaattttgagagcacatcttttttacatgaagtttttcatattcttcaaattgttcctttaggttcttctgacttctgagcaactaatatgactttttttgtttctcatttaaatcagatttaccacctggtttgcctagttcatttcccattcctgtttattccttttgaatacatttcaattttcccattataacttaaatttttccataagacagttattagaatatttactttaaagcagttgtttcaagtgaaacagagagaaagacatctttattctctgtccactatgtgtgcctgacattactttaccacagcctttatctttatcataattatgtttgaaagcatcttgaattgggaactttgggctaatttaagtttaaaactcccatctgtgggaactagagattttgtataaaatataaacatttagtgctgtaagtaacaacttacgtttttggtcagaaaaagatgtagttcattgggctttgttaaaataggttaaaagtatatgttagcttttagggcagaatacataaaccagtttgttcacgtggaggtaaaaaaaattagatttgaaatctaataataaaaatgaacatatgtagttttgttttccccatatttaaaggagagcttttcatattttaaaagtaagactacagtgttactttttaagactctatgccttagaagcattagtagtactttacacatggtacctaaaaagtattttaatttttagtaatcttagaaataaaagcagaaaatatattgtgggctatttcaggctaaaaataaagtattatttgagataaaaatgtgcctttgagaaaatacattaaaaacttaaatctatgttggatttgatttaaacttgaacagcacacaccaagcattaaagcacttttggatgcaactaaactaataatgggagtgaaaataattgcttttgatatcaatagcactgctaacttgactctgagtaacttagtagcatgaattaaaatgctgactctgaaatgaaattttgcaacaatgttcctttacagtcagagataccttttccatatgtactgaggctttgttccttgtgagctgtagtaggaagatacagttagtacacatagtgaaaactgcgtgcctgaacttttagcttgtgtttctattaatagcaaaatcaggcagaggatggttagcagacgttaaattggatggttgatttccatttttctggtttcatagcccagatataacttgatcaaaaattagcttcggtacttgtatattcattgcataagtgtggtacagctttatttgaaatacaccattaagttgaaaaaggatcctgtgaattaatttcttatgttgtagtcatccctttctgtaaatatatattagagcaataagacattttcaaaggctgataaattctatatctatcatactttttaaaccctttgaccagtaggtgcatatgtgtaacaacacatatagattctcatcacaaaaatagttataataattaaatattaaagacaaatatccaccaagaaagaatttgataattatggaatatttacattatgaaaggtatacataaccataacttaatttttgaaatgtttagtgaaatgggataaagataaaaatgtaattgagagaagcagggcataaaactgagtagtgttttttaaacaatagtctgaattaaattaaaaaaatggcaagatagcaatctgcatgcttttaagattcacatatttcctttttcattacatccttatgtttccaaaaataagcatgcatacacacacacacacacacacacacacgtgtatatactatgatttaataattatattattgggtatttatccaaaagaaatgaaaatatccacaaaaagacttatataagaattttacaccaccattatttataatagccacaaagtggaaaagaaaaatccaaatgtctatcaacatgtaaatacataaacagattttggtatattcataatatagaatattactcagcaaaaaaggaatgaactacctatgtatgcaaaaataagaatagggttctctaaaacatgttgaacaaagagagggacatagagtacgtactctatgattttgtttatatggaattacggaataggcacagctaagctataatgataaaaaccagaacactggtggcctctagggagcaacggactggaaggagatatggtaagattctctgtgttgatggaaatgtttcaaattttgatttgaatataattacatagaggtatacatttatcaaaactcattgaacagcttagttaaatctgtgcatttttttctatgtaaattatacctctattagaacagtctcatccagttaaaatatacaagtaatagttttaggacacaattaacataatttcactgctcccaaaactatcaggattttactatctatatcgagaattacgtgctagctttctaaaacacaacttctttatttgttagagtattttggctggaaaatatttcttcccagcaggaaaagaatattcaattttactgtatttgtattagttatgtttattcagtattcagggatattttcagtagttaagaattttgggggcctgggcacagtgactcatgtcagtaatcccaaaactttgaaaggctgaggtgagagaatcagtggagcccagtagtcctagaccagtccaggcaacatagcgagacctcgtctccacaaataataaaaatattagccacgcatggtagcacatgcctgtggtcccagtttcttgagagtctgaggtgggagaattccttgagctgggacagttgaggctgtggtgagccatgattgcactactgcactccagcctgggtgacagaatgagaccccatctcaaaataaaaaaaaaattatttgggtcggaggaagagaacccatttctgcaaagatataaacttcgcttaggtcaagtgtaagatgccacctcacctttctttagcctctacatacattcaaaagtttgggttattctacctttgcctgaaggctcttttccttgagagcttctttcccccatttaattaaaaactaatgcaaaaaccaacatatcctttttcataatatattggattttgctttttaactaggaccttgtgcaagacttactgatatttttggcttgtcaccataataaaaagtagagataaaacatgggtgactcaggaaagctcacttcattttttattgtatgcttacttgtctgtttacttgttttaatgtaacagagtggtttatcatctatttactataaagtgatttgtcctcatttcacaaatgcctgctcttggtgaaaaactccacaaatctttataaatttcatttcccagcaaatataaagcatgaaccagaaagtacatttcaatcaaacacttgaaaacactgacctagaggagctcagcacctggtgaatggcctctgagagtgttatttgttctgccctggttactgacttgagaggttacatgagtgagtagtgagttgaaagcatcagtcaagacagtcttgtttctgaagaagcacctgctatatctgtacccctgtataaatgtcacttattttttttttttttgcctatgaagactgtaatgagaatggggctattgattgaagcaaactaataggacccataatcatcagctgttaatattaaggtcccagatggcttgcgggttatacaaaaacatctcatgaaagtgagaatgtatccttattggatggataatttgaagaagtacgatatataattgagtaaatccaaagggtgaaaagtatgattttgaattccagtacgcattaaaaaaaggtgaggctcaatctttacatcttaaaatctgatctcattccttagttttatacatttagattaaagctgatttagcggatattttgctatacaggacctgtgttaacagttacacagccaagtgccacaaaacaacatttaggtcattgacagtccacatatatgacagtggtctcataagattagtcatgcattgcttaacgacaaaggtatgttctaagaaatgcatcgttaggtgatttcgtcactgtgcaaacatcatagagtgtatttacacaaacctaaatggtatagcctcctacgcagatggtatagcctattacttctaggctataaacctgtttaacaggtactgaatactgtagggaattgtaacataatggtaagtatttgcgtatctgaatgtgtctgggaaaggtacaataaaaatgcaggattataatattatgggcccactatcatatatttggtctgtcgttgactgaaacgttgttatggggtgcatggctgtataatggagctgccctatacaggtgtaccatattttatcttttataccactgtatttttattgctggctgattatgagagcttctcatagacctctagcaatctaagctcttcttcaacctaagctgctttttcctgtcttcagtgtgttaataccattacttctcttccctccagacttctttgagatctaattcattgctaaatatgagagcatttcttgtctgactgtattttttgaatgtcctttattctaatgcagaccttattgcctgttgcctcagcttctgtaaaacagaaaaatggattttgttgccttctgtcttcctctgcaatctagcagtaaagcactttcctataaacatttctttaagtgtaatttgcataggaaattacacttaaagctcttaggagagctttcaattgctgatgtcagcatggcctttattgattggcattgaagttccctcactatgtatcctcaaccagtattttctaagctatttccactacttccttacacataatctaagaaataaacaagctgaaaacattttttcctctggcattccacaaacttccctacctccacaccatttattcaacctaaaactccattctccgtcattgctgcctaataaagtgctttgccatctcatgatctgtctcaaatgcctcttcatgtaggcagcatttaaaataaggatagaaagataggtagttttttcgtcttaattatcaggtatgtgtgtacccaggtgaccacctgttggatagtattttaatggtggaaatggagcagcaaagtattttctgaatctccagttttcctccatctgtcatttggaattctgtaacaattcatacttattctatgtcttgttgccatattgtgttttatgattattaatatgtttctatttttcccttattgttagtgcctacaggtagggagtatatcttctttatttttggattctgcccaaaactaagaaagtataggtactgcaacgggaatgaagtaaagcccattattagaagggagacatttataattaaggcaacgtatccactcttcagtttgatgtgaagggcagagaaactatgttgtaaacaaatagaatgaggcacaaccatgcattttagttacattgggagcatatttacttggattatttagaatgctacaaatcctcgtagctcattctgcatttcagtcattttgtctcttgctgtatacctaaaaagtacataggatttaagaaaaccttcccaagcagttggtaacataagaactttggacttacagacaatatgtctaaaaggccatgaagtttacatcttcctgtcttttcttgacccaacaatccctgtggtaggtttgtgctccagcatagccctccactgtaatcaccttcctccgggttcccataggagagaagtgctagagcttccaccaagctccaccttcctattctttacatctcccacgaggcttgtagcttagcagaatcttgggctgaggctccacggtattaactggatttaggattaattttgttttagctatattatgagttggcctgggattttaactgaattttataatgttatttccatgggaaaaagaattctaaaatccaaacaaccaatttggagcttattttttgcaatataatgaattgtatgttttggatttttgacattttaaagaccaaatatttctacatttattgtatctgtgccctgttctttaaaatcaaaatacctgtaaccatagctgtattcaatgaattatttagaaacatgatatagtttcaaacttttactaatttatctgatatgcttccatttaaatgaatatttgtagatttttttaaaaaaggagttatcttagaattagtggatttattatactaaaattaaatgtaggtgtttgatttttaaaaatagtctctgctgtaatcatccaggaagataatgtacttttgattaattactaagaggattacctaagaatataattcagtagcaaatgcttcacacatgaagatattcatttaaaactatgtaaggtagaaaaaaaacccacctaaaatctcagtaatacagaataattttatgaattatggcaaaatgactataattataatgtagaaatacaggtaggtttagtataataaaatattaatactaaatactatgtttgcaaaatatgcatgcctgtaaaaaactagtagatagtatgcaaatattaacatagtgatgagagagttaataatagttttatttttttccaaatatgtcttcaaaataattctacttgactttaaacacgttgtttctggaacaattcatgtacacggatttaaagtgggatacatcaaaacaaattcaaaactttattgtttctctgcatgtcctcccagcaaaaaaaaaaaaagatttttcttaataagtgatttctagttgtgtttccctttcctttctgcaaaattgtgaattttcaaaactcccatacaaaaagaaatggtaatgaaaaattaactagaattttagaaagataattggcatatcttgctggacctaattatttacaatatacaatagtgatcgtgagttttcagactcttggcttttttttttttggtttctttggtcttgaatatggttcaagatgagtgtcacactgaataccaactccttgtacagaacagagttttgttcttatgtaccccttgactgttcattgttcttttaaattaatggtgtgagaacaaactcattctatgagactgagatcatctgttatcaaaactccgttattaggtggagacagataaatcatggctgaagtgatcacagaagcatctgtggaaagagtcatgcagtcatgttaagtgagggttaagggtgtgtgtatgtgtgtggaggggcatgagtgattagctggctctgaaccctttttgtagacttgtgggatttatatttgcatacatttgctttttatttgaaaatctttttactttaagaatccttttaagattaattgacacagatcattctttcagaaactgatggcatccagaaaacgtttagtacatgatttaatgatttagtaccaaatcatgggtattgtgaaagtacccaagataatttctcatcttggtctgattatgaaagactagtattccatcttgctccagtactttgtttgggtgtgtatgctttattaattaagttgtttttagatgtaatgcagttgtcagtggggtaatatgacttttctaaaaatgttttaatttttaaagcctcataaaataaagaatgaggcaaatgaaccatagatttaacttaatgataggcaaaaagataaaaagaggaattcattaaaaaaaaaaagtctttggggactaggaggaactggaagtaccataacagcaactttctgtgtaaactggaaaatcttctcattcaaacttaacacatggagttcaccgtctatattaggaaatgttttggaacacagtgtgaaaatcagctgtagcaagaaacagattttaattaatacagacatagagtaaacctctgaggctgaacatcgttattcaattcagttggaagataagctactagatatttataggaaatgtgtattatcatttccctcattgtgtagcaccagaactcttctacctgcacctgatggcttcttacctgtcatcattccacttccctttctctgcaagagtattatgtaaccaatctttattcatcctatttgggaagtcagctatttctataaagggtaagctctttatcagttttttcactgaattcccttccatttactcctccacttttttacaaatcttttgagttgaaatatgcctccatgactcattgtaatgatcagtaatcataaactagtgttaacatttaatttttttgaaagaaaacaagaatcctacattttgagattaaatcaaatttgatcaatatctcaataatgttactttattttgcatattgtttcttggtgtgtaatttttttttcagttacttcatcagattcttacaatttctccctccttcccaaaaggcaaaagaattatttttcctacgttacagataaggagaccaaagttaggaatacttaagtgccagccctatgggaaaacagaaacaaaacagaacgcagttcttcagactcttagtccttagtcattgttttttccattatcttggaggtaaacctccaaagggcccaccaatatcaagcaaaggctatggaggtttacacctccttacatgcttatccttttgttttgttttgtttttttgagacaaggtcttgctgtgttgtccaggctgaagtgcagtggcatgatttcagctcactgcaacctctgcctcctggactcaagccctcctcccacctcagcctcctgagtagctgggactataggcacacatctccatgcctggctaatttttgtgtattttgtagagatggtgtttcaccatgttgcccagctggtctcgatcttatgagctcaagtgatcttcccaccttggcctcccaaagttctggaattacaggtgtgagccactgggctgacctgcttatccttttctgattccatttctttcatcttgatagccaggagtcaggttgtgttttttaaatctaattatagttcagtaattgtactcaacaaaatttcttctattatgtttcaattataagtattgccagagagttttataccagtggtttttcaagtgaagtctggtcttggaaccaacagtagagtatcaccagggaatgccatagaaatgcaaatccttgggcgtcattacagacctactgagtcagaaagtctggggtagcgctcattgacttgtgtttgcccaagctttccaggtgatttcgatgttagctaaaattggactgttttaaactcttaatcgatgaaattgacattgaggtaaattgtagtttaatttttgtcctgagctacctaaaaagtctgtccagcatttataatatttttcttacttatatccacatccccacattggctccctgagatggtagtagagtataatggttcagtgtgtgggctctgaagatgaactgtaagttggaatactggtgttattacttacacttcatatgggccctggaaaagttacttctctgtgaaatgcagtcatggtacttcctgccttctgaggtctttgtgataattaaataagtaaaatgttagctatagttgttattatttagcacagttatttgcacaatgaatcatgaagtattgttttggaaagtaatattttaagtttcaaccaaggactttaaaaatgaacttttggggagacaaccaatttgggagagtttctggggtaatatataatcttcatggctcattagccatattttttcctttctgagtgttgtttgcaatttcattttaataatttattagtaactaaaagtagctataaagaagacatttatgccaaaatatttgaaggttattttcttcatttttctctaatattttcacttttgaaagggaagaaaataattgtataagcatcagccatcttctgcagccttttgcatctattttgttaccttacgagatcatcacagtccttactaaaacaaaaattgtcacaacgtgagtgaatttaatataaactagcatttcccccttcccttagtgaataatcattgtttgtagaaaaagctcccatcattgagtcatgtttgtgatcaacacaaagggtaaatgaaaggaccttagagtggtgaataggtattcctgccttgagggtttctttttcatttaaacattggtgtacaaatacttcagtagctaatgcattcttggttactccttaagatatcttattcttctctaagtttttctaattgcagtgcaatgacaacagtcacatatctgccacttataggaagggagtagaaaaggaggaggctgggaagacagctgtgtaaaggtgagatacgtgagcactgatgaacttcactctccactgcagcccatatatagcctgcagttgtgtgcttctttattttagtctctactaggctctggcaaggaaaacaacatattctgctggaagaaatttttcatttgccactgcaattttttttttttgccactgcaattttttttaaaagggagaggttaagaattaggtggtatttggttttctgttcgtgtgttagtttactaaggataatggcctccagctccatccatgtccctccaaaggacatgatctcgttctttttaatggctgcattggatcaggaaaaataactaatgggcttaatacctggctgatgaaataatctgtacagcaaacccccgtgacccaaatttacctgtgtaacaaacctgcacatgtactcctgaacttacaagttaaaaaaaaatgaaataaaatgtggaaaaaaaattcggtggtgaaaacatttttttcttgatgttattctcagccaaacaagctcatgcaagccggaaagatgtgggagtaaatatggcaatgccattcattaatcatgaaaaccatattaaggaaagggcttcccctaaccctcaatgtaatatactaggtcaccagatccatttttagattcagagatttctgttctctgttcagaatcaagaaacagatgatgtattacagttttgcctttcccttcaggaagaggaataaaatatgcttgagaagaagatggatttgattttctataaccttatagtatggaatgcatttagtgggctgaaagttgcaaatattgtatatgccttttcccctgattgtcattaatttggggttttgaggaggaggaatttacaacttactctttccattttcaaaaccagagtataaaaacatgctctttcgaccttgaaaaattgattttcaatttattatacatcagaggaactatagccaatatttttagagtatataattctttcccatgtaaacaaattcagaattgtttctttaaaaaaaaagctttttaagcttcatttatataactggacttgaggaacagtttttctatgggaactcagaagcaaaacttgcctttgcctgaagtcaccgactggggcccagggaagccaaagctcctttggagttgaggtcagacatggctgtatgtgacatggacattctatggaatacagcagggtagaaaagagttaaaaaaaaaaaaaactatcaaactagtgtttttcagttgtcctggactttttagtgtttccccactaaggtctaacctttgccatctgtatgcttttagatctgagaagatatgctgcctcttttttttcactgcccctcccctctgaatcttatggctcctttaaagtgtatagttcaaagaaaagccacagtgaaaagagctgtgtctttttaggcctagtgagacatatcctgcagcccatgggctttgtgtgaggctttctgtgatctcatcttgcagagtcagaaatgaaaagagattcttctgttctgtgtctgtcggtataatcatcatgctgtatgacgaaaatgcagtgggaacccagcaatgacatgaccctctgaaaagggtactttaaaaaactttttagaaatattgttaacttgatctcattttgctttccttgatgaaaatagtcctgaaatgcagtgttatttacagaatgtagatctagattgttacttttttaaaagcaaaaatattgattactgttggcagtgttaatggaatagaataatgaaaactattgccttctctgttttttttgtaaacgctctttttttgtttagtgtatttgtgactaagtaggaaaatacgtgtcactgcttgctagcaccccctcactcccctcattaactaatcattttcattcacagcttgtggaatttggcatgttttcatgttaacttttttgtctagtcattaggccatcttttagtgagatgcaaataaatgttatctcagaaaagttaactgtatttttattaattcggtaccatattggtattttgcagtaataacagctttataatgggacaattaaatacagatcattaggtttttagagtaatatgctgttaaatctaaaatacatatcattgatacttcagaaaaagagaaaccatatataaatataggaatggctcacaattcttcttaaagtagatggaatgggatttaagatcacaatataggtggccgccccttttcgatcactgtaaaataactatacatatgtagtatattattggttcttttagttgtgaaagattcgaatactgaatgtttgcagcagagaggctgacttaccacatagtgatgagtaggtagaaagtcctagcatattagtgatacctcttctaatttaattcacagagaaacttaagcatatttaggtattaggtgtctttacatagacattgaaagttttttatttttaattattaaagtaaattttgtaaatttctggcttgagacctcagttggctctctgttctccactaaattcgaattttttaactagcatgttttttgctttttttttttttgtgaaggaagtctgggttaagcagagttgacgttctgctggcttagataatgagccacctcattccaaggcagtttctctaggaaatgatttccctttcttataaatcttgccatggggcttggatgtcatgtggacataaaacattattacttaccacgccaaaaatgatagcttttgcaagagagacacaatatagtagattgtgtttatcttttagacatctattgttatctttgggattttaagttagtgaaaatacccttcggccttcatcctcccaagcaacaagtaaaggaccataatatgggctgaaggatcgtggcagtaagaacaagccaggaggagttcttgaatcttccaggtaagggcttctgtcagacgcctggaaagttaagcacatggaagtgctagtgtgcagtttagttatcatcctagcctaagtacactaggaaatatactgagcgtaaaaatagcttggcagttactgactgagaattatttgaactgttgcaaaagctagagtggagatggtcacaggtttccattattgaaatggtgattgaaatggtgataagtgtggaaaagtataatcctgtcatgtgccttacatttcagagcaaagagaatatatgatgcaagtcttgattgagacagtattaaattattttcttgcttgaatttgtcagtcagtgactcagtttgatttgtcattcaaactcctctaggggacagaatgggagacccagatggttagaaaaagagcactgtctgtatgatgactcctttgttttaactcatcaccaagcatatttgttggtttttcagggttatatcccctctgacccattgtactatttccctaagagtttacatataacattaggatcacaaggtatggcagacctggactatcagcttgtttttcttattgatattaatgtgtggtgtagtgaagactgaatgttgcagtcaggcagaatggagatgtaatctcactttcatcacttaaaaaagttttttttagtagatataaggtctcactgtgttgcccacgctaggcttcaactactgggctcaagcaatcctcctgccttggccaccaaaaatgctgggattacaggcatgagtcatcatgcccggccaccttcatcacttttgagcttcaaggtctgagaatctggaaatattacttagggttcttatcttttcaagatgagatcaataatacctacttcacactctggtgaggctgaaacaatacaatagatatccatgtccctggtacattgtaatttattattattgagagatgaggaaattgaatcacagagaagttaatggatttgtccatcatcacattagcactaagtggcagggaaggactttaattccggccttctgtctctaatcctatggcttgtccacactgtcattgctcttaattcaaatatattttggtgaataaaatcttttaccagggatggtatgtggtgtaaattaccactgataaatgatatcagatttttgtctgaaggaagaaagtcggttttccaacaaatgaatggatatggcatctgttttatgatagtttcaggatgtttccaaggtttaccccaagatatgaatgttcaacttgaaattctagaaatatgatcattaatggaaatacaaagttcttagacaaaagatggaagaaataattcaggaaggaagctaagaagaataacatttcacataaaaagcagggaatcaaaaacagtgtttggctaaaggaaaaaggtggtaaagacaagagaaggaaaaacaaaactactccacattgccagatatattacacttgttaacactagggaatccaggctatctataccatcctatgccccctaaaaccatgaagtgaatttgcaaacattaacagattatagaagtgctgttacctaactctccacacgtagcagaagcccaagtgcctgtagagttagagctgggagttatgaggaaaagctacaggaagtatgtcttggcccagaataaggaagaactttctgacaataagatgtgccaacagtggaatggctttttccccaaagtaatgagcttcctgtcactggagagtcaggtagctgctagaagattggcagggttgcaatcaagggtctctagcatgaggtcagagtttgaatcgggtgaacctgaaggtcccttaccaagattttgtgattctatgactgttttggttacaccttttttctctttcatactcagttttactgtgtttcataagtatcttttaataaacagagggcagtacttaggcttatgaaataagatgaactgtggcaatccttttaaaacagtaatcaaatgaaattcaaaataatatgttagagggaaataaacaaaatataagattttttgaaagccatattgtttaaaacctgtgggagtgattataaatcttaatagaatgaataaaggtgattggcactggacaaaagcatgtctagaaagagtttattgttgcatttagcagcattctgacaggaaagggcttacacagagtgcagtagtaagaaagcaaaagacgtgtttaaagagctacaggcaaatattcttgtttattacaggtgatcggaggatagtattgagaaccaagagatcagaaatagtgttaagtcatggggaaccttgaatttcaggtttagatgtttggtttttggtggacacctgatttcttttgatggttttgttgtttttgaaatagagatggacatgatgtgaactttttattacacaattattgatcttggtagtggtggggaaggagtttttaaaaaggaggattggaagggaagtagaaaaagttaggtgagaaaatcgaaggccagaatataaatagagaatgaaaatggagaacaggggagcacaagaaagccttttacagttagaagtagtgaggattcagttcctgggaggacagagctgcctttcattgcaatggaaatacgtggagagaaaagctttggagggcatcagtgggaaaggaggttgtcttgtccactggtgtcccacactgcagaagtggtgcatggaacagaggtcaggagttgagatcccgatttggaagttatttacacagaggatgaatctgcaatcatgaagtctgatgaaattccaataggaaaaccatagggggtggggtgggagagaaaagagatctctgagctgaactatagacagcagcaaaatttagggaaaaaggagaaaaaagtaatcagagaagaaggtgttatagactacttaatgatgtaagaagaaaaaccaagagaatatttcttggaatctgagaaaagaaaatttcaagagaatgtaatcagggatcctttgggagcccctgtagtaagaagtaagaaaaaaatgtgagatggaagtttccatgggggatgtgaaccatcccttcaagaggtttggaactggggtggccatataattttgtaaatgtgaaagaacaaacagtaaaattacattagtcaaagttttgcttgttactcaaagcaactttttatgatctcttttttccccttctgcatgatagcagtgcctctctgtgtgcaggtctatgtgcaggtcttccatgcagcaggcagctcagacttctctcaaggataaaggctttatgtgggataaatttgtaattttgattcaaactccagtggaagacagtgattgttgctatttttcttccttagggagaagtagacaatcagggcatgctaacatggaactttcagttctctctgaaatactgttatgtgtgcagtaacctttttctaagattgatttttgtttagtaattcagaaagggcaaattccctggtcacaattagtttcatcatacatacagataacaccataattttggagtacttaaaggtttgcttgtttgtggtttgctctctggggttgtgtctggggttgaaaataaataaccacagcccttggttcaaatagcttatctgttacatggtagcagctacaaaacatgctactgataatcaaatatagcaattctactaaaataaatgtaacatccaccatatgtatattgaggcatgttctaaggaactgtgtactatgttagcattatatgtatttatatgtagacacatacatagatatatttgtacatagataacacacacatgcatatttattaccttcttttatgacaccctccttagaggggtggtattattgtcactatgcagatgagcaaactgagtttgtgagagatcttataagtactcgatctcagatggatataagaactgaagtgagaaatggccctggggcaatctgttttcgaacctgatattctttttctctgcatcatgctgtactacctaggatatggaggtgttgttactgccaaaggactttgatattgaggtgtgcaagtgagagagctaaagtgtggatggttttgcctcagctgggcagactggcaccaggtctgcgtctaccagggcagtgtcccttccaccactaggtgcttcaacaggggcagttttttctcttttggaataaatttcacaggtactccatctaatttttacctttaaaacttcttgccattagcatcctttaaaataatatgctggtattttattatactgttatgtgtcttcaagcatttcatgtaatctggtattctttgtaagtttagaactgtggattaccagataaagcctgccattaagggtgaacaaagagtttccacctattggaagcagtcaaatagcatcacagtttaaggataattttgtactgtcttttggaagttgtaatggaaacaaaatagaatgtggttcagttttaatcatatatgaactgttttaatgagtgctgcactgggactcaagctatgaaaccaaaacaaaccagaaaaatggcaatggcacgcatgtttgggggaactttatctttttccagtagttcctccttgtgaggagagctcaaggcttgctttactctcggagggactcaagtgattggttatttgtggaaagcaaaattgggaattctcaacctgattctcccctcttttgtggggcagctgcctacccaagggaggaggcattatgcattctagtgcatttctacaggtttgttccccaaagtgggttcatgggtctgtaaatgttggttgcagtcaagttatgtcagtaagcctggttctcaggttcagttgctaagtccagctctatttggaataacaataatattttaacctttatatttacttttagattttatttctcagtctatactgatcttgatagggaagagtgggctaacacaggggactcatagatatatatgaaatagatattatcagtgaataattatatctgatcatttatatacatctgacactgaatttatatatacttttgttgaaaataaacaaatgttctgacactaaatcctttttatgccttgtatctttgtttttttttttttttttttttgagacggagtctcgctctgtcacccaggctggagtgcagtggcgcgatcttggctcactgcaagctctgcctcccgggttcacgccattctcctgcctcagcctcccgagtagctgcgactacaggcgcctgccactacgcccggctaactttttgtatttttagtagagatggggtttcaccgtggtctcgatctcctgacctcgtgatccgtccgcctcggcctcccaaagtgctgggattacaggcatgagccaccgcgcccggcctatgccttgtatctttgatagtgtattgaaattaaggagactaaatctttgaatttaatgatattacagttgtttcttaaactatgtttcgaatatctaattttctttggctgtagttcaatgatttcttttttattgaaggctctaaataagagttttattatgttaaatattgtatatttaattatatttattacatataatttattctttaaatttgagcaatatagatcatatattttgtgcttaaataatagtagttaatcgatatattattaaattcgttttagctatagaactcttaatatgtctaaatttattttctttgatatcattttaatactcagcacaaattgtactgaggtaattgctattgcataaatagttgtagttaacatcatttgatttataattttataatcctgtaatctaaaagaagtataattcttaatttcatctgatatgtaactgaaacattttaattaaaaatagtaatgcctatatgtcttctagtcattcatttaccaccatcaagcccctcatctgccccacaaacatacttggaaacaaccaaaatgtaaattgacttttctttcaatagctaactcattattccaaaaaattatcaaatttccttacctacacaaacacactccacattttattggatgtgattatgctgtattaattctctaaattaatgtaagaattcttcaatctttatactcttaaaacttcacatccaggatagttattaatttttaacctgtctctcacagtagttgtacaaatctcaggtgttaacttaaatatttatatacattaatagtcatctttatgtttttgagtcagggatcctacagagaatctgatgttagctatgcacaagaattcataatcacttatcacgggtcaataaactgcttagagcagttgcaagaacaagccaggtggagaatcccttctctactgtcaaatatccactggggcgtaacaaaaatatgaatgcttccagaaaagctggagaccagcaaatagtagaaattggcatgaagcactgaaattaaagatttgatttaggaactatcaaacatgcttccatcagggctaatatcagagctttctggaaaccacactaaaatttgaaccctccttcccctcccagatgtcaagaatgagtactgatgcaaactttggccatttctttttcattacttctgctttgcttgagtatctggatttgacattgtatgttgttactaatattgtcttattttaaaaagcatgatccttttgtggtgtcaaagctaggttcatgcagtgctctgttacacttggcaatgatgagcaggccttatttaagactagccatgctcgtaggatgttttgacctcaagaattattatatgctttactagaagcacagaatacaaaggactctgaaatgaccttcttagccttttaattgcaactctttttacttaatggcagataattggttttggattgccttacatcatggaaacttcaaaaaccagatgattttttttcttttattctactgttttgctctttaacataataggataagtatttttttctgtgttccattatcatacatgtgtattgcaggtgtagttggcattggaaattttggcggctgataaactggcaaaaaagcttttgaatattagatgcagaaattagatagggctaagctaccccatttaataaagttaacttctcttttgtcatgttactgacaaatgttgcatatgaacaatagcttatatgcacagtagaaaccaggctctttctcttgagagtaattctacatctgtggaaaggggaacattagaagtgggagttactttaacaagtgttgctatgccgacttaccaacaactgctgcaagttattttgcaagaaagacaaggtggaatgcacatgtattctcaagaataaatgtccatttatagcaatttttacattaccaaatatttatcagttagctaatatgtacaagtcttgaataaccttattattcaagacttattattcaaggttatttgtggtcatgattaaacttattcaattcccagtctgtgaatttagctcactatataaggttgtaatggtaataaggttacttgtaagaatttagaagtgctcatatgtacacatagctatataaggttacagtgtatgtaatcataagtatgcacatatacattgtgcaaatccatgtagcaaaaatttggctgtgctaagaaaaaattcaaaggaatatatccttcaagaataaattgaagagataaagagatttccattctctgccttttctgaagtcctttgaatagtacatttttctgagagagacattcttgtccccccacatcattccaagtagaagcagagaaacctttaactcttcatcagtgaagttgctgagcctcaataagaggacagattttacaagcttagaacatgtatttgatgtctgtgtagtgtatgtttctgacgttaaggtgtttgaggatactctcatagttaaatgtgtagagtactgccctgttacatcattttctgtggttgtcttggacttcaaattgcaggatttcttaggttgtggcacttttaacttgcatagaaaataatagtctcaaaatgcaggggtaggaattggttcaggaagccatgtgggaagatgtcttaattttttttaattaaaaggattgtcatgtaagagtaagcatcttgttaatggatgttatgaatgaaagtgatcttcaaaatggaaaattacatagcctagagttgacttctgaatttcagagtaatgaatgatgtctctagggtgtgatggggagcagtaaatgaagtcgttaagagaagaggttctggagctgtactccttgagtttgaatcctgttctaccacctccaagccttgtgacttttggcagttacttaattctttttaagccttggctttattaactgttcacttgggttattagtaacttctgcctcactgggattcctagcatattgtaagaatatatattatatatatactatatattatattatataatatattatataatataattatataatatatataattatatatatagtatatatagtatatataatattatgtagtatatatactatataatattatatagtatatatactacataatattatatagtatatatagtatataatatatagtatatatactatataatattatgtagtatatataatattatatattatatatactatataatatgtagtatatataatatataatatatataatatatactatatagtatatataatattacatatatataaatggagacctcattggagagcaagattctaatgatagttgtgccactgagtaactatgcagacttggacaagttgcaccccatttttacctctccttctaaattgtaaaattagacagtcactatatgctgtctcattctgtaccaattaaaaattccataattctatgagtattttaccaatgaataccaaatttttaaaaaaacttggatcattctgaaacttgagtaattgaaatgcctcccaaactgttttattttctgaatgtaaaaagcagacccttgagtcagtctcatgcctagaaggcttgccacttagggttagcctagaaaacagttttttggtgaagtttacctcttaaaatgcccatcgtttcagcattagcaactgaactggctagaagagcctgctgctgcaaggatctgtgtgcatagagggaataaaatggagtggacagcaagcaagggagcgggattattggagagatacagcaaatggaaagaggcaagtgtaactgaatggaaaaaaaaattctccagagagagtggagaaaattgttgaaaggaaaacataggaaactttatctcagggatttattccaagaattaaattccagagaagatgcatttccacaatgctttctcagtccatacttaggctgtgctgcagtgatgatgattattcaaaataagaaaattgtaatatcctgaagaatcaaacaaaagttaaatgatttttattgttccatggaatacagtatattctttgaaaatgaattttaggagataagattcctgccattaacttaaagattatgaaaaccctaatttcctgagcattcttattgatactttaccgtctaaataaggcgttagaagttttcatagttaactggttgtttcagttgtattttacccagatcaaaatttgtaagccacgaggctgacagtagcattccaatgctctcttgtgagctttttaaaactttgctaaccttataagatatttaaaaaattaccaaaagtacgtaacaaagccaatcacacagttgaaaaatgacagaaatccatttcatttgtaatcatctggcataaatcattacttctgtaggtagatatgtatttagctacttaaaggaggaaaactgatggaaaatattttatttttttattttaaaatatattttagtaagtaaaatgctaagaatataaatgaaattttgacctctgatttactcatgttattattacctttgtgtatatttcaacatgacttgcagatatacatgaatggattcttaatataaaactgggtaaaagttttataaaacttttatatatggtaaaaattttttataaaagttttataaaactacttatatagggtatgtaaatataagcttataaaaatgtattatctgcattctctgcaaaatcagatatgtgcttttgacaaatatataaaatacatttcctgcttttcctgtttttttgtttaataattttcatgttacctaagtgcctatgcatttttcatattcatgacaaacttaaatggtatttacttggttaggacagagagagtacttggaaataggaaaataacctatctaaaaaattcaataaccaaagatgacaaagcattggtaagcaaataaatagtaaattctactttttacaataacatgcagaaaaaaattacatatatttttaataataatgagtagggatatcaatatctttcactaaagacctttacttactcttttaaaaaaacatgtatttttcctcatgatcttatttagtgaaattgttctaagaaacataaaaagataaacagtatttagagatacatcttttattaaatctacattcaggtttttcttgagataaaatatagtttttacaattatacattttaaattacatattttaacattagaacaatatataggtaatagtaataattaccattgcaaaaaagagcaagagtcaaattgaaaaatagatttaatttccaagaatagtaacattaaatcatccataattttagattaaccaaatccaaatcaaaagccaattgtgcagttcaatcacttatttcaacatggtacaaaaaagtcaagtgtgtgaattatctggcagaagaaaaaaattcaaaagtgggcattcctcaatttgtattctcctggattgaaacattaagacttagaaaactccgtagtatctaatttggtatatttcattagtgcttgaagttcgcaacactgaattcctgtttcctaagcttatctaaatgctaaatgaaatgtatgaaatatctttctgttgaacaacagttacagttcctactggattttcttttggttggaagactgaaagagtgctcagagagaagtcagagagatccagttcacatgctaatacatgatttattattcttgatttattattctgtgaaatgtgaaaaaaaatccttccctagatggtgtcactgattgttttgtttccaaagtattagtgataagaaaaatattatgtgagctcaaaattgtaaaacaaatacatacttgagaaaacaatgtctaacaatgtgatgttcaatataaacaagcttttctttatgctataattttgcagtgaaaagatttttgaaatgctttattaatacaatctgagtatttgacatgagttgtagcacatcacacagaactgttctagatcatgtctactttgttgtaaatgttcataagaaaatatctagccttaaagattgtacaacttggcatttccttacaaacacattttaaagaaaacagtgtggatgaacatttaaaggcttctgatttctaggatttaagggagggaaatttctaagatcaggcaatatcatttttataattatctgattaaatgatgttttttcttaagaaatctgatatcaggtgatacaataatatggacttcttcctccaaaaatttttcataaaatagctggcttccttaaaactgtaaggaaaaagcttctgcttctattctatttgaggtaataattggtaggtaagagtttatggaaaggatttgcagaagagatacacagacacagcttttaacatttctaatatactgatattcagtatgagtctacagttgtggccatcaagttgttttgtgataaagtagatgactacagggatatttgaaaaatctcctcagatgttgggaatattaggaaataaactgagtctactgccacttcaaatacagagtacttccaaatactgaggctacaacataggatgagaggaatgggacataaggagaattaggattccaaccagcccaataaaggtcagaattgtgggtcattcaataattggactgtaaaatattgttgcctgtgaaagtcaaaagagatgtgaggaacatttattttgtattttcaagttttacatgactaaaacattttctacagagtggtaaaagagtaaagaaatatgtgctacagattcactgatgaattaataacgtttttcgatacaaacatgtaattgtctctaatctttctttagttttcaattaggaaatagcctaggggaaaagtataagtaacttgaaaacatatcgtaatatctttggcagtcatagtcaaggctgttctgcttatacttgttggctgatcactataaacattgtctacatgatgaaaatactaacccaaagtttgtaaatataaaattaaacactatattaaacctcttagtttttttgtttagaagttcttttcacatcatgatcaactgtgtttgaattcaaaatagtctttctggtttacatgtcagtgaaatacatgaatttttagtgggtgtttctgacatgcaaaagggaaaggaacagaatatcataaatattaggttccttctccccctaacagcatgtagtgaatataccctgcaagatgtttttatgattcatgtaattttgtgatcaaataattcagtcaactaaaaatatatttttccagtgacagcatggctatttgtctgaggcaaaagtataaccagttgaaaaggaaagttttgtttcctttattacatggttaaatttgactatttcagtagtcaaacttttaaccactagctagactttaatttgtggcaaaattggtttctagtaatccattaaattagtttgttgttatactttagatttgtgttaacacaaagaatgtaaagttattttaaggaaaaaacattagtagatgacttcgatttgcgagtttgcatttttaagggttgtttgaggtcccttccttatgttcactttagtaatctcactttagttcctgtgaagggaaatccctactgtgtctttagggatgggttaggatagtgggctgcctttaggaaggctaataaaaccttcctgagacaccttactaaaggtattcctcacctcatgaattggtctaagcatcagtcttggaggctcagaagcttgactttgaacccactgtaagagtagatccatctcttaaaaatagattcgtccataatggtcgaactaatttacactcccaccaacaatgtaaaagcattcctatttctccacatcctctccagcatatgttgtttcctaactttttaatgattgccattctaacttgcgtgagatgttatctcactgtagttttgatctgcattctctaatgaccagtcatgatgagctttctttcatatgttttttggcaacataagtgtcttcttttgagaagtatctgttcatatcctttgcccactttttgatggagttgtttgtttttttcttgtaaatttttctgggtatatacccaaaggattataaatcattctactctaaagacacatgcacatgtatgtttattgcagtactattcacaatagcaaagacttggaaccaacccaaatgcccatcaatgatagaatggataaaggaaacatggcacatatacaccatggaatactatgcagtcataaaaaagaacgagttcatgtcctttgcagggacatgaatgaagctggaaaccagcattctcaggaaactaacacaggaacagaaaaccaaacaccacatgctctcactcgtaagtgggacttgagcaatgagaacacatggacatagggaggggaacatcacacactggggcctgttggggggtggggggctaggggagggatactattaggagaaatacctaatgtagatgatgggttgatgggtgcggcaaacaaccatggcacatacatacctatgtaacaaacctgtaccttctgcacatgtatcccagaactttatatgtttttttaaaaagccattttttagtcaagtaaaaaaaagattcatctaaattaatataacatatttgtttatttgtttatatatgtatggatgtatatatgaattcttagggctagagacaggcactataataggctttgaagatacagtagtaaataagtcattgtcactgtccaagagggaacagatatgttgaacaagtgaaagtttgcttatagtcagagctgatattcagttgtttttagttgtctgccatccacgtcagtatccattctgattgatcagagccctaaatattaccatagtttttatatcactgtattgggactatctctctacttgggaaaccaaattttaatgtcaatttgttgatatataatgagaaatatttcagaggaaccggaagagtagatagttcacctatgtagaaaaccaaacaatgatctgagtgtgaattagaagactgagatgaatccagtgtttaatctcatcaaaccaaatgaggtttatgtatccatctgatgagagtcttgatcttctcagtggcacaaggattctgagtcatttgcttggatttttgtagttggcccagtacagtacttgggtggatattactattgagctcttcttagacttttcttttactatacttggtgtatgtctctacattcagtctggtaacagtcaagtcttattcttctcagattctgtttgtctaagatgactacgtctttttgtctcagtgcaaaagagttaacatttaacactttgaagaacaatctgatttctaagttcttaagaaataattcatcatagcttccaaggactaacaagagtttctatttgaataaagtagctaaatattcttttgatttctatgttggttattttttatattctggaccaaactaccatgttttttctggccaacagatttaaaatctaaacataaaggtttatttttcataaatatgttttgaatttgaccttcacagggaacattttaagtatcataatcaatgaggtttcaggtacctctttacagagagctactgtgattatgtttttgtggttggatttttctgaacccattagctgcatggtaatggggtggtggaattaaggttttgagaatcatcataccgcccgcttaccagaagtcaataaaaaacaaacatgaatgataggtttatgttctaggacagtatatttctaaaatggtatttgttaatccctccagagaatacatcaaagggaatatgaaactccaactttgatcaactgagccttcttaaaattagactcagcatcaaatgttaaaagatcagatggaagaggcaaaatttagatataagcatgagataggtcatttatccagagggaataatgtgtatatttatattggtaaaaaaaaggaaaacaaaaattttgttttctaattccctacattattaaaaagtatccctcctctgttcattcctgacatcatttggaaatatctgctgcttcagtgtgaatacagagtggacttcagtaaccaacttcttccatgtgcttcaaaaacattcatggatcatgagcaaagcaatatttgaatgtgaggggtggttttttttttttagatatttagacttcatagaaaagaaggaactggtttactgaaatttatgttaaatcttaatgggaatgtaggaaatttcatttatcagcaatctaccttgattggtattctacaatgaattaatgaatttctatttgtttaggcttatctggaaagttctgcattccaaatatgttaagaaaacatggtgatctttaaattagtcatctttggttttttgaattgattgggatttgacaaaaatgtaattattaatttctttcaatacaaacttttttttcttgatcttatgggaatactagcacagttgggcctaaagagggttctaaaatgagggaagctaaactttgtttcaaagttacaatgccatcacattttaaagcattaatgctgagatattaagtaagtgatccaatctagttaggtggtgagtggaaccagagcttacatctttttctcacttcaatactgttttcactgtatcactgcagtttgaatagacatttctttatgagcttcctcagtgcctcttgtttcaatcaaacataagacaatgaaataaccagatgttgcagataaagttcctgaaacaccagactctgagatagagattagaatgcagggggttggtcagggactaatcttggagcaacacctctgtggaaagtgaaggaagaatggggcagaggaagaagttggcctgtggcacagtcccaacagcggcctcagcagatactgcaggcccccatgtagctggaatgccccacatagttgcttagactggcacaaggggactggaccttatcccccactttgagcaatcactggatggaagctacctgggaaggagtcataactaggtgaggtgtctctcttcagtcctcccgtagtctgagggaaactcaacagggtactgtcactggctgttagtctcaccagctgagagaatgagtacagtgtcgaagagggacctggccagtgctccacagcatctactacaccattattgaatgactacatgatgttggctattgcataagtcactctatgtagggtttcactaatccatagagtaaacacacacaaaaaaaggtgctgatgtcttcccttttctaggaataaatcatgatttagagaggttgaataacttgcccaaggttacataaaaatggcaagtctgtctggctaaaaagctcattttttttcataaagctgctctttaggtagcataaatggtggagggtggattttctaaactctgtggttcctcaaaatcctttgattgtggagaaaatttaaatattgtattcataaatactgttaccacaagtactaccagcactcgggatatatttaccattgaatgatgattaaaccaagttagttaggatccctgactttgaaaagcttacagacttgattgcataagcaaggtaatttttaaaaatgatacacagaaatctgagtttttttcatcgataatgtaacaccacccactttgtaaagtggttataagaatttatatgtggaatgataatagcacaaagtttgagacatcttaggcacttgaaaatttactttctgtgtttatattcagtacaagcatagagatattagagaatatttgcatttatcatagttgggaaaaaataattttcattttgattttaattagcggtgtcctcttgggcaagtcagttggtatctctggcccttggcttttacatttcaaaaatgaagtgcacaaggtggatgaattataaggtttataccagcagtaatattctactaaatgctgttgacaatagagatccaggtggttcaagatgaaacaactcataaactcagcaactggtacatgatgcacctgtgtgaggaagtttatagtactctgctatggcttcttgtctttcctaaagaaatccatttcctctttaatatttataatgtgtgccttatgcaaagtatgtgctgaataaatataaagtgactagagtgagacagagatattatatgaaatcagatataatctcatcctcaagtggaattcagtttaacttttatcatgatcagtgggaggagggagcaagcaaattgatcagttcttctaccataggaaaattcttgattattaaaaaacaattatctcttatggtcatactgaccaaaagcaatttatatattcaaagctgttccgatcaaactaccaacatcattttttcacaaaattagaaaaaactattctaaaatccatacagaaccaaataagagtctgaatcactaaagcaatcctaagcaaaaagagcaaagtaggctgggcacggtggctcacacctgtaatcccagcactttgggaggccaaggcgggtggatcacgaggtcaggagattgagaccatcctggctaacacggtgaaaccccgtctctactaaaaaagaaaatacaaaaaattagccgggcatggtggcgggcacctgtagtcccagctacttcggaggctgaggcaggagaactcaggaggcggagcttgcagtgagccgagattgcgccactgcactccagcctgggcaacagagtgagactttgtttcaaaaaacaaaacaaaacaaaacaaacaaacaaaagaacaaagtgggggcatcacactaccagacttcaaactatactacaaggctacagtaaccaaaacagcatggtactgcactaaaacagacacacagactaatagaacaggacagagaaccctgaaataaagccgcacacctacaaccacctgatcttcaacaaaggtaacaataacaagcaatggagaaaggactccccattcaataaatggtgctgggataactggctggccatatgcagaagattgaaactgaaactcttccttacactacacacaaaaatcaatataagatagatcaaagattaaatataaaacccaaaattataaaaaccctggaagacaacctaggaaattccattctggtcattggcctttgcagagactttatgaccaaatcccaaaaacaactgtagtgaaaacaaaaattcacaaatgggacctgattaataagcttctgcacagcaaatgaaactattagcagaagaaacagacagcctacagaagggagaaaatatccactatgcatccaacaaaggtcaaatatccaggatctataaggaacttgaacggattggcaagcaaaaaacaaccccgttattactcatcactaatcattagagaaatgcaaatcaaaactacagtgaaataccatctcacaccagtcataatggccattattaaaaagttaaaaaacaacagatgctagtgagtttgcagagaaaggtgaacacttatacactgctgtcagaaatgtaaattaggttagccactgtggaaaacagtgtggagatttttttagcgaacttaaaacagaactaccattggacccaccagtctcactattgggtatatacccaaaggaaaataaatcattctaccaaaaagacacctgcacatgtatgttcattgcagcactattcacaatagcagagacatggagtcaaccacgatgcccatcaatggtggattagataaagaaaatgtggtccatgtacaccatggaatactatgcagctataaagagaatgaaatcatttcctgtgcagcaacatggatgtagctggaggccattatcctaagtgaactaatgtaggtacagcaaaccaaaaatagcacatgttctcacttataagtgggagcttgaattgaatacacatggacataaagacaggaacagcagacactaggaactgcttgagtggggaggatggaaagagggtgtgggtccagaggctgcctcttgggtactatgctccgtattttggtgacgatttgtaccccaagcctcagcagcacacaatttttcactgtaacaaaccacctgtaccctctgaacctaaaataaaagtagaaaaaattatcttgtaatattaacatatatatttgtataagtacatatgttggatattgtatgtattttgaaatatacatgtcaagtagacatgctgcctgaccacagggaaattgtgtgaacatatatatgcatcccaaaagcatatacattatgtatatgcatgtaatagttctccccttttttttgctttttaaaaaacttgtctcttcttatgaatttgtagtacttaagaaaaaatatctgacaaggaaagcaagcaaataaaattagatgaagtgtgccaaggaaagcaatcctaaatttcagagggcatgccacaaggtattcagatctcctccctctcctttctctctctccaccaaaaacaaacccaagcctttccctatgtgagatgaaggaaatctataactttgtgtattggcattacacagtgtcacagtatgaactcaaggtaagtgggtcatcttggagatatacacttgctgttttttcttttccctctacttccgtttttattggataatccccaaagaatcaaagaggaaacagatagctaaaggctcccacccaagctatgggctcccacccaagctaaaggctcccacccaacctatttattttatttaaaataaattttattttacttctttgcattctttatcaccaattgctacaggaggtctagaggaaaaggtgacagtttaatctcccatgatgttattctaattatgtttaacaagatgccaatcatcttgcaatggtttaatcatgatttatatcaaacattcttagtgtaggatgtctccctcccagcctttccctgaaatcttgcatcaaatcagttgagacttgacattatcttttcttttttaaaaagtttctttttttaaaaaaattcaacaaagacagcaaagggattactatattaatattacttggatgttgtatcaagtaggttagaatttgatgtactttttaaattaaaatttcattaacattaaaatttgccttgattaatggttttgtttaaaaagttgatctaacttaatgagatttcatgtttcttttttatatttctgaaaagagtatgccccaagaggaggatttacacatcttcttacatagcttttacatcactaaaagctgtataaaaacatcaaactttgaattgaaaggctgtacctaaaaatgacgtcatgaagcaaatgggtagaactggataggatatagtgctgtctttgtcttttgcttcagcagcccaaatctaattgttgaataatgtgctttagaggacagtagcctctttcaaaccgaaacattacagaaagttccacccaggcaatgtgctatttctagtcaagtatatggagactttacatgcagagagcagctgtaaagatgttgggataggagcaacttagaaaccagttcaaatagaaacttagacttgtgtccaaaatagctttatatgaattatagatgtttaatgttcagccctcctgtaagcagatatttaaaaataataaataatttttagattttgctcttctcattttctcctattaaaaaaaaccttggtgaaaccccatctctactaaaaatacaaaattagctgggcgtggtggcacgcgcctgtaatcccggctactcaggaggctgaggcaagagaatcacttgaacgaacttgggaggcggaggttgcagtgaactgagatcgtgccattgcgctctagcttgggtgacagagcgagtctctatctcaaaaacaaacaaacaaacaaacaaaaaaacttttgagttttaatggccaaatataatcctcagtttgtcagttacacattattaagtcttctatgaaatcatttcatacattctcttttgtgttttggccaggagtttagcctgaatttcaaattcagtgtgatacctacatttcttattgattatttgtataagacaaatagtaatcaaggaagttcatctgcattgtttgcttttgaattatgacttagttttatagaaaagaaatctgtaaaacattgtaaaatgagatccctaaaagggacgtattacagaaaaaatgtttttgacaatttaaaagctattcctttcagacaaaattgcatatatgtaaactattaacattaattcccaagcaaatcaagttttattaaaaatttttttggctcagtttgcataatggaactaacagttcatctacttagaagctgtacaacattggctggatggcccttcagtaaaatgcctgatgccttgttcatcctaaaaactgaaagtctggtgattatgttatagggagaagacaatcattttgatttctttgaatagagattcaactcggattatcttagcgaataacttatagagtgatctattatccaaacatctcctatttactttaattcactattaaccaaaaacctggggtttctcatcttttcctggttgagatttgatggcaaaatggcacatagtcttcccattagatactcttctctggaggagcaatatatttgtatctaaaactttgtatttatattgaaattctaaattggcatttttttttgaaatttccctttcaatttttccgtaagatggacctctctatataatttcagtaatcactggggctcagtcttcccagctatcagtgttattttcatggagagtggggagactatactgtgttatagtttagggttataataataatatacctattattatttcaaaatgactttccatagaacatccctacttgatattctaaatgggatcatggaaggaatctaagtattaaaataatatttctctttctctcaaataccactacaaagctaaatggtaatcaagagcatagaagcaattttgcagagattttgaatgatcattcaactgcacctcgatagtgagtggaacagacaaatgcagctgagcacacctctgctctccagcgacagggagtgaggtttgccaccattcaaacctctgggggcactgacaagcttctatttttaggtctgtgcctcctattggaaacatgctgcactgtgtgccctgtagaccacccagcccacccactttttgtggtttggccttctgtaaggcttgcctgcaggtgtgcccttactcacccaccgagaacaagctactctgccatttttctgaagtttaaaaatatgactggctaaaagaagacagtaagcaagtcgatttttatactgtcctggaaagttataattataaagtttggtgaacttcgtgaactttttcaagcatgtttttgccgcagacttgtgattgatgtggaggccccctggggcataggtaaagcagttgaaagataggaagttgagtgagctgtctcttgtacataacctgccagaggctctatgaggttaatgcatacattgcctcacccccagcccagtgcaatttgaaattagataaacattttggcaatgatgtggcaaaccgaaattcaaccttgcttttcaatagttctattaactttataaaagtaataagctattttttgtaaactaagctgttaggcatcaagagcacgctaaagcagctgtattaagtagaaaggaggtgatttttttcctgatgtaaccacactctaaatcttcacaatctgtcaaagcttgctctataattctaagccagcaatattcaaaatagcacaataagtactgttagcaagatgtggaaattttcttgagcagtaggaatgtaccccagaagtcaggatgtttgccgaccattagctctacttgcatgcaacctgtattggctgtcccttagggactcagacttatggctccaaagtggacaaatgaacacaaagtctcatgaacactcaaaaagagcttcttgcttcataaccctgtgaactatacagggcactcctttccttagtgaagcatcatatgtcttcataacttccttggaaacttttttgtagtaaagggaaaaattgaggctctattatgtgtcataacctgaatctgccacccatagtagagctttagagccaaaagggattttttttttcttcagatgtggaaatcagaacctcgggggctagtgactacctcaaggtcacatggtttgctaatggaggagccaagaccagaagccactgtgatctcacttcgaacatagccaaataaccacataagcacgaattacttcaaaaggaaggtgatttagtctgtcttatctggcacaaagtaatcacttactagatgttagttgttgttagagttatttttattatttttatttccctccctctccagatgttattgtgtttcacaacaatatgttttaagggtttatatggcttgtattcaaattttaaagaaaagatcttgtgtaagtttaggtctggggaagatctcgagagagcttctagtttagtttcataataatattgtccttcccacagtgattttttccacaataataaaatatctttttttagctagatcttgtgattttagctagaagatagtttgaatagaagaaaactttttaaagttcattttcagagtttgctgaaaaaattaagatcatctgtttctcttcccctctctctctcattcatacatacatactcccctgatacattatacctgagatctatatgaaaagctaacattttataaatactttgaaaactaattccagtgatgagttaatttaaagcattagatggatagcatatttaaacaagctgttcatgtaaaaatggaaatttttcttaaaaaaacattatttaaaaaaatctgtattatggaatttttacatcagctcttattactaagatgtttacataaaaagtgttccataaaggggaaaaattatgctggttgcacctataatttgctttgctccaaaccttggctatttaaactgcttccatttatgtgcacaaacctgaatgagttttttttatgccctcaaattaaaggcccgtttggaaaacttgagctaacaagcacacttatcctgccactaccatctttttcccaatatattctcccaacttattgggaaggtaagtttgtaaacccaaaatttgctctagctactaatttcaggtccttcacctgcaccacataacatggaataaataggaagcaataaccctctggtgaccatatgtaaagacatctaaaagaaaactggacatgaaaggaagtaggggctcagtaagttagattaattaatgaacaaactaaaatatggctaacatgctttgctatttaataacaaccacagtcacaacaacactgaaaactaatattatttaagcatcttactgtgagtcatgtatggtcccagtactttatatagatatctcattggctactttcatgtgctcaagaagttagttatgtgctgtttagccagtaatgacatcattgccttcatgggtattagaactataattagcttttatgaagctaagacattctctacttatgttggtagtgtttagcagtatttttctggttaatgccaacataaacctgttccaccctgcaatgctgcctaggtaatccatatggaaagattttctgtgacattctcatatgagatgaacataaggtgagtgtgtgtcttttaagtttcctgagtctttctttaggtataataaaagcagataagatcaaaatgagacaaatttttgatgaacataagagtagtcactttgctgcttttctgtcttatcatcagcagttaggctcacttcagtgaattcagtccttgtagaataagtctgccttgccactgtgactgctaagttatttccacaaactgtcagtgcagcttgctagcttttgtctttcttctcgtcatttgtcaggtccttagaattgggctacagtgatttttacaaggatctttgttcactggtagttttgtattgtttatataaaaaggagcaaggctttaaaaagtatctgtggctgggcccggtggctcacacctgtaatcccagcactttgggaggccgaggagggcggatcatgaggtcaggagtttgagaccagcctgaccaacatggtgaaatcccgtctccactaaaaatacaaaaattagctgggcatggtggcacatgcctgtagtcctaactactcgggaggctgaggcaggagaatcctttgaacccagaaggcagaggttgcagcagtgagccgagatcatgcaagcctgggcgacggagtgagactctgtctcaaaaaaagtatctgtgctggcctggtgcagtggctcatgcctgcatgcctgtaatcccagcactttgggaggctgaggtgggaggatcacttgagtccaggagtttgagagcaccctgggcaacattatgagatcccctctacaattaaaaaaaaaaaaaatatctgggcatggtggtgcatacatgtggtctcagctactcaggagactgaggtgggaggactgcttgagcccaggaggttgaggcttcagtgagccatgattgtaccagtgcactccagcctgggagacagagcaagaccctataaaaaaaaaaaaaaaaaaaaaaagtgctaaacaaaaatccagttattttaccttccccaaactaaaacctttttagtttccctactgctgttggtatactttcattttctctagcatggcttgcaaaatcctgcaaaatcttatctctgcctactttgtcatctttatctcttatttctccccactttacacacgatgctccagctgaactaaatcttaagttacttgaacagtctatgctgtcttgtacctgctgacctcactgcccaggacactcttttctgttttgtctctgccttcctcctttacttggctcactcccaaactgcatatttacatctcagtttcttgatttggttagaaatggtactgtttctatgaagtctaaacccaggctatagtatagcactgttctatcagagcaattatcacattgtatgatcacaatctacttatttatctgcatttccaataatccatagtcagagattatatcttgtacatgactgtattcccagaacctggcacagtgtcaggcagataaatgtttagtaagtatttattaagtgcggggatgtggggagatgagaagagacaggaagtgtgaacagagctaataaggagtgctgtatatgtcagtcaagggacttgtcttgttggatcccagagaagatttggaggtagagaaaacttaccttcatactaggatattgatagatctttctggtagtgatgtggaagatgagttagttgcaggtgacaagaatattgacaaggagaccaaacttttatccaagagagaaaggatgagaaccttaaactacaggaccttaaactgtgggaatgagatgaggagcagatttaacaactatgaataaaacaaatgtcatagcccttggcaaattatttgagatggtgtgggagaaagaagagagaagggatgttcagagtcctaatttgggtgatgttcatgctgctaacaattataaggaggataaaaacaaattatttgaggaatgatgtttggactgatggctctatgggatatccaagtgaagatattgagtaggtatttgcaaagctaggatatggtgctcagtagcacatgtatgtgatgaacatttaggtataatgaaggcttttgttcagatgagattagccagcgagaatgagtatatataaagaagagctgaacatagaggagagctctattagagtactggcttgaggcacacttggttgcaaccaacagaaatcgactaaaaccaagtaaagtagtagagcagcaggtataataagaattattgtcatataattctaggacaggccacaaggaacagctcctacccttcattactggatgtggaatggctggaattaaagcacctctgtttctcaaaagtctggttttctctcatctttgtgctctacattttcttttcttttcttttatttatttatttaatttttattgagacacagtttcgctctgtcacccaggctggagtgtagtggtgtgatctcagcttactgaaactccacctcctgggttcaagtgattctcctgcctcagcctcctgagtagctgggattacaggcatgtgccaccagtcctggctaatttttgtatttttagtagagatggggtttcaccatgttggccaggctggtcttgaattcctgacctcgtgattcacctcagcctccgaaagtgttgggattacaggcatgagccactgcgcccagcctctacatttgctctctagccccttagcttcctgtatttccaagtggccaaggcagctgctgcctttgaatttctataatgtcatcattcttctttttgtcattctctggttgtgtgtgtctctaacttgaaattcttagagaaagatagcatttggttgattggcaaagcctgtggtttggttcccttcaggtcaggcgtttactccttggaccaagtagtataaagatgacagcaagaggtgtgagaggagacagatcctcttgggagaagttgtacctaagaagattgagtagcttttgtagtaaactgttatttaaagcagtacttctcagagtttaacttgcttattaatcatccaagaatttcgtttaaatgcaaattttgtttagtaggtctgggttattctgtgcgtcaacaagctctcggatgatgcccatgctgcttgtctgagatcctccggccaaacagaaaggattgtaaaggcaagggtagcagaggtggtgcttggagagggctgagagggcaggaaggaaatgaggagaatggagaatttgtgggtaagagactgtccagaagcagcgtgtgctcagaggcatccagtgctggagaggatgagtgaaataaaaatggaagccactttagtataaacactgtgtgaaattttgtaagttcttatcaactgagttcagaggcctatggattcatgagcaagaaggtccgcagctggattaatccagagttgggggtttgcaggaagagaataaggaacttgaatgaatatgttaaccaggaggtagatttggtgatagaccatgcagtttatgttgtttcaaattattcattgcctttagattgtttttttttttttaaagctggaaaagcctcaaccattgcttaagagagaatagtttcccacgaaaatatgtgtgggtgtgtgtacatatgcatacccatgtgcttgtgtgtctaagcctcttgcaagtgatgtatatctacataacaggctgactctggaatgatttacaacagttcatttgtttggatcttcagaaagtattatcttttgcagtcaggcatggaatgttctcttgccaacatgattatggaaagacagaactcaaagtttaaacattaacagtattacagaagaaagagatgtgtttgagggtgtggtgcatgtgggtatctttggaaattcaaaaaattgtcagtcttaatggtgcctcatcaaggaaacttcagttcaacatcttgttcattttctagcaatgtcaagcttaattgaactgattcaagtaagcggtacccttttgaactcatgcttaagtcgttgaagtagctccttattcagggtgtttccaaagaacgttttggggttgacccattacagagggaaatgaaacaattatccggtttactcaggaaaccattgttttaggaggagtgtgtgaatgaactggtattctggcatgtctgtcagaagttctggtaggggattggaatgaccaatgtaaccgtgctttaagaaagaccctcctcaagtgtagaaatgctatttttgagtgcagagcttgaggaggagcggtgagggtggtggggatgcttgccaagtctgtcacattaacagaatcacagatgtcacagccagattgccttggattctatgccatcttgaaaaatctggatagtggtctgaaatcacttaaaataacttactttgatgaagtcgtccatttctgcatattatcaatcatttgataaatgccagcatctaaaatgttattgatattttacatttcaatgatgttacatctgacagcaatttacttagatctggagaaatggtatgtggctatcctggctctttactgacttaggtattagaactgattctagaattcatagttgctggcccttaggtttaatttttagaagccaccaagactactaaatattttaaatgtttttaagcaacaaatgagcttttcatgtgttagaacttaatatatcctcatggataattcaaataatgactgaataaatgcagaccaagcaggcaacttaagctaaattttctggagataattttcactgaccaggtttttctacaagctcattagctgcaattttatatatgttcaaatagagatcaagatttacttaaatgaattcattttgttcaccatttaacacagtctagaagaagcaattattcaatatcatccacaaatctgtgttgaaagaagctaaaattgatctccattttgatttatctcttgggatctaaaattcttgttttaaagagattttaaagaataggcatttggattttataaagaagtacttgtggcaaaggtagagtaagaatccaaatctgagattaaaaaaaaaacctcacaagttaatgattattaaatctatatcaaaatgttatttatcaattgaattaggctttggcgtgactggaagacttttcattatagattagagtttcattgaaaaataaacttgtaaaaatacgcacaagtaaattactgctaaatatttgtaagcataggcaagaactgagggtggaatttggtttgttgtttgtttggattacttgaaaaccttgcttttataattatatgtaagaatatgttaccatatctgtctttgagaacatattgagccagatgctttgagttgagtagcttttagaatatgtgttaatcctgattttaccaatacctcattcagtggctacttcagtaaccatctaattaggtagccctgactcttaagagagatcaaagtaattacttactaggctagctcatagtataggaatcaattagcagtgatatttgactactccaaattggaaaattcaaagcactatatttcatacttcctaatactctttattaaaatgtttccaaatgagtttcttaaaataggtttattttagggctatgaaactctttttaagaaattgtccgtttaaaaaacgtctcttaaagaagcacttgagctcaccgttttgttctgtattttttgtttaattgtggcaacttttttttttttttccttagaaggatactaggcttacattcagaagggctggtttgaattttggtgctactatcaattagatgtgtgactttgtgtgagttatccaatctatattagcctcatttgtttcctctaaagatagaggtggtaataattctcagggttattataatgttaaatgagatatatgtgaaagcttgttattgtgaattgctctataagtataatgaagaggatgatactgtgtctagcttaactgacatttcatctatttaagataattattatttagtagcactatctctaaatgctgtctagccactgaaggtaagaataatatggaagaatgtatcaaatgttcttctgaattcatgttatgagtgtcatctttatcttttttctatccctctgagtgcctaaggaaaaaagaaattctactaaagtggtgtgctattttacctctcttaaaattttaaggcactaattttgtgttatagtaattattaataatagccaacacttaactagtgctaactatgtcccaggtacaacttccaggactttccaatattaatccatgttatcctcccaataactctgggaagtggttgctgttattatcaccagtgtaaaggtggagaaactgaggcacagataaattaacttgttaaagattacacagtcagtgttatcagtcaaatttaactttcttatacccgtgggtaggcgtggtggctcaggccagtaatttcagtacttctggagccaaggtgggaggattgcttgagcccagtagtttgaggctgcagcgagggccactacactccagcctgggtgacagagagataccctgtctctaaaaaataataatgataataaattttcttaaaccctttcttcaggtcttagggaagaatttggcaaagataatatataggataaaggaagtcatgcacataacttgggtcttggatataaaggatggcatctcttcttggaaaaatgatgctgcctgtctgcatgttgcgatgacagaggttgttgcttactttcctttatatttttatttttaatctccagtgcctataactggataaattattgttaatttcctaggattacttctgtctcctgagcccaaggcaaagtaacacaaagctgaacttgtcagaaagtcctaatcatttcagtcctgtgctgtgagtgatataattggaagaaacagcccaacaccccacccaaagagatgttccagagcacatgtactctatcttcttttcagaattagaatttgtttgacttggttatactgcatggagtctttctttaatttaggcatggttcccttcatttaagctactcatttgttcataaatttagcaaattttattgaagatctcctatgtgccagaggtactgtgcagtgctggagagtagaatggcaaatatgacagtcacacaccctctgcttgttgagttcacaaagtagtggaagaagatttacaataagaaaatcatctcacaaatggaagtaacacaagtcctctgaatagtgctacaaagcagaggaacatggtgctccagggatggataagagaaagcatttggcagacacttgatgatcatcatttattttccattgtctgtcttcggtcttgtacaagatgtcagagacttagggaggaagagcaggaggagggcaagttaaaaagaatggatggagacagagttggcaaagtgaaacattgagtaatacaaggtggccaaagagaagagaaaaacctcacttgagctgtataaaacatcgaattagtccttgaataaatcaccatatcatagaagaatagtagtatttgtagtaactaccatttttcaagaaatgttattgtatatgcattctagtcaactcagtaaaagagggagggatataataaatttagttattttcattaatattttttaagtattttattgtttgaaagtttatgtgtccatttaatggcaatttatccagtattttgaataaatgagattactgccttcatttatataaatatgtaaaagcaatgtgaatattagttgcaaaagcatctctggacaggaagatagtagaccttggtttctgattccaactggtggataaataataattgagaagaacctaactgttctcattagtgaaaatgggataatagcatttcccctgtctacctcagaagggtttttctttacataattcattcaattaacatttattgtgaaccttatactgagaacaaatagtgatgagcaaaggagacatgatcttagatctcataggacttacattccatgggaaaaaccaatgttcatttacaatgggtcttaatttttccattcctgtgatctgcggtgctatactctagcatgctcatggcatgctccttcacatcattcagttggatctctcctcaaatgtcacctctttggagaaccagcatcgctaacattgatttcagtctctctttatcctttgctttacttttcttccccacctttatctgtcattatacttgtggttacctttaggtccaacactgaagtataagaattctttatccagccaggcgtggtggtgcacacctgtaatcctagctactcgggaggctgaggcactagaattgcttgaacctgggaggcagaggttgcagtgagccagaattatgccacttccctccagcctgggcaacagagcgagactgtctcaaaaaaaaaaaaaaaagattcctttatagagagattttgtctttgctgctcattgatattgatatatattatttagaatagtgcttggcacataatagactcacaataaatatttactaaatgaatgagtaaatgagatgagcccacaagcatataattaccaactgtgacaaacaaatgggataagtgaatgtattttcgaaactataaataatccatgtttgcaaggtgatgctatttatttgaatttcagaaaaaaaatacagtctgccagaagatagctcattatttttttgtattgatagctttctattaaattatttattttctaagagtttctcttcctttatatctatgatttgtaacattgagcactatctttatggttctataacccccgccaccccagttcagttaccctctagagtagagattcttaacctgggtcagtgaacctttgtgaaattcgctgttgcctcctgaggcctcattgtactccttgaaattgtgtgtaacgtgtgtggcccctgctcattttactggagagagtttgtataacagattctcagactgtataacctcccaaatttaagaatcattgcattaaaattttttgtttctcttttactttttgttgctctattgataattctttttctcctcaagagggtttcattttccatttattttttatgattgtatgttggtatttttaaatatttactgcttgattgtcgccagtgtgtggtattctcggtttattgcatgcatctgaacccagcccttctctctgtctctcttttgtctggccagcagtgtggggatgtgccaactgccgagtggttttgtccaacccttctgggacctttacttctccatgctaccctaacgactacccaaacagccaggcttgcatgtggacgctccgagcccccaccggttatatcattcagataacatttaacgactttgacattgaagaagctcccaattgcatttatgactcattatcccttgataatggagagagccagactaaattttgtggagcaactgccaaaggcctatcatttaactcaagtgcgaatgagatgcatgtgtccttttcaagtgactttagcatccagaagaaaggtttcaatgccagctacatcagaggtatgtaaaccaaaggcaacgccaaccttctgcttttatttaacatgttctgcagtaaacacaaggaccagaagacagagttatgctcttttatgtgaatgtgaatgattaggattgggatataagggcaagaatctgttaatattctctgagcattcttgttagcaaaatataattaccagatccaaaatgtggttacagtagagttgaattcttttatattgtttatatgtggaacatttaaaggctgcttggaagacactgtagatattccacggctaataattaaaatctataattctaacatctctccactgaaaatttaaaacatccctatttagacatcattttattttgggttttatgatgttgtccttttaaggaactatggtagggaacaaatacagaaaatgaacagtaaatttttaacaagctattaacagtttaagctaataaataacacagcttgaggaaagccctctgaaaatggctaactgaatgaaataaggcatatttttattaaatatgttttctatattctggcacaacataacatttaaataatctttctctctaaaacctgtgtttccctaaagaaactcaagcttcaacatggtgagacttagttatactgttttttttttcttctgtgccttctaagtaaaaacaaacagaaaggtacaactataaaaatgactattatgatttagttatacttttttttcttctgaactttctaagtaaaaacagaaagacacgactatgaaaatgactgaccctcactattataaattgtgttttttgattgtggagttattgatttgtgtttaccatggttaaaacacacatgcttaaatttttcaaaatattttaaatttttcaaaataatgttttaaaaatgataaaatataggacattggaaaacaaaaaaagcaaattagaattacctatacaaatgccacccagccataaccactaataaaatgttgatggagatatttatttctaggcttttaattttaacaatgcatgtagaatactggttcatattgtgtctctttgcataagtgaacctataaactgccttatatttaaaacgtaaactaaagtccatgattcctttaaattctatcatagatttttactagaatagttatactaaaacgatgttttattatagaactattcttgatgtactgaatattaaaatatattcaaactgtttttcatatgaaaccagtattaaaaagtatttttgaggagaaatacttctttctcaaattagtttcacaatggctattatattagcatagggctaaatctgttgtattatgtaataattttgcatgtatcatggattaggtgaatacatttttattttgaatttattgcacgtctattacaataatagtacttgctatttattgctgtggtactggcactgctctgtgccttggacatattaacttatttaattcttattgaccatatatacaataggtgccattgttgcccattttacagataagacaaaggtagagagagatgaagtaacatacccagggtcacatggccactacccagaagagctggagtaggaaactccatggtctgccctttactactcaaaaactggcttatatgcctggataccttaaatctccactttgtttgacttttcactagactccctctccttaatagaattatttttgcatttgttcctaaaacagcctgatgatggtggaaaaaataggaggatatagagtaactgaaagggagatggcagtacaggaatgtttggaaagagtgaaaagtaatcattaatgaaaataagaactattatttatgtttagaaatcatttgaaaagtagtatttttgaaaatcttaatgtataaacaaagccttcctgaaaccagttatttccttaattaggtagttggggtttttaaattgttaatttcttagtttcaggattaaaaaatacttatcaactttgctggctgtaactcaaaagtttaggtgtgagatccaatcatgactagagatgaaatgagtagaatttcttattattactgatatcagacgattggtaatgggctggtgacagaggatagatgagtaagaggggagggatggggcaaatggtaggtaaaaagttaactagtagaaagcgatggagggcttgatgttttgcatcacattagtctgtgttctgaagttaacaggtttatctttcttgttatgttttgtcctagttgccgtgtccttaaggaatcaaaaggtcattttaccccagacatcagatgcttaccaggtatctgttgcaaaaagcatctctattccagagctcagtgctttcacactctgctttgaagcaaccaaagttggccatgaagacagtgattggacagctttctcctactcaaatgcatccttcacacaattgctcagttttggaaaggccaagagtggctactttctatccatttctgattcaaaatgtttgttgaataatgcattacctgtcaaagaaaaagaagacatttttgcagaaagctttgaacagctctgccttgtttggaataattctttgggctctattggtgtaaatttcaaaagaaactatgaaacagttccatgtgattctaccattagtaaagttattcctgggaatgggaaattgttgttgggctccaatcaaaatgaaattgtctctctaaaaggggacatttataactttcgactttggaattttaccatgaatgccaaaatcctctccaacctcagctgtaatgtgaaagggaatgtagtcgactggcaaaatgacttctggaatatcccaaacctagctctgaaagctgaaagcaacctaagctgtggtgagtttgtagcgtattcctttttttttttttttttagcattattctatgaatatgattgtcaacaaagaattatacatacacacaaatgtacctgtatgtatattcacacatatagacatatatatatatgttgtcattaaaaagctcttttaatttttaaaatgtcgtctgctcagctcttatagcacacatttgattataagccatgcatgctccatcaagacatttggttttaccattcttaagttttccctatgtcataaaatatcacagagtttatcacgaatataacaatagttataattgtggaatctcaaatacaaatgttaacactaggcttgaaacaaaagaaattaataagtaagttattggtattttttttttgagacagagtctcactgtgttgcccaggctggagtgcagtggggtgatcttggctcactgcaaactctacctcctgggtttaagaaattctcatgcctcagcctcccaagtatctgggaccacaggcgtgcaccaccacacccagctaatttttgtatttttttaaaatagagatggggtttcatcatgttggctaggctggtctcaaactcctgacctcaagtggtccacctatctcagcctcccaaagtgctgggattacaggtgtgagccaccctgcctggccagttactgtttttttttgtttttttttttttttttgagacagagtctcgctatgctgcccaggctggagtgcagtgtcatgagatctcagctcactgcaagctctgcctcccagattcacgccattctcctgcctcagcctatcgagtagctgggactacaggtgcccaccaccatgcccggctaattttttgtgtttttagtagagatggggtttcactgtgttagccaggatggtctcaatctcctgacctcgtgatcggcccaccttggcctcccaaaatgttaggattacaggcatgagccaccgtgcccggcccagttactgtttttaatcacaaaggtgatacagtaataaactgatctatatcatcctggaattaaatttcaattggatgacttaaataaacaaccagcacctaagagaatagtatttactcagccagtttaaatatcaaaactgtccattttatagaaaatcttaatcaggaattatccatttttttctttgaacatttttctccattttttttaaaatgaggatttatagtttgtttcaaatactgtgctgtctctggttcttctttgtgagactgtaaatgtgctattattggaagtagctaaatgcagaatattttgagaaataattctgtgtgataaaaattgtattaaaatagatctccacctaatattctccatttacacaagttaattctggaagcctttattttattataggactgattcaaacacaaaaagtagaagtttcattatcaactttaaatgtcatatgactaaatctaaggcagtgataatatatacattttagtcacagacataactctcaattaaaaaggagaagaaggagcctagtattcaaaagtaatttgtatatgatattggagggaagtttactgggaatttattcccacgctttgagcaaagtagcacccttatgatgactcaaggccacctcccaatttctcagacccatgcctgcccttctggcctgagaactcctgttacccacctgttcgtgtggtccatggcactcctacaggtggtggaaaggctgtgaagtgatgtcatttgaaagatatttccttgcaggatgttggaaagtagataaaccacaaccctgttccacaagggaactgcagagctttataagagctggtgatgttccctaagatcttctctcagtgttaggatagctagaaaggaccttcagggactccttgagaagtcttttatcagagaagaaattgagaaagtcaggtgtgtatgtttggtgtgggacagtgaagaataaggagagggaatggtgcacttcctgcattctgggtgactgtctttaattcaggggtctcttttcaccatagactgggacattattaagaagtcatagtatagaccattctaatatttgcctttttatgggacaatgttttgaagatgtcagcaaccaaaacaaatatggctatgttaataattgctaatacttatatttaaattgaacacacattttgtactaaatgtcattttaagcacttaacacatattggttgattacctacaccatagatcccatgttacgggttctataattgatcctattttgcaaataaggaacctgaggcacgtggagattaactaacttatccagtgtctcttaattagtaagtagccaagccaggattggagcttggaaagtttggtattagagctgtgctcttctaaccagtataaattagactgtcattcatcataaacaggattagatattagatttagtaccaggataggctaaagctcattcttgctcaggggagaagtatgaaggtccaagagccatctctctggccagcagtgcattctgtgagaaaacactaggtttgcagtgtgttaacatatttgtttcaaacaaataatatttgtttcccacaatacttcctggatacctaactatgaaaaagtatgattcagttttacagggattcctaagcttctctaagaatttctctagaccagaggttggcaaattaggagggcctgtaacaggccatgcatttttgtttacttgtttgtttagagacggggtttcactctgtcccccagggtggactgtagtggtgccatcagagatcgctataaccttgaacttctgggctcaagtgatcctcctacttcagctctcctgagtaggtaggacatcaggtgtgcaccaccatgcccagctaattttttaaaacatttattgtagagatgaggtctcactgtgttgtcaaggctggtcttgaactcctggccccatgtgatcctccctcctcagcctcccaaagtggtgggattacaggcatgagggattgtgcccagcacacatgtttttttaatacttgtttttctttttcttttcttttttttttttttttttttttttaagttggggtcttactgtgttgcccagactggcctcaaactcctgggctaaagcaatcttctaatctcagccttctgagtagctgggactaagctcccttgttcttataaataaagtttaattggaacacagccatgcccattagtttatatattgtctttgtctgcctctgtgctacaatggctgtgttaattgattgtgatcaatacagtatagcctgccatcctaaaatgtttacagtctagccctttaggagaacatttgccaccccctgaaactagtctaaagaactgagagtccgctttgctgaaccacatactttggacagcactagaaaagacctgctagatctcctcagccagggaaaacaaaccaatcacccacaggctagtttagccctacgacatgggtggtggtagtagcatttatttgttcctgttcatttacatttgtttcacacagtgcttttaattgatgaattatttccaatattaaacaattagatttcacataaaaatgaagttttggatttttctggtaaacagaatacactaggctactatatctgcatggccaacacagctggagctaaatggtggctgctgctttcaaaggagcttcccagtttactttagcccttagcaaccccttattcttcccactccagccccctttttgtctttagatggccatctggccctgatgggcttttaaatgggaatgctgatttatgccactccctttatacgggccaggaaactgaagcttagacaaaaaaaagtggcagaggcagttggtgggctccaacacgtgtctcctgtctccttgtctagtatttatgtctgggaatactcatttaaaaaattattttaaattattttaattgattgataagaactatatgtgtttatggtatacaacatgttttaatataggtatacattgtggaatggctaatatgagctaattaactttcattgttatctcatatacttatcattttatttgtagacagaacatttaaaatctctcagcaattttcaagtatacaatcattgttattaacaataatcatcatgttgtacaatagatttcttgaatgtatttctccagtctaactgaaattttccatcctttgacccatacattctcaactcctgtgccccatccacccctgtgcccctggaaaccactcttctattctttgcttttatgagttcaacctttttaggttccacatttaagtaagatcatgcagttctcataatttcttaaactctgtccctgagactcctttcccaagccttaagattatcggagtgcatcaaatacatactcatgtatcttagtcatctataagttttcaaagtaattttgtcaaaagggtaccgtgaacttaacggagtcaatatatttgagtctttctaacttttatagtgatcttcttgccattccaagttgacgttaaacactcacattccagacattcagatgtcctggactgtgtttcaggagaaatgatgggagagggaatttcctgctgcttaatcatcagctttgggagttgaagagtccaagtcactcattaactgacaggaaatacctgtaaacagagattatatcaaggcttgttagctaagcaaatctttgataagtgtaccctgttaacattttaacctttcattttttttccaggaaatgaaagcatcttgctgtttatggttataatttccaacaaactaatcagtacagtaaccaatgggagaatagaaatttatttctagcattccactgaatggacaatgtctgctaaatatgagcttttatttcaggattaatttgtgatggaaaaataaatagattttgcaaaggtatattgctaaataaattttagtacgaaagtaacatagtagaattgaactgactcaattcaacattaaaatatcctgtcatttttttcacatattaaacatcctagccttaataaaattgatatattattaataaatactctaacgattttagtatatgactttgttttcctatacttttctaaaaaatatttgggaattttaccttaattaggaaattttcagcagatttttaaaaacatggttaaacctgtcaatacttttaaaaacgaaatgtttatttagcagtaaatctgcttcattttatagcatcttcatttttctcataacaattttattaaatacattcagttttatgaccctcatggatagataaatttttagtggactctttaattataggtgcaagtatttatttgcctgtgtaatgattcaagtttagatactggctgatgtccgtcaattttcacaaagaacagacagtgccttctctactagttttatttattttactgattactactctttcctgagggagtggtacagtataacgcaatgaatagtctaagttcaaacaaattacatttattttaacaagcatttattaggcacttccattggttagctactgtggttgtagagataagacacacttcataaatactttattgttattcttttctgaaatttctggatttgtatttttgtttccctctctaggattttttacagagtttgctaaggtttcatcaactcttggatttttaccgtttcataatcattacagttctgttcttcatagctataaaacttcaattcattattggctcctcccttgcacttctaacaaatgattgaatgtaatatttttagattactaaatcatttttaaataataaaattaagataaatcattttatctttgcaaaggactttatactctgaggatgcccaaactctttatgaacatagatgactaaatttcactttaaatatatttatttatgaaaagttgaaaaattcatcttagtagcaactgcaaagaaaaaaatgaaaggaattactgtttttatttttctgttattgcaacttattgtgaggatttgctcttcagttatttggagtatcattaagtaggtatgagaggagcagtgggctacacatcagtcttttttaccacaacttgtgtaaatattaacatatagtgactcctttcagtagcataatttggaaagtacaacagatagagaaggattaacagctttagagcttttcctcaactgcctgtttccagtgattacatttttttcaagaaaacttggctctaaatgttgctgttaatgttgtagaactttgcttcttagttcagctagaacccgggttcttgtcacacaactaggaaaatttaggcacacggacacatcgagtggtcagtagagcaggactttattgggcaaaaaggaaaaacaaaacaaaaaacaacaacaaaaagctcagcaaagtgagacggaggcctgccaacaggccctccacctcactgattgattcccaggtccccacaggagctggagagagcagcctcctcccctgcataaggcatgaattccccgtggctccacccacctcccacaagtcgggctccagtcctctatgggcaggctcaggcaaggcctgggcaggtttcctcatctgcacgaaagcatctgatgtaaacacttgtggggcgggtgggagattctccgggcgcccctttttatctgcctagacatttggctgtctcattaatattaagtaaacacctgaaaacacctttctggtagcctcgaaaatcagtgaacacatacacatcatattctaaaaccaatttgttgatgataaaacatatcattatccaggagagtggattgtttgttctttcttaacaacctcctgatgtgtaaatccatcagccaaagaaaactgattgtgatattgactttttatgcagatatgctgaaaatggaactgggtagaaataaagtttgtatatacttttgatagttcatgtatttgtttattttggtgtgtttgtaatgcaagttttcatttatcaattaaatttccttttaattaaattagtcacttgtatttataccatttttacttaaaaatattccagtgtgatttttattgttatattggatcatattaaaatagtgtttattgagtgtttaaagcaatgtcaatttgctaaactagaagttccccagaaggaacagctaactaaaatactgagaagtaattgttgcagtttcccataaaagaatgctacatattgaaatttatacttgttactgtgcaatgaaactgatgaaatgttcaagaaaattgttaaatatcttgctctaaatcatagctcttctgattttcttttcttatttttacctctaagctctttaacatactgggaatgtagtttgcctaaaaactgctttcccacaacactgagcccttatctccctttgtcttccagagatattgtatcagtgccagaagtggcctaagaagcccttgactgccaacattgtgtgtaatatgagaaccacaggaactccctccagggtctcctctattgcatgctacagaggctgagatttcattagtctctgaactttaaaggctttttagtttgcggaagtcccttacaaaatataagtacctacaaaagggaggtcctacaaaaaatgggcatacagtaaatgtgatgcaagggaataatgggcaaaaagcattcaagacaaaattccacctcagtcctgccttaacttctgcctcttcaaatgttcttttttcattgtgcatttgcttaagttttcaatctttaaaactcccccttcctctctctgcttcctttcacagccaagcttcctcttcttgcattcactcgtcagaccttggcagtctagatttcatcattcccacacaactcaaactattttctatagagttactaccaaaatcccaatgcaaagttaaaggtcttctcattctttataattcttggcctttctggtattcttgatattgtcacaccctgcattaaactttcttctcttaaattatgtaaaaccacctctgtaaaagctgtttttacctttttaagtctatagctctttttcttatatctgatgcttaaatatagaaatatctgtggttccatcctgtttccttctcaaatctacaatctatctccagtgatcccaaacactctatagcttctgatgagtatttcctggctacacctcttacaaaaacacttttgcgtctaggtgtcacacaggcacctcagtttccgttactggacttagtgtttaccctaccccacctaagtctgctcttcttctgttatttcctatctccttttattagatcgatatgtaccagtttttgaagttggaaattagcaaaacgtcctctattcttccttttttcctctgtctttaattagttgctaaatgttatgcattctatctttaaatttcttgtatctgtatctatctctttctgtcaatccttattacttatgatatcaaggctgaattattagtagtagtcctgcttctgtttcccttcttttggttgtagaacctaaatgattgttttcaaatgaaatatagtttacttgcctacctcctcattttccctcactgcctttaagaaagagttcacaggccgggcacggtggctcacgcctgtaatcccagcgctttgggaggccgaggcgggcggatcacgaggtcaggagattgagaccatcctggctaacatggtgaaaccctgtctctactaaaaatacaaaaaattagcctggcgtggtgacgggcgcctgtagtcccagctactcgggaggctgaggcaggagaatggcgggaacccgggaggcagagtttgcagtgagccaagatcatgccactgcaccccagcctgggcaacagagcgagactccatctcaaaaaaagaaaaagagttcacaatgttagttcacctggtgaacccaaaatatctgagacaggtttcaattagtttagaaagtttatttttccgaagttaaggacacacccgtgacacagcctcagggggtcctgatgacatgtgcccaagatggtcagggtacagcttgcttttatatgttttagggacacaatacatcaaccaatacatgtaagatttacattggttcaatctggagaagggtgggacaactcaaagtagtggggagagggcttccaggtcataggtagatttaaaatttttctgattgacaattgattgaaagagttattatcagtagaaaggaatgtctgggttaaataaagggttgtggataccaagattttttcatgcagatgaagcctccaggtaacaggcttcacagaggatagattgtaaatgtttcttatcagacttagggtctatgttgatgttaatgctggaggggtgtaatgaggcatgtccaaccctctcttccatcatggcctcaactcgattttcaggttaactctggagggacctcggccaagaggaggagtccattcagatggttgtggggggccctagaagttcatttttggtttacaatcttgagtgcccaccactcaaggttctagtgtgtgggattaaccactggaagaaagacagagggttctagtgctcatggtgttgctattttccaaagccttacagcagctatccattgtttgtgtatctgatcatccttatcagtttttactttactttagcaaagcccagtgacttgagtgcacagaccgtctcagtgcctccttggtacttgttttagaaattctgtctgccagtaaaatacccatctctactttcttacccctggctctctcacagcctcctgtgcctcatgggccttcttctttgaaatggattttctgttcgcttttcttaccaagctgctgtcacatcctcctttgggccactgccaccttcggagcacttccctaatagcacttagaactgtgacgccatctccctttcatgcctccctgagagcagcgacttagcttaaagcatcattctggcctctgtacctcacataatgtaggcaataggtaaatgtttgttgagtgaatgtgtaaaggtctgtgacaagagcttcttgccagtcagtgtcatgtcatagcctgcctgtaatatcaggcctttctgaagtatcatgattctttccttgggtcaagtgccctgaggtatcaaggatgaagaaaccatgcctctggagatactgttaaactgttaggttattttctgcttatgcataccgtttacctagttatgtatcttttgttagctcatgtgcgagctgtgcctacacattcccacaggaaagttttgaaatatttattagaataaaaccactattatataaatgtcccttaaaatatcgtgcatattatatatgtgtgtatatatatgtgtatacacacatatacatatatatttgtatttgtgtgtgtttatgatacaatatgctttgttataagcttagccaatttttctcagactcaagctgttggaaaaagtctgttaattgtcagagggagatttagtgcaacaatgaaaatctacttctactaaaaaattagctcaaaacttgtttcctgctgaggatgagttagtaaaagcttgaaataaaaagacacagagactgaattgaagtcacagaaacatatttctggaattacaaatagcatatgctaggatgtatgaaccaaaactgcgttttatgggtaattcatattaacttcacttttgaaacttattcttgatgtttgtattattttatttgtatgaattcccacccaaactcttaaaatttattatacaaaaagccctgaactttttgcacaaactttaaggggcagtggcactgcttttcttttcatgtgtgatgactcacaagttgagttaaagattttgaggacaatatcaatactttggttttacatttgagaaaattaaggcacagtggccttaagagactttcttgatatcaaagaattactggtggactcttctagggctgcttctattacatcaaccgtatgatttttctggataatatcactaaatcataaatcaaacttacatattctttttgtgttgatcaaggttcctacctgatcccgctcccagcagcagaactggccagctgtgcagacctggggaccctctgtcaaggtagggagcccacaccgtgctctggaatctctttgctttctacttgcaattttgggtaatgtggttgtcattgttttgatttgtatctgaattttcacttggaaagccagaaaacagcaaaacagaagaatttctgcatgtgttttagttgtgtgggtgcacagtacgtacggcatggagaaagaatgcattcacaccatgggtaaccacaattccacaaagctctgagttttaaaaatgtgaatttatatcctattaaatatggattggtttcatttttcccccatgtcttctcaagaatatattggacttgcaaaaagtccagtataaatacagtggtacaatactttgaagaagtattcatgtctataaaataaagagggaaattaatttgactattcagttaactttaagataaggccatgaggcaatttatgatgacaagataacttaaattttaagattaaaatggttatagtgaactaatgttaatgtaactgtgttaattattacgatgcttactatatcgtggtcagtatttcagttacatgttatgtactaaatagctgcatgctaaataatacataattaaagttatacaagttttaaaataataatataaatattttgctttattttatcattgctcttcctaattatccatgacccttttcatctatttattctattaaatacttctatagtgaagtagcatgttctgtgtaccacattaagaatcacagccatgccttttgtaaaagctggatctcttattaagaagatcatagcacaaaagtgacagggcttagaagtgagattgaagaaataaaaacctaagctctcttctgtggttccagtgtgagagtagggcaggcaggaggtggggtggggtaactcattattatctttttttccttttggagacattatttctttgatattattattaatcaataccctatgaaaattaagtcatcaagtagtttttttttccatgatctccatgtggttttcaaattgttatatgaaataaaaaaatctgtaattctgtttagttcaagatctgaagtttaaaaaaagttatttttatttttaaaattcttctcacctgggatatctgacataatactttgaaaatgtctcccttataaagcttgccctgtgaaatactttttatccatcaatgtttagtaaactttttggaatctttaaatgattaacttagtctatgcatttcatttgtctttttctttacattcatcttaagaagaagtacatttttcttctgagattttatttctctagtctcagtgtattaggcaaacttagtttagataactttcaagctgcagatctgtacaggctgctttctataactttttcttttgacagactcaggaaaccaagttctagaagggtttagtgttttactgtgtgattgccagcttgttaatggagatctaggtctagaatctagaatcaaaatgtcctttctctcatcactatgtgcttgctccagacccttgtgtattatagcatcaaaggccatgtgtactgattcttaatgtgccatagaaagcattgcttcatcttatacattacaaccttggagtcttttgtatttcaaagtggtttccattcttcccctatatattttaatgcattaattatagattgcttatccaaattaactgtcatgtgctctttgcaaaattacatctttctcatctttattaccagctactgtaaactctcctagtactacaccacccactgtcaccactaacatgcctgttactaacagaatcgataaacaaaggaatggtaagaaatcattaccttttatatttttagtatgtctaacataaaaaattgtattctaaggatggaaatatgtattattccaacaaagtgtctgttactggagtcaattggtacatttgtaggtttacaagattagtaaaattaataaagatcacttaactctgttgagttcctcattcttatgacgagtggaatgagtacatctccagtactcctcttttgcgcttttagccaaaatttttttcaaaggaagttttaggggaaaggcatttaattagaaggcattaatgtgcatcataatagagatcagagaaaaacgtatttccatggtattttgtcagattatttgctgcaggaaacaagttttaaaggattttataaatttcaaaaaattaagtaattttaataatttaatttctcacttaagtgaactttatggtcatatatttgtgacatttacatcaatgtccatagtaatactttgctttctgtttttatttgccgaagaataatagaatatgattatatatcaactaaaacaaatcaaattttgaatgacaacttcaaatacttcttgcttttttctccaaatatacttttctattatttataatttgcaaatacagcagtgtacggtaagaaataaacagaggaaaagtcaggtgagtggaattctttaacctgttcctagatgaacgacatacatggcctttcagtaattcacagtgagcaatttcagtttcttctaataaaagagaaattccaatcaggtgaccacaccattgctttgaatacagtaatattctcaaatatgaagcattagaaacaaaggaattttctaaactccagtcatttagcttatgaggccaagacatctgtaatatatcaccagggacccaaaaccctgagaaaagaaacccacatagttcattttttcttggcttcagaggttacatcaatttcctctgtaggacatttaaattggaactatggaatattttacatgaaacatagatataaatttcagtagggttataaagacatcgattcagatagtgtttatggttattctgatagttacaccaaggagatttatgatggagcaaaaattccagcaacccccaagaaagcaacagcagctgaaatttccagtgcatatttcacatggactctagccagtagatgggaatattataattctaactaagtatttcactctttgtatgaacatacaaagagcctctgtggtattctccctccaggattgacacatcctctactgtccaagaacatttatacggtgcttcagagtccttgacttggtggagtggagctgtattcactcaatcatgtcatttctgacattcttgaagaaagccttgtttaggccatctctctctgcgtcataaccttcattggagttttaacaaagcaagcaaatgttagaatcagttaaaatggtctgtcttgaccacattaatgaaaaaaatctaattcagataattcttaatcaaaatgtcatcagcgtttaaaaatattcaggtcattatatgacagaaatattctcaaaattgtgttctcaaatttgtgtaccatcttaacaattgttatttttaccatgtctctgaaccacctatactatttactatgttttttttcctaaattgactcactttttaatgtaaacatttgtgtttacttgggaaaatctatttcacaattgtaaagtgaaaccagtcctacttgttataacacagttgtaaaaagtgaatataaatataatgtaaacaatgttttaaaattctccctgtatcctattgccttctcacatcttagcgcctgaagcctttattatctttttaaaaaggaagactaacaaagtattagagacagactatattaagttttttttctttgatgtaatcaaatttgaaataattgaaaagagaattactttttcaccttatgaatacatgctatttaatgtcatgtcctggattatcatcattgatataacattaataatttcttattctttgggaaacagagagtaaagattctcaggcttacattctgatatattagagaatactattttatttactgtaagaaagattggcacaactgtcaaatctattatctaatttgtccattccttttaactcttggctatcagaattttactgaattaatcaataacaatattgcattgtggggagaggagaggggttgagtttgcttgataatcagatatatttatcatagtatatcaatagaatttgttttcctggcttttgtgaaatgtccctgtttttctgtgtgaagttatttttgttgtttgcaataggacttttatctgatacctcaaattacactaagtcctcattaatgtcattgataggttcttggaaattctgactttgagtaaaataacatgtaatgaaaccaatcttaccataggctgattgatataaacaagagttaagttcctacggcatatttctggtcacagaaacatcaccaaacttccaaataaaggccgaaacacttctaatattaaacattgcagttaatatgagctgtacatacatttaagaaacattagtgaaaacaagtaagataattgattgcccaattttgggtgagccagtgagtgactgcagtcttagtggcggtggtgggttaaatcaagaaacaaatttttgcacaatgaaaattgtgaggagcacctcctgccaccaagcagttccaaaacaatcaccaatatgggggtttgccgagtgctttcatactgtatcacttattgtcgtgcatttatatgattatcttatactttatgaatttttgttttacagtaatttgtagccattcattcattgactttccaacctgcttattccatccagttcagggtagcgggtggctggagccatctgggcagctcggggcagcaggcagaaactagccctggccaggactccatcccatggcagggcacactcacacacacccacacccactcacactgggaccatgtagacaggccagtgaatccaaggtacacagctttgggatgtgggaagacactggaggacctggagaaaccccatgaagacaaggggagaacatgcagaccctacgcagacaggggacctggccaggcattgagtcgtctcctcatcaactttgtaatgaagctctgttgaatgaaatgatgttactcaaggacctgctgtgtacactaagaaagtctttaaagctacttttcacaaacagatatttcaggatatgggtaatctggggattcccacaaataatgatcttttttatgttttccattacattcccaagaaaagctcttggactaattattattccattccaaatcatatcttctctgctcaaacatcactagctactgaatagtaagcttttgtgaggttgtcacaagcaacccaagtaaggaattaactccattagtctctattattgttctaaaaacctagtttacaagtaagtacagattgtaacactgcttccagtttctcacatacgtttagctgcttaaataacaaattccttctaagatcatttgaatggatccattactctagctttttatgccatatgtcttaaagaaattgtgtatgtaggagctgcaggatgccagtcatattgtaaatgccactgtcgtaatagaattgcctcatcactagttcaaagaaataaccaggtgtctagattagcatttggtttatattttaacgtctattttttcaaataggcctatcatttcaaacctgtattttacgtccttgaaatagcatagatagagcagtgtcatttctgtattctccaagaaactctgaaaaaagtgtaagaagataaaaaagggaaagattaattggagagagacctacaaaaaataatgttgttttgatacattggtaatggcagacagtgatttctgcttgaagttctacatgctgaaagaagtatctaaatggaaaatggatatattcttaaatcatttttccccaattaatgtctataataaattctttgggcctagatgtcattattaggatagtacatacatattttgaagtctctggaacacatgaagatttgtgaatagcttttaaaacaccgtgagtgttgttaacatttgtaagagaggacaactttactgctatggtaacatggaaaatcctgcataagtgtgtcttaattatgcatttcctccaatggcaatgttgaagccaattattttgctgtagtccaaaaccctgctcatcagcccttcagtgggcatatttttttatgttgctttgacagttcactcttggacttttctcatggttacttgttgactgcactattccaaaattttaaataagtataacaagtggactggggcaggaaacaatgtttaaagaaaacatcttaaatatttggatgctttcttaaaaattcagaaatgtcaatgatttttagaattttgcaatattttccttagagggaacaaatactactgttataacaaaagcatgctttaggtttccatctagtggtggcttttcagatactctgctagcattgataatacagatgctcctccacttacggtagggtttgcattcctataaacccactattaagttgaaaatactggaaaatatcaaaagtcaaaaatacatttaatacacccaacttgctgaacatcatagcttgctgaacccaccttaaacacgttcagaacacttaccttagcctacagctgggcaaaatcatctaacacagagtctattttataataaagtgttgaatatctcatgtactttattgaatgctgaacttaaagtgaaaagtgaaatggtcatatgggtactagaagtacagtttccaccgaatgcctgttgttttcccaccatcgtaaagttgaatgatcttgaactgtaagtagggaagcttctgtatagtcacagaatattatcaggatcctgaaataactctttgacccttgcaattctgaatttcctcccaatcattcagaacatctgtgattttatttgatgagatccacagtgtaaaagttatctttatatgaattatttgttttatatgttcctccaaatatttttcattcagaacattttttaaaggaatataaaagtcaagatcattaaaatacccgaagaattttagaagttgaaatagtctgcataaattaaactcacctgtgcttggacttgtgccagttttatatatttatattactacatccaggggcagcaatttatattgtttagcacaagactctgattcttactggaaagacattcctttggtagtgggactggaatttgcattttggtggatttggaaattcccagaggcaaacttttacatttttttttctactgcctccccacaatttttactgttttcttcaacattgctataattatgtatttctatattttgtgtgcctattttacttaagacttacctaaacataagcatgaagaaagatgatcaacaaaggagactcaaaaaattttcttctctctgtatcttaccataatttaaaagggtatttttcttactagctactttgactaaagcacccatttacagctatttagcaaacccttgctggtgagtttgatttttcattttaaaaaatcagtttactttaaagattccccccacccaaagagcagaatcttctttacaataaggttttctttttattttctttttcaagtgatttagtccaatgaaaattctacctgcaaatattgtttctttttttccctctattttggtataaatgagcatatttaagaaattttgatgaaaagtctggtgaaatgcagcctagtagtttaatagaagtattttattaagcaggggaaagagaggaaaaggagaggaattagggtagtaagtatgtgtatgcctgttctgctttttcaagttaattcctccatatgatctcattcaagttttcacatcccaaactctttatcattctttataatgcacagaaagcataatgcctgttataagaagtcaaattgtacatgaaaacagttaacacattacagacagtagatataagaaatctatagaattaaaaatatgaagaaacatatgcaagtaataagagtaagctaattgataactatttctaagaagttggaaggtcaataagcttaacatcaaaatatttcagaactttttttgcctatgtagaaggtgtttcttttaacttatattgtaaattatgtgattatgaataaaactatatgattatgtaagacttacatgatcataactttaaattgtttgataattatataactataaacatataattaatggactaatcctatttccaatgggcagatggaattatctatagaatatccgtagtgattcagaacatccttcgtcaccctgaggtaaaagtacagagcaaggtggcagaatgggtaagtgagcttgtaacttttcttttttaaaaaaattctttaacttctgggaatctggaaaagactagttaactgaatccacagatcatactgaaacacagatggtattcattagaaatatatgagtagatatgtaagtgaggtgttgtccttatgcataggaagagaagtacatttgaataaaggataagaactgagcctaatagactatcaatgtcttaaataagaaaagtatcgcacaaatggaaatagattttggtggcaacaggtatctgtatttcatattagatccatgtattttctgctatatttttaaatagattattttaaaaattgtttgaatgtttgatcaaaaccagcaagtatgaaaagacgcattatgaaagtcttccacccatccttgctgctcatctgcatggaaccaacccaataaccaacagcaaataggaaatcactattagttttctccgcttttttccagatttctttgtgcacatgaaagaaaattaaactatagattcttattttccttcttttttacacgaaaagtagtatactttacataccgttctataccgtacttatttttattgttgccagatttgcaacattagagaactacatgttttttttgttttgaaaaaacaatgcataatatttcattatgtggctgttcagtcatttatttagcagatcttctgttgatggacagttaggctgtaatttatttaaccagtatcctattggtaaacattttgtagttttcaatttaaaaaatttaacattttattttcttctttttcttacaaatacaacacatggattttttcattttcttcttcacaataacaatctcaattttattttccataggtttctattttttctattatttcatttcctacctacagcatactgtgagactttgtacttctttttatatataatgctgttacagttcaaacaatttttttaattgagtcactatacattctgaaataagaaaaatgggttttcatatatatttggtgtttgataaacgtgtctttggtagcaaaagaaagtttacgcattgagaggaagtggtagctacacacacacacacacacacacacacacacacacacacacacacagagacatctatatatatttgaaaaataactgatagaaaacagtcttcattttaaaggcagtactctttaaaaaaaagttgaccataggtaacaatagtaggtaattaactctgttacaaagttggtgagaaaggtgaaatcctctactgaaataaaagaaaaatactacgtttgatttttgggaatgccacattgagattagtaactcattcaaatactaggagatgtttaacctctcaatggagagagcaggctgcagaaagagtatattctttctgtgtatcccattttctttccagagttgttctttttgtttaaagttagagtgatttcagaagataaaattctttattttcattctcaaataagctactgttagcttatttgtgcaaataatgggtaatgttattaatctaaatttagcattcactagaaagtttgtgctagataaggtataagcttacatttatatttacttcatgcatggttttcaacatagctttattctcatctgcagctaaactttactagacatttttgtttaaaatgcaagataccaaagcagatacttgataacagagaaaatataaatagtgtacctgtttcaaattattactatttacaattttaaaataatttaacattttttttgccaggattccctaaaacttacattcagttttagaaatgcttaaaagagaggctaaatgtgtgtatgaaacaaggcctaaatcactattcggagatgatatgtaaataggagtctctcatgtcagtgagggaatctcgttttgcagttgtatgggaaactgcatcatagaagcttctttatattggaggaatccattgcttcattaaaaactcttatgctgagaccataaagactgctaaataaccacataataaatacatagttccaatagtattgaacttattttatttttttaatttatattgttaatttataatttttcttattactaatattgtgagatggtaattactagaaaaatgtttagtgtatcttagtgttgttaaatgaagaatagagaagatatttattgcaaatcttctttaatatgagggctagagaggaaatgatagttttccaaacagacagacttgggttccaatctggcatctgctactgcttacttgggtgatcttgggcaaaccatttcttatctgtgaaagctcagtttctttatatataagactatggggtgtgtggggataatacctatttcattggttgttgtgaggattgaaaggaataacatttatcaaattcttggtatacagtgatccattaactgttacaatgatccattaactgttcactcctccaactcttcaggattttcccagggtcttatctcagtaacaacttatgttttaggtagaaacttgaattagatattttttaaaggtattagcaaaactcagccttttccattgtgttttccagctcaattcaaccttccaaaattggaactacacggtttatgtcgttaatatcaggtaagacagaataaattatttgataaattaaaagtagtgtctaatttaatgctactatttgtctctctgattgtaccaaaatatacatacaaatacacacacatagctactatatacataatctttctaaaacaactgtgtattagttcattgcacaaaaaacctccatgctgcagcgatggttttaaactgttttgatcatgcattacagttaatttgtatttgttttaaatcatgttataatgtgtcaaaaattaaaatcggataattaaatataaatagaagttgttagtttcttctcacaccctggtggatcacctagagcaccccctggttgtgtgtacccatttcaagaccacttttttttccagatctaatttcgtacatcgacagtctgtctgattgcaacctaacttttcgaaattatccttcactgtatttatatttaaatcctccactatcttcagcaatttgtattgtccatatatcctcctgtgtaccttgttttcatagttctatacctgaactagttttctaaagtgtatgtcatgacccctaaacatatattctgtgaagataagagatttaataacacagaacaggtgtcaaattgtcatataagttcaggaagtacgttattgtacaaactgaagcagatttttttatcagaacgtctcagtttctttagtgtaataatatgaattgtgaatcttcaaaacagagcaaaagcacacagttgcctagctttctgaaagaagctagaacctcaggacacacatttgaaaatattggcttagaattcccattctgtctctttatttcaggtccccaaattttattgttgatgatgtagttggtgaggtggattaatgaatatatgtatttgtgtttttagttttcacctgagtgctggagaggacaagattaaagtcaagagaagccttgaggatgagccaaggtaacaggacaaagtattgtaaagagtataacattctttctcttgctcactactttatctggtagagaaatgaaaacaattagataggaaagaaaaacttaatcacatagcacagttatttctttagcactgctgtacactacttttttcttgtagttaaaactgtaatgtaacagactgggtagtaatgtatatccaatgaaaaataattgagaaatagggcatttaaaatggatggattattatttttagtatttccagtttatttatcataacccattgcctcttacttgaaattgcaaaggtaccttcaaagaaaatagctttaaataaagtgtttatatatgataacatctaataatatggataatagatgcctaaatgttttcagcatttaaagctattagttaattttctgaagtctcccttttaatatttatatcaggatcatgccttaatcatgcaggtaatttaatggatatgtccagcatatatgaccagttggcatgtaaggaccaaatgttcagagtactgtaaaacaaacaaaaaaaccctaaatttccaaatggaataaatttagttgtatttaggttattcaggtcatgtattgcatctctgtagatttttttttttttttttttgagacagagtctcactttgtcacccgggctggagtgcagtggtgtgaccatcactcactgcagccttgaactcctaggctcaaatgatcctcctgccttagcctcctgagtagctggggctacacacatgtgctagcatacctggctaatttttaaaatactatttttgtagagactgggtcttgctatgttgctcaggctcatctcaaactcctggcctcaagtaaacctcctgtctcagccccccccagagtgctgggattacatgtacaggcgtgagatgtcatatctggcctccatacaattttttaaaaatttgttgtgaagcaaaagtttctataagtcttgctggatctcaatagactgaattaaatcttatggatatacagccctgatgacggagcttgcttcttttcaggtgatatcttcttactatgaaaagataaaatttcatatgagaattgaccagagagctttttttttcttttcaacactagaaaaacaaatgttttgaaagttatattgaaagatgtcatttttgtatacatagtaaatggactggattgagccatgtgattagggaaacttgtttttattttctggtattataattttttctttatgatatgaaaacacagtagtatatttcagtactgtattcttgaaggtgacagaactcttctccactatttaaccaaataatttttttcaatcctttctgttaggtcatattgcatcttcagtaatggatccagcagcaatcaggatccctttgctggacactttgtgtagcaactgggacagccctgggtttggtagatatagccaatggtataccttcttcaggcagtcagcgtccgctttttagtgtacttactgtggttcttctactacctggtgatactaaaatcagccatcgttagtacatgtcagcacctcagaaactcttcttgaaggacatttaaattcatgggatttcagtttcctggtcttcaaagcaatgagtaattttacagaaaattatagggagaatgaactgagacagtgtatatagcaaaatccacatatttaggggctttttggtatgaactcttgccattatttaatatttatgtttatagcctttcttgtctcttttttctattctctatggctcttaccctcattggtgaggctttatagtctcagtttttgtcaaaaccacagtctactacttttacatacattgttttttaaaaaaacttttcctttcaatttgattgtatcacttaacacagaccatagcttcagataatgctgtcatactctattgcctagacagacaggaaaccaaagccacagagaggtttttttcaaataaagaatggctgatggtaacaacagatagaatgtaactttgtagaaccataaaatagtttcagttttcaggatgagagaggaaaacacacagataagacctgtgaaaatgtatggctattcctgacttgttgggtttgggtattcaatatcacccacaatactttgggctaattatgttctcagtattcaagacaagtaaaaggtcacattcccagctgtaagttctcaccaactggagtggcgaagcttgtctttaaacaatgacttaatccagggatactttttcatgggccattttaaaaattgttaagctatcatagtcacatctatgttcacagctatcattatattcattatgtttgcctcatcctgaaatatggcttgtatgcgaatggtaagcagtagatcattttagagagagcttttcagagttaattatgagaagagtagagcacctattccttgaaattagcacagatatttaggaaagaaaacttgagctattctttaatttcacctagccttgaatagcaaatatttcacatattccttcttattttttaacaccacaaataaattactactataatacttattaatattcatagtttcataaataaaatgtcactgcctctccactagacattccataactagtttaaaaacaatactaccactttgtctttggcgtgaagacagtaactgatctcaataatataacgtcttatcttattcatttctcctctgaatatgaagaagaaacaatttttttgtgaatccagagctttcacatataagcaaaagaaattctcctctacctgacaaaataatgttacttacttttacctcagtgttaaattaatagttttgatttctgcttttgactatagctgtgattgtagtggaacagaaaattatattactttaaattgtagaaccaaaagtttttaacagggctttggggatacatttctttgcttcccatagaggtatttcctttttaaagaccttcaaagtcaaccattctataaccttcttaagtaatatgctgaccaatcacagagtcgattttaagtatttattttgtgaaactttttaccataaaaagtatttgcaaatgcctcatggagatagaaaatcatttgttgctattctgaagaaattatatcacattcatgaatagtaacacttttatagtgttagtaaatataaatagttaatttctaatagttagaaatggtaatttcaaaagataaatggtcagttgaaatcatagttttattaaaaaaaattaatttggggccacaaagaaaaaatgtagaattaaccacaggaatgctgttttcttgtgtttatgctttaaatgactatataatgtattactataaatattaaatattaaaatatttctgaaaagaaatggagttatttgacagaattatacaagcaatagcctatagaatctattaatattggaatatttttaacattataatttacacagcagcagagaaagtctgtgagcaccttggctaatctcttcagtctcaacaggtgatggtcatccctctacatccaaatactctgtttctcctaccaaatgacaagcaaccaatgaacaacaacaacagttctatccgaaatgtttccctaggttggtgctttgggcccttctagtttacaatgctaccaacaatactaatttggaaggaaaaatcattcagcagaagctcctaaaaaataatgagtccttggatgaaggcttgaggctacatacagtgaatgtgagacaactgggtaagtgactaatttttttataatatgcattttatacaactgtatattcaggtttacttgaaacaacagcagaaattttctttatgcgctatttgtttatgtaagttttttttctgatggtgaagttcagtaacaaatgaatgacatagcagaaaaaaaaaatcagctcagtgtctgtgaatccaagggaatgaaggaggtagatgaaagtttatattttactttaggaacatattttgaaaatactaacaatatgaacaaaatgccagaataatcttgatcatcactgttgtcaactttagggaaaaaaaagagtgtgtagatgtgaatgtgggaactctaatgagataaatcttatagaaggagatttcctgttttaaaacatctcctgctgggcatggtggctcatgcctataatcccagcactttgggaggccaaggtggagaataacttgagcccaggaattcgagactagcctgggctacacagggagactgtctctacgaaagattaagaaattagttgggtgttgtgctgtgcacctgtaatctcagttactaggcggggctgaggcaggaggattacctgagcttgggaggtcaaggctgcagtgagccatgttcatgccactgcactccagcctgggcagcagaatgagaccctgtctcaaaaaaacaaacagaaaacgtctccttctctcatgttccctgtctctattagtgataccactgtcttcacaggactaggtcatgaatgtagggattctgttggacctaaaatcaagtttctcctggagatcgttcacatcctaagctctagccacacatatggcacggcttgtacttccacaaagaggctgtgctgcttcctttagataccctttctatatctttgcacactgttcttctccactcccaccggcaacctcattatcacctatgtatttttaaagacagctcctaagtcagctcttctttggaaccttttctgaaataaagtatagacatcactgcctttgagcctctacttcatgctgtccagatgcctagagcatcatatgcatcagaagaccatagtacttagaagactagatatatttatgttcacatatatatatatgtatatattctgtaaacaataatctctgacttaagatcatattttcttttttctttaactcttacttcccacatatttccagaacccagcacattccctggaactggaacacttgttgaatagacaaatgaatgagtctgcatgagaatattttaggaaatcaaatgttcacaaatatggataacaaaaagcaattgttttaatgttattctatgattgcaattatactgtgattaggtacattagtagagatcaaaagaaaagaaaactttgacccttcgccttctctacactcaggaggttgaattgagggaggcaagtgttcctcagccttgaagagggcgattgcgaccaaggccataatcacagtctagtaaagaggcaggcatctccacttctgtgaggagccacccatctctattgggtggatgtacaccgttacaaagaactcatagagatggatgaatgcaaataataatactaatcatggtaataaaccatttctgagtctctatgggaaaatacttcttaacaaatggggctttttggagggagggagaatgcaagctgctaccctttcacgtataggagtcttcacaaagaaggagtctgacaaatggtagtttatctatgactggagaaccctaggaggaccagcactggctctgtcctcataggctgtgaaagcccagcaccactctgtccatatatttagacatttaatttataccatttaatttaaattatccgttttattgtttttctgcaaatgaatctgtggataagcgcttctaccaatggaaaaataaaaggctaaaacctaacagttttaaagttcacagtatacatgggaaagttatttgaattttcagttggtgatgacagtacttgttcccagaaaactgatataactcactaatgctcagtactgaaatacaagagtttattgttgttgttgacgtattgctgttactttgatatcctttaaaatgtagaatctgaatcattgatgtcatgaggcttacttagagagtcgtcaaacaaaaagtcagatgatgtgaggataaagaagtctgagagtttgttggtttgcaggtgacttcctgtgtcccccttagttagcttccaggcaggagaggctatcagagcagctggaacattttctataaaatagccacacaactcaaagaagacactattgaggcatcatttctaggctttcccctttgaaaaaaatcaaattacattttgaatttttcaggattgttttccttctctgtagggtttatttctttgaataaaactagtatctgctaatgattagaatgataatgtatgtttcatgtttatacttacataactgtgttttttacttaaggttttgtccaatgtaatgatttttggatttgaagtgtattaaatgttaatgttttttctaacttctaatttttttttttacaaattctgaagataaacactaatattttggtattacattaaagaaatacctaattaccagcattgtcattttgctttcatcctgcatctctaatctctaactttaaaaaataggtgaatatttctcatgctggttcttatgttcatataggtcattgtcttgccatggaggaacccaaaggctactactggccatctatccaaccttctgaatacgttcttccttgtccagacaagcctggcttttctgcttctcggatatggtaatattttcactgactcttgccagcaaagctacatgttatcagccttcccagggttatacgtgcagcacggtagttcttaggcattatattgattgcaaagaagggcaggaatctctgtgtatgcctgtatcattcactcctggggaataaagataacataagtggatgactcagaaaggcagtgttttcctcccagccacatgctaatcaagccctttcacagaaaaactgaagagtttagaagccagtgggtagcaccagagcaaagtaccttgtatgtggatgaacctagcctacccttggaacatgcgtctggaattccgaaactttttaactattttgactgattattgctggaatggggagaggaggcaaagaggaaatgaagacaagatccagattgggatagtctgctgatggaaactgtcagggtgtagattttctctaaatgtttaacagaaacctcagagactagataattgcagggattcatggaatagcaagtcaaatccatttctctacccacctcactcccaattagagttttcctgggggaaattcagaaatggaaactgcctaagcataaatactttgcatactataaatattgctgggtttgacactttgtagggagcaaagaaggggactgtagagatgtatggacttgagtttgaaatgtggctccatctcttcctggctgtgagaacttggaaaattcgttgatttaccaaattccatttaatcttctataagatgtgaattataatctgctttgcagagttatgtgaactcaaaatcagattttacctgtaaagttcttaaagcagtacttggccaatgtatcctaggttaggatactgctggtattttgtttccaagatgcatgctactgatttttttcccataagaatttttagcatgaaatttatttcagtgcattacagttttattttcaaaggaaacttaacctagaaatcaaggcaaatcccaaaagttattaactaatcttttcagttctaatatcatttataggaaaacaggaaaagaaaacttgtagaaggaaatagtgcaaatggagaaacaaactggggtgagagaggagagaataaggaagggtgagaagaatgaggtggagaaatggagagaatttgggaacattgtatagatagggtgataaacagaaataggctagagagatagaacgtagacatataaacaggtacagagataaacagagaattaaaatggaaagagtgagaagctcagtatcttaaagggaagcttgtccattgatcatattgtaataaatgtatatatcatgtaaaaatccctttaagcagtacaaaataataccagttatatcaaatatttaaaatatctattttgtttcatagtttttacaatgctaccaacccattggtaacctactggggacctgttgatatctccaactgtttaagtaagtgagcagttttcctttatttctcaaggacaaaatgacatgacttcatgcttcatgattttcattgtcttcgagaatattcttctgctctgtgatactgttttcatattaaaaggcaaatgattgtttcacttaagacagaaaatactttttactctcattttaactttctgttctgtaggggattaaaaatagtaaggaaaatctagagaagacaaaactaatatataaattgatatttgtatcaatgttttgtagtttgcattaattttaaatagcaaatatacactaattcagggattctgggaatgtttctcttagaactttgtgtgttcattcatccctccaagttatttgtatcttactaaagagagaagttagtctctgcatagaaagaaatattattgccttgtgaatatggggatgaggtatacacaggaaaatctcactttcttgcttcaactgtaaagtgaaatattacactctactttggattcctggaaatgctctaaatattcaggtaaaacttagtgttgttttcttctgcctttgttttagaagaagcaaatgaagttgctaaccagattttaaatttaactgctgatgggcagaacttaacctcagccaatattaccaacattgtggaacaggtcaaaagaattgtgaataaagaagaaaacattgatataacacttggctcaactctaatgaatatattttctaatatcttaagcagttcagacagtgacttgcttgagtcatcttctgagtaagtattttttttttcctggagagtaaattttattggataatgatgttacatgatttctcacctatctgaatactttgtgcccagatttcagaattcaaatctctgcaagatgtattgatagtcgttaatagtgaagcaaggtcattcacaacatgaacttaaaagttctgtgtgtttttttttttgagaaatacaatttacaatatacatagccctagaaagcataagcagtctttcattttttatttgaaaattctaaatttagtttaaaaattataaaattctaaatttagtcgaccagtagagttatgcataactgatcattataagtccactatactgtgaactatgccactgacagccacagccacatgattgttggacttctgaaatgaacatgctggggcagatgaaaatgtacctgtatttatatgattcaatttgtatttaattgcttcatttaatgtattaatattaaaatatttaatgtttttctatttccttctcttctacatttctctgaagaaaattttatatttgttaaaaatgtattttctaacaatctacataataacaatataaacatttttatggcatcttgcagttcacagaacacttttatcgcattatttcctttgattcttgataagccgtaaggtagggaggatgctttttcatgttggaaaagagaggctaaaataaatgaaaaacagtatttgttcaggatgatttaattgttaattttctttaaagcagatatttctcttgaggatttatccatccctgtgattccatattttaacagatatcactgtggattggggtaattttatgggtgttcatgttaagatcagaaaatctaaacacaattttattttgtttgtattttgccatgcagcaaaacatgtatgtttaagaatctaaaatatcatattacttaatagtggcattttttgtcgttactttagagctttaaaaacaattgatgaattggccttcaagatagacctaaatagcacatcacatgtgaatattacaactcggaacttggctctcagcgtatcatccctgttaccagggacaaatgcaatttcaaattttagcattggtcttccaagcaataatgaatcgtatttccaggtaatgagccagtggtttctttcattttaattaattagttagacatataaaaacttgctgatcacttagcagttgctgcttccaagaggtcttggtccatgaagtggcaaggtctgaatgttggctaagtttaactagagcagtagccataaagtattgtgggagctcagagtgggtatgctttcataatctgggtgacaggggtggtcagcttaccttctacaagaggggttactggagctaagcatgagtaggggccaccatacttggggtgagcatcagttcagttagaggaaagagctttaagggccccaaggtgaaaagaagcatggtgcattctctttgccagtggttctcaaactgaacattagaatcttctggaggaggctgggcgcggtctctcaagcctgtaatcccagcactttgggaggccgaggtgggtggatcacttgaggtcaggagtttgagaccaggctggccaacatggtaaaccctgtttctactaaaaatacaaaaaaaagttagccaggcatggtggtgcaggcctgtaatcccagctattcaggaggctgaggcacgagaatcacttgaacctgggaggctgaggttgcagtgagccggaatcatgccacttccctccagcctgggcgacagagcaagactctgtctcaatagaaaaaagaaaaaaataatcttctggaggactagaggacttgttaaaacagatttctgggacctactccaggagtttctgatttagtaggtcctgggtaggcccaccaaatttgcacttttagcaagttccttagacattgctggtctaaggatcatactttgagaacccgtgatgtagaagtctgggatagcaggtgacagtacggctggacacataagctggggctggattaatggagaaccttttcaacatgttcaagcgacacataagcaaagagttttcaagttcctactacatgccaggcactattagccaccagagcaaacaaaatgaatgaagcattgtccttgacctgggagagtatagtatgtgaagcacaatatatcttttaactgtggagatagaacaaactgaaaatataaaaagcctgaaatcaggatacaggcaagaccttttttctccattagactaggggctcttttgggtaattctttttcacattttaagagtaaaactcagtcaacctccgtctcattccaagacaatttgcaggaaagcattctttgtccttgagctatggtttcaggaaaaatgctatctgagagtgttcataaaattttaatgcagtctgaaatcaacaagttaacttcagtctctttctctttctctctcccttgcccctttctcccatagttattatctttcactacgtgttttgagaaaacctcaaaatctgctgctggtaaatctaattcttatacttgaaaatgttgactgatttatagatttcttcctatgtcttaattaaaatcaatgcattttctcctttggcacacatgtaaaacccaaatgagatctacagctctgtctgtaggggtttatccaggagttgcagtgactactgtagatacaaagggaagtcctggtactggctaatttgaacttgcaattgttcactcgcctaactatacatgtggaataaagttattaccattcaattatgattacttgaccaatatatctgtgtgtgtgtgacagatggattttgagagtggacaagtggatccactggcatctgtaattttgcctccaaacttacttgagaatttaagtccagaagattctgtattagttagaagagcacagtttactttcttcaacaaaactggacttttccaggtaagcacattcattaaattattgtttttcaactgcaaatgaagtttctttgagcaaagaaaacaaaactttagattctgttgaaatatatcagaaggtttagaaaaatttactgtgttttcaaaactgaaaatttttaatataattgtttaaatattttatttcagataatatgctaattaacaagttgtatgtacttcaatttttaaaataattcaagtattaggctaaggcttgcattaaacaattagaaattgaattagtgaagaaatgaccgtttattattacttttattaaatattttatgctctccaatcatttaggcctttacagttaaagaaattgcacaccaaaggaaagggttttttttttttctttaatttagcagtaagtactgtttacataatgagcagcattcttggctttaatcagttttcccattagtatttcaagtgacctttggtctttacacatccgcagagtaagatggaattgtgctaagcacatattatcatttttattggcatcatttctagattctagaaggcccactgccagcaaacactggtgacctctgtttgcctttacaagtacaacctgatcgagagcaggttcgctgggccctttttaaaaaataaaacttatctattaaattcaagatatcattgcatattgaacaatgtgacttatataaaatagcaagtctcaaggtcagagaattgtttctaatagatctgcctttatatgtcatgtgtagaggagcagccaagtagagatatagtcaaggaaaaataataccatggaatccttgacagtagttaattccaaaatttaaaaattttatcaacaaatgttttaggaaccagctctatacaaatttggtgatttatatgaatgcaatttatatattttgtataaaacgtgtaatttatcctgaaagatttaatagctataaacatgtacaactgcagttttaaaaattatggtaacttgaagtgtatgacaatgttaccttaaaaccaatataaaaatgcagcaaaacatgtatgtatgtaggtgccacaaaatgtgaatggtacagaaatggagtccagtgcagggagaaggtttagccctgcactcttagatttgcaagcatctgtcattgttttgagtcttctccatatcattgtttccttctcctttggtatttctctaccaaagttgttattaggaagcatatctggccaggcgcagtgcctcgtgcctgtaatcctagcactttgggaggctgaggagggaggattgcttgagaccaagagttcaaggccaatcaagccaacatagtgagacccgtctctttaaaaaaaaaaaaaaaaaaaaggaagcatatgttcagtttctaaagttaatttacaggagaatgaaaaaactttaaaggttctgtggtgctcccctatcatagagggcaaggtacgatggtgatggtgtttttttttgtgttttactgaaaggctgggtatcaccagctaatagctgagtttaataatgaccaccacacaaaattaacaaaaagctatattctggatgctgaattttatttggaatttatcctgtgattattccaaaacaactgatttgtaagctatgatataaagagaaattcaggagatttgacaagaaatacaagggaaagaaaaaaatagagatgaacttgcagaatagaatgcttattggtccaaaccattttatgggacagatttgatttcctgacagccttattgcttaagtgaaatctgcagatgctggcaagtatacagtcagagaagaaggtagaagtcctggatgggacttgaatccagtattacttttaggtataagttagtaaacatgtcaggctgttggcatggatgtgaaagatgtcttgctttttatttttcacaccatattttcttcatacttctctgaaagaaaacaacatctatcttctaaagtagggaaatgatctaattgtttcacagctttttatgagtttatattatttatgagtctgcattgtttcagttgttaactggctgacatcagtcaccacaatcaagaatgtagttttatgaactcagtcttacaatattggctcccaacattccctcaatgtatttattataataagggaaatagcaaacctccttcaggaaagccagcaacttgatgtgataaacaggatgttctagaactgaagatcttaagtgtaaaaattgctgacagtttgcttattttggagcaccaaagtaaaataaaagtgtacttctgactgatacacgcgatttttttttctttaaaaggatgtaggaccccaaagaaaaactttagtgagttatgtgatggcgtgcagtattggaaacattactatccagaatctgaaggatcctgttcaaataaaaatcaaacatacaagaactcaggtaagaaaacgctcccaatagcatttggacagaagtggactatttaatatactagtggggcctttttttctacatgttaaaaagtaactgaccctttttttgtggagtagggcccagttttctataaagagagaacaactgatcaggtagtgctttaaagtcacagtaaattgaagcagctggagaggttagtcttatctaggactcaataatcagaaagagaagggaagtgaagagaagggcttctatttttcagatataacatatattgcttcagataaattagatgcagatgtagttgcacaattctgccaatagaggttttggttgtttctttgtatttctgtgtatatttgcaaagataactgcaactgggaaagccaacaaagaaacaggggagggtggacttattttttgagaggttagcagtggttagtctttgcaaatgttgcttttcttgttgcttcattacccttgtcatctgtttgtttgataaaattagatggaagttctcattgtcccagatggcccaagaacaggtttttctcacttttccaaagggccctcatcatgattctgccatttattagataggcaggaagacaggctggaaatgagtgtgctgaggattgaaagccaagtcacctaagatctagcctcctttgccacgaaccgtcttagacttccgtgttcaacactttggcttcctttgtttcagccccttcattcataaaggacgatttttaaaaattgtagaacatacataatataaatgtatcatcttaatcatttttaagtgtacagttcaatagcattaagtgtgttcacattgttatgcagccatcaccactatccatctccccagttgaaactctcctcccattaaatacccattccctgttctctcctttcaatagcacctggcaaccaccatcctactttctgtctcttaatttcactactctaagtacctcatataagtggaaacatacagtgtttgtcctttgtgactggcttatttcatagcacagtgtcttcaaggtttatccatgttgtagcatctgtcagaactgacttcctttttaaggctgaagagtatttcattgtatgtatatactagattttgtttgtctattcctcattgatagacgcttgggttgcttctactttttggctcttgtgaataatgctactgtgagcatgagtctacagatatcttgtcgagtccttgttttcaatttgtctatgtaaatacccagacataaaggagaattttgaagatgatgtgaaattgtagtgtcaagagcttttctaaatgctaagaatgagagtagaatcaatatacttaatgatgggacatttgtagtaacctacagataaatgagtaggtagtatgattccttatgaggttagagttgattttcgcttgaagtctctatgggagagaagaagatccccctaaattgcctacattttcaggttgaattggcatgttaatactaatctatttctttgtgaaacccttcgtgtttttattcttttgccatatttaaatcatggcattttaaacacaatttcacatgtttattcttatgttaatataggaagtgcatcatcccatctgtgccttctgggatctgaacaaaaacagtaagttttaaaatattggttgtcttaatatagataacaactgaattttaaacattgttagacacccccatttcctttaattccaccccaaaccagagtgagtcacaatgtaagtgtaaatggcaaatgagctgcaaagttagtttaggtagcttgggaagtcagttctaatttctgtaactttttagtcattgcaagaagaaataggcagacttcactgtgttttctttcatttttcagttgaacaacctctttgacatcagttatttataaaatacagcatacaattttattgctacttttgatgaaagtagacttgcacttaatctcattcttctaagacacagttgaggggattatttgatatgtgtaaggcagacaatttaaaatccagcttccagacctccagttatgagggaggtgagaagctgactgaaggaatgtaaatatagaaattgatataatggacatatattacttgaaagagatgaagagcctgcagaattagatttgacaatcaagaaaggaaggcaaaattaagggatgaatcaatcagtaggcataaggtgtaaatctctttgaaaggaagtacaaataaagaagcttcttctgtttgtccccttgtgaggattattgtggccagattcattctgatataaaggcagggtactttgctgatgaaaacagcctgaaaagggcaaaaacttctttttttgatagttcttgtcacagcaagacaggagttttttggtggaggggtttagttgcataattttgagaagatctttactcatttacctagttaaaagtatcactttattatcttaaaatattatttaaataaatggattcaatacattgacaatatgcattgctcatattccattttataccatgaaagtcaaataaggtggtttcaagccatttacaatcagttactaccattcatgatttttgtatacataaatggcacattctaagaaagcaaaccttctttgttcttatgtcttcatgaaaatgtagattaaccctcagaaaaaattgttggttcattagtgtgtagtgtatttgaaaatgagtcttctttttgtggaagttcattttaaaatatgttaaaaattaaacttgaatcaaacatttgtggaactctcaagtttgaacctactgattagatcacctctaactgcccacccagagctaacatttgattattctaggaatccaaattattctaagcattgaaaactttcataatggtatccattttacagataaactctgtatggcagaagagactgaggcaaatttctctatagaaggtctcatccattatagagaagaaactgacctgctgttttcacactgtttgttgattccttcaacagaaagttttggaggatggaacacgtcaggatgtgttgcacacagagattcagatgcaagtgagacagtctgcctgtgtaaccacttcacacactttggagttctgatggtaaggggggaatttctaagctcattttgacatgctgtaactttggatggcatactccttttttgtatgtatttttagattatgtattttgggaattatttcctgatagttttcatctgtaccgtgaatcttaattcttaataaagaatctaattagcaaagatcacatattaaaaatatgtgaaagtaattatagaaaagaactttctccctttttttcctgtagcattaacagtgatgataaataatcccagaaacaagaaaatcctcatgaaactttttaattaagagagaaacagagtcaaagagatggacggggagacaagtgggaggagggagagaaagttaaagaagaaaatgttgggtgttactaacatggaagggaattgtgaatagtgtaatcaaaaaaatttttcttatgttgtcactcattcaatatatttgaacgttgctttgtacctggtactgcaccgagtgatctccctcctagagattgcagtttgttaggacagactagtgactagggttagaatggagacttcagagctgcaagagagataatggttatgatgtttctgtcactcttaggcctctatatcattctttccttccttcttccatgcccctgttttatcttattagccagcttgccaaacagttttaaacaaaattagattgcgtcaatgtgtttttcttatcccaccaaattttaagacgcaccacgcatccagcgacttctttgaactcatccatagatttatacctttcccttttatccagtttacctgtgattttgcaaacacttttctggtctccagggtatgctctgggttgtagcatagcctttgtttctgtttggttttcataaagggaccaaaccacatttgttttttaataggagataggagtgatgtgagctgaggcaataaagcttttcaaattagaatcacagacgtcaggttttgtttattcccgcctttaaatcttgcacccttcttcctgtggggactgggaggaagccttgaggatctgtgggatgtagtatttggctcacaaatctactcagcctatgtaaatggccattgtcatatggcaaccctgcaagttgtaattttcctgacaatcaagtacataaatgctctgcagaataagagcaagtcatttaaaaaggtgataaatcatagaagacacctttttaactatctaaaatacaaatattttccttttgctgtcaaagcatgaaaatgaacaattaactattgcatgttttccttaagtaattataaaagaaaattcagtttccttccatgttctcttttttgcaaaagtgatagcaggcattctttcaaagaacacttattttttgtgattactcattcaggtatgtaagctttagcttaattcatttaaatatttcaactatgtgcatgttgtaagtctggtattaaataaatagataacagtaacaaaatttactcttcagagatgatttatatgaagccagagtttgcctgcccacgacttcatatggccagttccttcatatattgtctaaattttattatgagtttgtaattacgcattattttttctgctgctatctgattgaatggttaattatatatatatatatgtgaagataagcatcattcatgttctctttccattttctaccttgtctgtttttgtaatattaaaaattgctggtagaaaatcttttcagaacatatcctttttggtgatgttctcttatcttttcagtttttccagaccaccaagactttgttaagagtttttcttgacttagaaactctttattcacttgtataagatattcccagagtctgcattgtcccatgacacattcaccagttcaccatatgagatgctaaaacaatgcacctcatacctataattatatcttctggtctacaaatatttcaagaatttaatgtcttctgctacatttctttgtactaaaactggctttcatgaagattagtacattttcatattggctatatcataaaagttttcatattttcattctctaaaagaacaaaacaacatgaaattgtgtataaatctgtaaacaaatctgtaagcagccttatttaatttctatttgaaattctggatttaattgtgatttgcaagtcataggtttttcaagaatttgtgacacatcacttggcaatctctcaaaaccatgattcatctctctgggctgatgaatcattggttgagttagcctatctgtgaatcaagtggcaccaactcaaaccccatcccatgtaccctgggtgccccgtgttctcccagtgttttaagggattcctgggataagaagatagggggagccccctcagactctgagcctctgcttctgctgaattccatcacttcgtgcatggcttgatgttgcagagatactgtacctgttctttactgcatcagtgaaacctgaaactaacccacatttctttatcacacacacacacacacacacacacacacacacacacaacttaaggcctgtgtgtgagtagcagattttattggcattttgatgacagttaaaggcaatttacatatagaaggaaaaatcataaacattttctccataatttaaaacctaaaagtttacgctagatattcaatacatcccttctgtaagaacactccattttttaacatctacataaaggaggtacttttctcctccaaccaggattgagtgagtggtcttacctcaagatttattcctatcccaatcccccatttaaggcagaaaagaaagatttttctaccaagtccagacctgtaagtctcccttagcacattgaaattaatactttatattaatacactggaaagtatttacttctttccactccacaacagccccaaataatttaaattgtatcctttcagtactataggaataaaaaagtctatgacccccaaaagtcttaatggcatctcagttatgaaaataaagacagtcccacctcatacataccaagcattgaaataaccagggttaggagcctccgcaccacccttagagcctggcagtcacagcaccagcaccagcctctggctgagctccttgctacctggcaaggaacctaaaggcttgagggtttggccatatagactactgtggtctccatttgaactggtgccccaagccctgcaactgttaggaatgggcctgatggtttattatgcaaggcaaccgtctcctctccaatttctgttgagagtcctggtggttttgatcttcaggttataccggtttgcagaaagcttgggaaagaaggtaatgatgaaaaacaatgtgtaacgacttccagaagtaatgctgcatttttttcttttatttattgatcgaaaataatataataaatggaaattttaatattgatttacactgttggttttagcccctgagagtaagctgctctaatgttaacagtgaactttctagtgaaacagagaaccattctcatgagaagagagtttcttacagctgctcgccatgttttatgtaggaccttccaagaagtgcctcacagttagatgcaagaaacactaaagtcctcactttcatcagctatattgggtgtggaatatctgctattttttcagcagcaactctcctgacatatgttgcttttgagtaagtatatttttaatctgccaaacccattgctaactgttccaaatgtgaataagaaaattgcctcggctttgaaaaacatttatacactgtagggtggttgaacgttaatgttcatgtttctgataaaatatattatgtaacatgaattttccagctatagaattttaatttataattgctgtatttctatttataaaatgcattcaaatctgttagaaatgattaacatttaagtaagtaaaaattatataaggtgctttctgtattgtaaaacatgaaaatgtttgttttataatcttataaaattagtcctgaaacaatttttttaagatccttttaactcattaaaaatcaaaaaggttcaaataatttagggaaattattttttaagaaaaatgtcattcttacaactctagaatttttcctgggttaaaaaaaaattcagttgaagcccaactgggaattgtataaacaattggaaataattttgaagtaaactaatatttttaaagtctttataacttgccaaatactcataaatatccttagcccctccttttagcagaaccacatcagaaaggtggtgctacttatctcattgcagggttgtataagatacgaatttatacaggcctgtgcttaaaagattgatatacagtattagttctctcatagattccttttttcattttttaggaaattgcgaagggattatccctccaaaatcttgatgaacctgagcacagccctgctgttcctgaatctcctcttcctcctagatggctggatcacctccttcaatgtggatggactttgcattgctgttgcagtcctgttgcatttcttccttctggcaacctttacctggatggggctagaagcaattcacatgtacattgctctagttaaagtatttaacacttacattcgccgatacattctaaaattctgcatcattggctggggtaagcctcttaaaatttttttggttttgtttttccctcatgaaaattgccagattctcataggaaaaaatcttatttaaaaaaaaatagtaccattaagaggaacctcaaaattgtgaatggcatggattagatatacatagcctaaggaagggacatcttcacaactttattttttaaaactcatcaacagcactcactatatacacgagtaaaggaaaagccctcactccctgagtcaccacaaacttatttcctgagcccagagccagcccacccaagtctgaagaagcagctggcaggcagtgatgtcttttccatgatgctttaaaatacaaaggccagctcagacggctagttacactcatccccagacacatgcctatgtcttggaaaccagagaaagaatgttattcttgcgtgtgcaaccagaatacttataggattattgccttgaactttttgtaataacatgagtcctcagtcagacataggtggttgtattaacctgtttgagatcttctattgtgctcccttatttttgcaggcttcatattgagccaggcattttagagctttctcacagatctgtttcagatggaaatataagtgagagatattttcaagaccttcaaaaccacctcaggaggcaataagcacactcttcagagacctgggatgcctgccatagcatttccccactgaaatatacatggaaatactttattcaatctctggggagagaaggctacaaagactttatagcccccttgcttttcctccactttttctaaagagttttctttatatagaaggaggcaaaataggctgtaatgaccttgtctgcctaaactctgccagtctaacaaggcttaattaatgaaaccacattcactagtgctagatttgatacaaatcaggtttagttttccagtgagtcccactaagcaaacagaattttatttaaatatctgtcatttaagagtaggtttggattgttgccagttagagttggacattgaaccccaaggaggggattttgttgttaaccaagttgccatttctaagaagtttgaatctgggatatggaatgttggcttgcttgcatttctcttcttttcatttcttttctttacatttcattagcagtcttatgaagcagtttcagatgcttcaaaagagtttgtgtcatggtgtttttgtaacaggtttgcctgccttagtggtgtcagttgttctagcgagcagaaacaacaatgaagtctatggaaaagaaagttatgggaaagaaaaaggtgatgaattgtaagtaataaaaactttttgtgatgagtagatatcctttgtttcctgaagtttagcattaatttccatgccaataacaaggctttcattttaaaaggttgatgtttattcacatgactgccaaaatctctgctacaccacagattaattcagttgaatgccctgaaatgtttgagacactttttcatattaacattgtactctgtcatatggaggaattgagaaaatgcctaagacagttttttagcctcagaagacccattctatttcagaagatttcataacactctcacctcctcaaacccacccacgtcttcaagagagttaaatagcagtatcagacagagagtgaatgattcattgccaatgggagtgttaggtagaaatttagagaatggagaaatcagcatgttcttaaacaatttcaaaagttctcttcagattgtgagatcattgagattaagggttttatattgttcagtttgggcagttaccgatctcctattttattagtccaccatgggtactcaataaatatatgttgattgaaaaaattactgaatgaataaagagcctatttctgaaatgggacccatcatgccacatatctatgcatatctcatggatggataacatttacatcggctgggcgcagtggcttacacctataatcccagcactttaggaggccgagctgggtatatcacctgaggtcagaagtttgagatcagcctggccaacatggcgaaaccccatctctattaaaaatacaaaaattagctgggcatggtggtgcatagctataatcccagctactactcgggaggctgaggcaggagaatcatttgaatctgggaggcggaagttgcagtgagccaagattgcaccatgaactccagcctgggcaacagagtgagactccatctaaaaaaaaaaaaaaaaaaaaaaacccacttacatccaatcacttatccaatctctgtcccatttcttcacagtcttgccatctcttatatttgtaaagtggcactcaaaagaccccacaagaactagggaaaaataatggggctaggtgaggaattccagaattttagaagaacttctgtgtgtaaaagaaacgttagctctagggacaagcaacattattccagggacatttataacaacatacattaaaagtagaaattaataaataatttctaaataagagaattttagaagtatgttcatcaactcatacagaactttaaagtaccatttagtaaactgctataccattaggacatttcatttattgataatttactgtatgccagaatcatgttagtttctagaattcaaagatgtgcaggacagcttttgcctttgtggaggttatgttccaacatggaagatatggcccagaataataaccatttgtgctagaatttcaagatgaatttagttgctttaaatcatttattcaatttttgaggtgtcttaagaattcctatagcgtcgattaggcactaggacatctacaaattatattatttgacaactttgcatatagtacagttttaaaatttctttaatctactatccaatatatatattataagtatcaagtatcttcttctccatgtcactgggatattttgtaatcattgtaagctacgtaattgtgcatgacaaccatctgtatattaatctcaattataaggtcttgcctcatctacagcaatgatattagtagtaattattttgccacagtaacaaactcacaactagttgtgacttaagtgagtaggagtttactctttgcacatgacaagaaacatggtagtggcaatcactggcatggattttgtggctaaaaatgtcagggccaacaactctgcagcaggcttgacctctctgtcattggacagaagatgctggctgcggctccatagctcacttgcacgtttgaagcaggaagaaggaataaggaccttgccagttgagtctaccactaatagctcttccaaaaatcctttggcagacttctacttccatatcactttataaaacgatgtcatacagccactccttaaatacaaaggagaccaaaaattagtttttaaatttcccattctcagtgtacaggcacccaaaagaaaaggaggttagacatggcttggaacaagtcagccaagagtgttttcatatcaactcagaaatcaggaagcaaccttgtcttctttgtaatattggcttacctagatattaagacaatggccatccaaaaacaaatgaacaaaagacctatgaagagattgaagaagaaactgaggtccaaggaagtaaagtggctttctaaagacatttgagaggaaaatctgcagtagcccaaactaagctgagaaaagtcttaggtaaacaggacatggtaataaatctttttttctttctcatttcttcttttttaagctgttggattcaagatccagtcatattttatgtgacctgtgctgggtattttggagtcatgttttttctgaacattgccatgttcattgtggtaatggtgcagatctgtgggaggaatggcaagagaagcaaccggaccctgagagaagaagtgttaaggaacctgcgcagtgtggttagcttgacctttctgttgggcatgacatggggttttgcattctttgcctggggacccttaaatatccccttcatgtacctcttctccatcttcaattcattacaaggtaagataaattgtacatgaatagtctctgctttctaattttgtcatatttgcaagcagcttcacttttggacagatgccatgttaagtttctgtgtcactatttcaagtgctgaatatagttccatgtgcagtgtggtcacttgttaaaagggtcttgaatagataaatgaggtagaatgttagttttgcctttttatcagtggtatatgccaagcacctagaacactgtacctggcagatagtaggtactccataaatgcatattatttcatgaatgaatatggagcaagggaagtatctagctgagaaccaaacggggagtttaaagggatgcacagacaagttaccttcttcacagttttgctgaatgttggtcctcttcatacatcctgtcccctgaagatttaccgttgatggccagaagaatttttagagtctatgtaagaacagtagcagttcaccttgattttttgggtcctttgatttcagaataaataccaacactctagttcaggaacttttatctttttatgagaaatgttgaacatttcacagttagttcaacaattcaacaaacatttgtcaatggtctgctttgcataaaaataccaggcttccttcaaagagcttgcagtcatacctcttattccataatacataccatagtatactctataataaatttaacttttaagcttaagggaatataaattgtctttttagatcattaaatggaattctttaagattttgaatataccctgtactgttgatgaaactccttagtgtgcagaagcaccatgaggccaacactctaaaagaaattagaatgcttggaatgtttctgagtagagcagtgcaaatggcttaactgaagctattggtcttgcagttgtagatgtctggggaagaaattgctgaatatatctgagctggggtggaaagcagatttgtattactcaccaaatgaggtgccaaggtgggtactccctgcaagtgtgttttaagaaagtctgtagttatctgcaggggagagttggttactgcttatctcccatgctcttccactagcttgtgaagtgcaaaataattgtcacatggtaggtgcttaatgattggtaaattaatggattgctagatggagaaagaggctttggggatggcctattccaatctgagatgcctctggcataaatatgtattaactagttcagcaaattttattcaggttcattgtcttataacaaaggaagtatgtaggctcattatctttagtccatagaataagcctcaagtgcaactccaaaaattggaaaatgagtatgtagcatataaatacatctttattgggatctagctttataaagtgagtattcctctatttaatctcttctataatatacaacataaaagtgcttaaataaatattgacaaaagtatccattaacattagaaattccatggtttcatatttcaggattgtatataaaaggcacattgatctgccagcccagccttggttttgcttttagaatttcctggcagtttcagtaaccttcaacagctacagttgtctgttcagctctgtttccattaatgagaattgggatgttttatttttcccagcatgggtcccctgtcaggagggaaaaatgttgtaaaccatcatcaactcagtgttcttcataaatcactgacttttaagactaattttaaatcatataaattcagaacagatttcagcacatttaattatattaaaacacctcccagaaagaaaatttaaattaaaaggcagtgatacagagcacatgagtctaccaacaattgcttgctgcccaggcttgtgccaaaacttcttaggatgctatggaaatttacttaatggtttttattgttgagtcattttcagaaccttccaagagaggctttgttgttagcagtatatgctttgttaaaagaagcatgtagaatttagacagcttaaagaaatgattcagtgaatgcaaaatgaactcaggtagtaaggaggcaaactacattatatctaattttttctctttttttttttattatactttaagttttagggtacatgtgcacattgtgcaggttagttacatatgtatacatatgccatgctggtgtgctgcacccacaaactcgtcatctagcattaggtatatctcccaatgctatccctccctgctccccccaccccaccacagtccccagagtgtgatattccccttcctgtgtccatgtgatctcattgttcaattcccacctatgagtgacaatatgtggtgtttggttttttgctcttgcgatagtttactgagaatgatgatttccaatttcatccatgtccctacaaaggacacgaactcatcattttttatggctgcatagtactccatggtgtatatgtgccacattttcttaatccagtctatcattgttggacatttgggttggttccaagtctttgctattgtgaataatgccacaataaacatacgtgtgcatgtgtctttatagcagcatgatttatagtcctttgggtatatacccagtaatgggatggctgggtcaaatggtatttctagttctagatccctgaggaatcgccacactgacttccacagtggttgaactagtttacagtcccaccaacagtgtaaaagtgttcctatttctccacatcctctccagcacctgttgtttcctgactttttaatgattgccattctaactggtgtgagatggtatctcattgtggttttgatttgcatttctctgatggccagtgatgatgagcattttttcatgtgttctttggctgcataaatgtcttcttttgagaagtgtctgttcatgtccttcgcccagtttttgatggggttgtttgtttttttcttgtaaatgtgtttgagttcattgtagattctggatattagccctttgtcagatgagtaggttgcgaaaattttctcccattttgtaggttgcctgttcactctgatggtagtttcttttgctgtgcagaagctctttagtttaattagatcccatttgtcaattttggcttttgttgccattgcttttggtgttttggacatgaagtccttgcccatgcctatgtcctgaatggtaatgcctaggttttcttctagggtttttatggttttaggtctaacgtttaaatctttaatccatcttgaattgatttttgtataaggtgtaaggaagggatccagtttcagctttctacatatggctagccaattttcccagcaccatttattaattaaatagggaatcctttccccattgcttgtttttctcaggtttgtcaaagatcagatagttgtagatatgtggcgttatttctgagggctctgttctgttccattgatctagatctctgttttggtaccagtaccatgctgttttggttactgtagccttgtagtatagtttgaagtcaggtagtgtgatgcctccagctttgttcttttggcttaggattgacttggcgatgcgggctcttttttggttccatatgaactttaaagtagttttttccaattctgtgaagaaagtcattggtagcttgatggggatggcattgaatctgtaaattaccttgggcagtatggccattttcacgatattgattcttcctacccatgagcatggaatgttcttccatttgtttgtatcctctttgatttcattgagcagtggtttgtagttctccttgaagaggtccttcacatcccttgtaagttggattcctaggtattttattctctttgaagcaattgtgaatgggagttcactcatgatttggctctctgtttgtctgttgttggtgtataagaatgcttgtgatttttgtacattgattttgtatcctgagactttgctgaagttgcttatcagcttaaggagattttgggctgagacaatggggttttctagatatacaatcatgtcatctgcaaacagggacaatttgacttcctcttttcctaattgaataccctttatttccttctcctgcctaatttccctggccagaacttccaacactatgttgaataggagtggtgagagagggcatccctgtcttgtgccagttttcaaagggaatgcttccagtttttgcccattcagtatgatattggctgtgggtttgtcatagatagctcttattattttgaaatacgtcccatcaatacctaatttattgagagtttttagcatgaagggttgttgaattttttcaaaggctttttctgcatctattgagataatcatgtggtttttgtctttggctctgtttatatgctggattacatttattgatttgcgtatattgaaccagccttgcatcccagggatgaagcccacttgatcatggtggataagctttttgatgtgctgctggattcggtttgccggtattttattgaggatttttgcatcaatgttcatcaaggatattggtctaaaattctcttttttggttgtgtctctgcccggctttggtatcagaatgatgctggcctcataaaatgagttagggaggattccctctttttctattgattggaataattttttctcttttttatatttgtcattccagcaaaaatcatgatgtggtccctctgcctcatggaatttatattctagtaggggagacaggttaattaaatatattgctctatagaaattaccttgtgacgttgagaatgtgttacaaaaaaacatgatatctaagctgaaatcaggaggatcgataggaattaactagatgaaagatgggagtaagagtaggaagaataatatttgagatagtgggcatttcatgtgcaaaaaatttgctatagttgatgattacagtgtatattcaaggtattaaaagaaaactcatatatcctgagaacaacaaaagtgcaggatagtgacaaagcagagaggcacaacagagaggcaaggactagaccagaaggctctgtatttcaatctttataaacacaataggaagtctttgaaaggtggagtgacatgattggatgtgcactttgtaaagataaagctgtacctaatgtggtgaatggattagagctgcccagtagggtctgtagggcgagcaggtaggaggagactctcagtgtttggggaaaagttggtccagtattttagactgtggtggggatgagagagctagagagatgtgcacagaaccaagggaaatttaggaagcatgctgctacaaaatactcatcattgatttgctcattaaactcttacttttctagaatgattcgagtaagaagtcttcttgttaatacaatattatagttaatggatgcctatcattacaatatttaacaatggctaaagctttagaatgcagagcaacatcctgaaagctaaaactgtgctaaacatattttagtcccttttagatttagcttgcagggaggcaccttaaagtcagcagggtcaccatgtaatgttatggaggcgggatgtgtgggagcatgtgtttgagctgggtctgctgtggcatcagggcatgtattagttcattttcacactgctgataaacatataccagagactgggcaatttacaaaacaaagagctttaattggacttacagttccacgtgactggggaagcctcacaatcatggcgggaagcaaggaggagcaaatcaaatcttatgtaggtggcggtaggcaaagagagagtttgtgcagaaaaactcccatttttaaacgcattagatcttgtgagattcatttactatcacgataacagcccaggaaagacttgcccccataattcaatcaccttccactgggttcctcccatgatgtgtgggaattgtgggagttacaattcaagatgagacttgggtgggaacacagccaaaccatattattcaacccctggcccctcccagatctcatgtcctcacatttcaaaaccaattatgccttcccaacagtcccccaaagtcttaactcatttcagcattaactcaaaagtccacagtcctacgtctcatctgagacaaggcaagtcccttccacctgtgagcctgtaaaatcaaaagcaagttaattacttcctagatacaatgggggtacaggcattgagtaaatactgctgttgcaatgggagaaattggccaaaataaaggggctacaggcccagtgcaagtccagaatccagcagggcagtcaaatcttaagattccaaaatcatctccttcgactccatatctcacatctgggtcacactgatgcaagaggtgggttcccatggtcttgggcagctccatccttgtggctttgcagggtatagcctccctcacagctgctttcacaggctgacattgagtgtctgtgacttttccaggcacacagtgcaagctgttggtggatctaccattctgggatctggaagatggtggccctcttctcacagctccactagatggcaccccagtagggactctgtgtggggcccagaccacacatttccctctgtactgccctagcggaggttctccatgagggcctcacccctgcagcaaacttttgtctgggcatccaagcatttcatcttctgaaatctaggcggaggttcccaaacctcaattcttgacttctgtgcacccacaggctcaacaccatatggaagctgccaaggctttgggcttccaccctctgaagcaacagcctgagctgtaccttggactcttagtggcagctggatcagctgggacacaggtcaccaagtccctagactgtacaaagcatggggactctgagcctgacccatgaaaccactttttcctcctaggcctccaggtctgtgatgggaagggctactgcaaagatctctgacatgacctggagacattttcaccattgtcttgatgtttaacatttggctactcattatgtatgcaaatttctgcagctggcttaaatttcacctcagaaaatggcattatcttttatataccattgtcaggctgcaaattttccaaactttaatgctctgtttcccttttgaaactgaatgattttaacagcactcaggtcatctgttgaatgttttgttgcttagaaatttcttctaccagataccctaaatcatccctctcaagttcaaagttccgcaaatctctagggtgggatcaaaatgccgccagactctttgctaaaacacaagagtcacctttgccccagttctcaacaagttcctcatctccatgagaccacctcagccttgaccttattgtccatatcactatcaacgtttttatcaaagccattaagtaagtctctaggaagtttcaaactttcctacattttcctgtcttcttctgagccctccaaactgttccaacctctgtctgttacccagttcccaagttgcttccacatatttgggtatcttttcagcagcaccatacttctggtaccaatttactgtattagtctgttttcacactacggataaacacatacccaaaactgggccgtttataaaagaaagaggtttaattgcacttacagttccatgtgactggggaagcctcacaatcagggcggagggcaagaaggaggaaatgacatcttatgtggatggcagcaggcaaagagagagcttgtaaagaaaaactcccatttttaaaatcatcaggtcttgtgagactcattcactatcacgagaacagcccaggaaaaacctgcacccataattcaatcacctcctaccaggttcctctcacggtgtgtgagaattgtgggagttacaattcaagatgagatttgggtggggacacagccaaaccatatcaggacatatacatccaaggaatgacttttgatagatttcttgtcacatttgtttatttcttcaaaactttggctcaagcatgttaaaaactccatttaatctttcaggatttttggaaatgtatgaaggggtatgtgtttataaacacatatacatgtgtaattatatgggtactcacataaatttgaagagtctatctataaaattttatatatgctttatttttattttttatttgtatgttttatatttttatttctagcatgtatttttatttttatgtacacttataactgtataatttaattgccaaaaattatgttaaatgggtatcagaaaattgttactatctgtttgattataaaaattttacctacttaaataagcaaatgacatcatgaattgaatcaaggctgaaaccaaatttattattttctaattatccacaggataatgctttggtcttttaattttactaacagtattagttttcacactgctatatagaacttccttgagactgggtaatttataaagggaagaggtttaattgactcacagttccatatggctggggaggcctcgggaaacttacaatcatggcagcatggggagcaggcacatcttacatggtggcaggcaagagagagcatgtgaaggaggaactgccaaacatttataaaagcattaaatctcatgagaactcactcactatcacaagaacagcatgggggaaccatccccatgatccagtcacctcccatcagttccctccgttgacatttggggattatggggattacaattcaagatgagatttgggtggggacacaaagccaaaccatatcacctacttaatttaagttacagagtaaacattttgttgatttttttcctgcaaaaattaaaagataagtgtaccttctcttaacatagttgaattacatgtctatctgcttttgctatttttgctgttttccaggataaaacaggcatatcactgtattgaaattttaaattttttctgaagaatacaagcagaaaattttgtggtatacaaattgctatgcagcagagaatattctacttccattcaaaaaagagctgttactaactatacattaaatgagtagaggatagtttaatctcttacccttattcagtgttaagtaatttagagaaatgcgtattattattatagtattggtaaactaagaaaattaagtcaaagtatgaggtgaaatatgccaaatatcaatgaagtgtcccttgccactggaggctgaggttaggagcctcatgaaagttgagctgttacataattacatgtataatacacatattgaattggtgccaaggtaaagagatgacccaccaattcagtccctcacaagtgaaacatcagcttggctgagacattacagctgcaaggaaataaattactcactctttggcagggcattttgtgccacagagaaataattttctaaagggcaccttggtagtatgaaaggaggatttaagaagtttccagagagagccataaacccttgaagatccccagccccatagccagctgactgtgtctgtgtgacaactgaaaacaggagctgtttaaagatttggacacaggctactaaggatgctcagaggtcatctagactaatttggtcaaaaatcagtggtacctagagtgtgtggccacttcttctcaaatatctgctgtaactagttcttgaccagtttttcccaccaaaactccagaactgatcaggtgtagtggctcacgcctataataccagtgctttgggaggccaaggcaggagggtttcttgagaccaggagttcaagaccatcatgggcaacatggtgataccccatctttacaaaaataaaaatagaaaaattaggtgtagtggtgtggctgtattcctagttactcaggaggctgaggcaaaacgattgcttgagcccagaagttcaaggttacagtgatttataatcatgttactgcactccagcctgggtgagagagtgagaccttgtctcaggggaaaaaaaagaaaaacaaaaacaaaaaacctgccagagtatgttatgctcatgacctgattaaaacaccagtcattactacccactctaatgccatctcacatccctgaagttatctatatctgcaagtcttccctttaattgtatttctggatatttattatccgagggaagaaaaagtcaacttagaatatttatccagtttattgatgataattctgctgaaagtgtcagtggcctttagttgttgaagaactctaagagatgaggacccaaggttgtctgtttccccccactctacctagatgcttcaaagggactttttagagcaccaagtaaatgacaatatgcattgcctcgaattttactgtatagtagtatccaaggaaactctttctagaaattctttaacttttgataaccagaaagatatgagaacatccctttggctactgattttacatttgcccccagaaagccatggatcatagcctgaaacaagcaaaaggaatgagttctatgtgggagccaaatttctagcctaaatatctaagtgtatctttttcccccgaatagttaaatagctctaacaagaccaaggttaaacacaaccccatatagtctacagtaaatataatgccaatacttagaaataggtgtattattatttttcaaacatgctacttgattgtgttctctggtagatgaaaggattagatatcaaaagttaaattcactacttgagatttttcagaatgtttctcactccaagttttgaaaaccttcttggctgcttattcaccatcttccttcactatatttgctgagccagccttggcccgtaggagtctttctctaggagtattagacaagttggcatttgataaattttctgtcctaacaacccccgtaggcccactttcagcacttgtgtgttacttgcaacaccctttctccattacaattaaaatgttatttattttaaatgaggaaattgcaaattttactgagaattaaaacattttcaattcacaattacagttttttttttttaaagctaagcatatatctctgattagtgaaagatggaagtgaaatgaaggcaggactaaggatgggatgaaagttttgggagctgattaggaatctgctcatttaacaagcatgaaggtttttttccttattgttctagcatggaatggattcttaaagaatcaaggcagttatcaagctgaagaaacttaattctaaggaattttggcttggattctccagagtggtagttttccaggctaaaatgcaccaaaaaaggtctatcatgagctcccttttgtgatacatgaaggtttcttgaaactggcactagcttttcaggatgatgtaaaagctttaactctgcattcagtcttttgggccattttatttctaccttttatgggcaatgttaaataaagcttcaagtactatgaagaataaaacctgattgtcctggtcccagtcacatcttaatgctctttccagaaagctagaacagcatattcttcctaggtggtatgaagattagcaaagggaaaaaaatgatagaaagaggccaggtgcggtggctcacgcatgtaatcccagcactttgggaggctgaggtgagcagatcacgagctcaggagtttgagaccagcctggcaaatatggtgaagccccgcctctattaaaaatacaaaaattagccaggggtggtggcatgcgcctgtaatcccagctactcagcagattgaggcaggagaattgcttgaacccagggggcagaggttgcagtgagccaagatcgcaccattgcactccagcctgggcgacagagccagattccatctcgaaacaaaagaaagaagcagaaattggaatgagaaatcaaacagattttcttggttgtcaacacagaactctattaaagtttgtgattttagtcctgcttctgacaccgagatctataagtagatggaggaaaaacaaaaacaaaaacaaaaaaccctcaacctcagaatttaagaggtaatagccatgttttctcacagtagcctccaggtgcccttggctctctggcttcatttctactgctccttcctgaagtgttcagaatttctttccatattgcttgtgtgcactgttacagatccagatgcctgccacactgcccactactgaactgtgaaagggctattttgtcctggaggaattttggtataatatttattgccagactaacttaaattcatgggaaaagggctagtgactacaaatagtaaaataacctgttatgagaatcctattcttatttaaaatagaaatgaatctcaagattataggattcaccatatatatattataaatacaataccttaaaatttaaaatatattcattcctaagaattctaatttgttacgcttattatgtaattttgttccatagcgtcacaattcatagtggaaggtagaacatttaaatgacttctcctctccagtgtttccaaaaattattgagtgcctgtatatttacagaccacaatggttacttaaaaataggcaatgtcatttaatgttatataattatgatatagggcagcactatacaatctaaaaaattgttttattaagtcagtcttatctttaactttatcctctctggctgtgcttagcatttgattctcagaataattcacattttactaccccaacaaggctaagaaactgaatctgtgacctcgttcttttctgatgtcctcaaaacaccagacacaacctctgaatgttttttccaggatatatagcatacagaaagactactaaggttacaaaagaataatagagtattaagggaagcaacattcagcaatttttctttctacccagaactaaaaatcatttgctaaatgtgaggccctctaacgaataatacctgggttaatgcttaggaacaaaagaccttcgttgaagtttatattcccctccagctctaaaatgtgactctgttaaacaattgtttaagaatacacagttacttatatttctagctgtgtgacaaaaatacctccaagaacaaattctggaaattctgaccccgttaagggaacatagagtaagctgagacaatgtggacttccttctctggagctgcagcctccgtcatctgtagcctctatttaccttacctcaggcttccttcagtccactctactctgtaactgccaccctctcttcaaaacttaaaagaatctagtaaccaattcgaattatttatacacttttgcttattcaaagtgctggtggtacaaagtgtatttgcttattgaaaggattgactgtattggcaacctgattagggaatgtggtaggtatggaaaggctttaaaaagcaatgagatttagtcatgtagagtgtgaggatgaaatcctaaccgaatgatatctattccgtacttcctgggaaggaggatcagcctgcaaagcctgctctgagggattctgagtatagaagaaaatctttccttactctgagatttgtaatgccctgacacaggccaggacagtgtgcagccagtgccctctccaactcttcctccccaacctggagcacagggaccttcacgaggtgcttgtttgctttctaaataattgaaattgattgatatttattaatgcttttcttttgttaaattagaacttcccagccagtcacgatggctcatgcctgtaatcccagtgctttgggaggctgaggcaggagaatcgtttgaggccaggagttctagaccagcttgggcaacatagtgagacccccacttctacaaaacattagttagatgtggtggcacatgcctattgtccaggcaacataagaagctgaggcaggaggattgcttgagcccaggagttcaaggctacagtgagctacagttgcaccactgtacttcatccagcctgggcaacagagcaagaatctgtctcttaaaaaagaaaaaacttctctaccctatctgatataacatttcaaagaaatagatcattaggatttatttcctttacaaattacttcattaccaataaagtattagtaataaattatataataaataaaatcatattttatttatataaatatataaccatatattaatatcaaataacataatagtaataataaatataatgcactattacttaggtcattgcatgccttattcatacctctcagagatcaacatatttaaatttcccagaatttttttttcttttttgagacggagtctcgcactgtcacccaggatggagtggaatggcacgatctcggctcactgcaacctccgcctcccgagttcaagcaattctcctgctgcagcctcctgagtagctaggattacaggtgccaaccaccacatccggctaattttttgtgtttttagtagagatggggtttcactatgttggccaggctggtcagctcctgacctcatgatccacctgccttggcctcccaaagtgttgggattgcaggtgtaagccaccgcgtccggccctgaagaactttttatgggctggtcatctacttgaaatcaatgaccaaatatagtcagtactttcatagtggcatttttctgcaagtcaaaatatgtaatgattcttcagtaatttaaataggaatttatagacagcacctattaagtatcagggcttgtgctcagttgctaatcaccaaacaacaagctaaacctagaggagaatcagcctagtcattttactgtgatcaggacccatcatgtagaaattaagctccttttctataataacatttgctaataatgtaatttattctgaaaactaagggccgctttgaatcttcgtattaaaaaataaaacatgtaagcataaccttagacttattttgcaaatttatgcaaacagtactctaaagagagtactgttaagactttttcccactttttccattgtacaagctgcaatgtagttttcttgatgaatactccatattcaaaaggaacatataagttttaatgatcccttaaaaggactgtcataagttttacatttatgccattccatactagaccctttgttccatgaatacaaggattgcctacctggttcaccattgaatctccaactcctaaaacacagtgcctcctgcttagcagcgcttaataaattgtcactgaatcaattacccttcctggaaacttccctcacttccctactgaacttaaggttcagttcaagcgctagatcccctaaaaagccctcccttatgtagatatactgcttaatgttttactgggacacaacctcagcaacttatttgcatgcttttcagaaactttttccttaaatatgttttcttttcattcctattacctcttaatttgaccgctcagtcctatttttaacctccacgtctccaaacacatttaacacattagagtatacatgtaagcattcaattaactcatgtagactacatgattgattgatcttggttaccattcattccatcaataaacattcattaagttcctgcatatttcttgaaacagccagcacagcattgaatacacaaatatccctgttctcttggagcttattatctgctagtaagagacgatcaagcaaaggaataaatgaataaatgaggaatacaagaatgttagatactgaggagtgctgtgaaaaaaagatgtgaaagggagtgactaaaggttaaaattaaaaataaaataaaataacggttgctgagggcctctctgaggagttaacagttggtctgagaccagaatgacaggtaggaacgtgttatggaaagatttgggagaagagcgttcagcatggtattgggctggaatgagctggacacattgagaattaaagggatgtgtgtgtgtttgagggtcatgatcgcaaggacttctgttcaggacatctgggatgtgagatgctgccaaggggagatacagcccagtgaagatgtcctttgagcaatatgtgttggaatcctggtggggggtaggggagagaaaggggcagaaccaaatataaaaatcagtatgtggtgcttatattttagaagtgttggtacccaaagtggcaatgtaaccatagaagagatggaaacccgggaccaagtcatggacatgtaaacctttttagagtaaagcagaagaatctactaaagagaccaagaaggaatccccagcaaattaggaagaaaactgggagaaaatgaccttgagaatgaagggctgtttgattgtgttgagtgctgccgagacgtctagtaaagtggtcatgggaaacttagcaatattggagttgccatcattcttacaagagtggtcatagtagggtcatggatgtggatagcaatctgcttggactgggtggagaagataaggtgtgagaaaaaggggaggcagcaaaagttaaccatttcaagaagttttattgggaaaaggaataaagagattgaagctggaagaaaattggaggttaagggaggaattttttgtttgttcttaaaaaaagtgttttaacagtatgcttgtaagttaatggacataaccaagtatagaggaatcaagagaaagatcgatgatgcctcaaggagaggtttaaaatgcggaagcaaatgccctgaaaagttaaaagggattggcttctaagatacaaatgacacagattttgataagcacaaggagtgactataaatatgaagactgtttctcattatggaaatatttctgtgttaaaatcttgaaaagctaaagtaggccaggtggagccgcatgattttgctgatttggtgccacgtttcacctgcaaaaagaccacttttctatggcccaagctaatatactatgaatataactataatatacatatgtaaaatagctcagaatacacaaattgaaacagatgatgagcttatgtgtgttttccattttctcttttgttaaaatatgtatggaaagttttaacataattttaggacaaatatatgggaaatactaaatacttctagaattgaatgttgcttatttcagcttggcttttaggttaagtcataatgaatgctgaacagaacaggcaaagacagaatcagatccctgtggttattctagttttatcagagcctttgtgttctcttctaaaggattaaagtgtctgctacatactgcaagattcatttccttaagatctttgtttcttagtgcctttgatgtaaaaaatttaaaattaaaatgaatccatgtattttataagatttctctttaaagatgtgtcagttggcttaaatatttatattttcttttgtcacaggcttatttatattcatcttccactgtgctatgaaggagaatgttcagaaacagtggcggcagcatctctgctgtggtagatttcggttagcagataactcaggtaaagagttgttgattaaattttacatctacaagtagatgggaaagtttgtcattcagtctttcattgtcagagcaacccagtcccagtggtagcaagctattgaagtggagcatgtgaagatgcgtagttggaatcatagaatatcagggctggaagagatcagagaactttgagcccaacccttctattctgcagaggagaagcatgaattccatacaagttaaatgagttgcctgaggtttgatgtctaatttaataacccgtatacccagaggttccactataccagactcacctttccacattttctagatccgcaattacattattaagcaaagagatttttctcagtattaaaaaaaaaaaaaaaactgaaaaaacctactttgtcttttttcttttctttatctttctttgtttttctttttactgtcagtggttacttctcatctttgggatattgaaagtgagattttaaatagtacgtatacaaggtcaaagtaagaaattatcaatatcctcttattgtttacatgtcagtctcttctctgagccattgccagcatatcagaaaatcagatgctccagataaataatgcagtgatgattttttcagagcagttcatattcccggtaaagcagattgatagggtgatgtcattttttttttcagattggagtaagacagctaccaatatcatcaagaaaagttctgataatctaggaaaatctttgtcttcaagctccattggttccaactcaacctatcttacatccaaatctaaatccagctctaccacctatttcaaaaggaatagccacacaggtgagtctaaagatgtcctcaagtttagttctcatcacattttcattgcaaaaattggcatatcatgaagattgataaatcacagtgcctaagagggtgcatcttttagatttatgaaaataaaaatccgtttgaagacgttatccaacacctttatgaatattttgtccttttaaaaattttgtaacccaaactctagctatataaccataataattcactctgtatattattgttacttcatcatttgattcaaaaacttggttatctttaacaattatggtattttgtttaaaaagttatatatttttaaaattaaaaattgaattacagattatttcagcatagtatgataattactggacaagttgtcttgggaacaggaagaaacaatatctaggatgtacattttatttaagacttaattccttaaccattgcaaatgttattgatgactgccctttaaatcactgattatatatgaaagaacataatatttagaaagtgacacagggctataagaaacactgtctttcataatatcctgttttttcatgatatttacaattgctgcacattctgacactgaacatgtatgtgaaaaatcctgacgacaccatggaaataaagaatattttaagccaggtgctatgacacatgcctggagtcccagctgctctggaggctgagatggtgggattgcttgtgccctggagttcaggctgcagtgagaaatgattgagcaactgtaccacagcctgggcaacatagcaagaccccatctcaaaaaaatagtaatattttgcagcacttgatagtgaatgatgtgaaaatgtgtaactttttcatgttttcaaagggaaataatagaattgctacttttaaattaaacccctggcagacagctgtcaacatttaaaacagagcactttcctaattaaagataattctaaaaggataatggaaataacttttaaatttttaatttgtttagctattaaacatgagcagaggtgaatggcacaaagaagattaatacttggctttttgcaaatagggagtaaggtgtgtgatgtgtctgtaattattcatattgcaaatacttgaattacagataaccctggtgtacatttgaatccatatacatgccctgtttgcaccgttttctatgtcttgccactggggtggccactgcctgggattcatgatagtgctatggaaaaagttttgagtgtttagacagttctttaattccaaaattaattaaaaatccaagaacttggagcaacttagaacagcagttcttaaagcttcttgaagtctaggacattttggggggaattgaatgaaggctgttgattctcttccagaaaaaaaaggtacagactttgaatcattttcacaattttgcataaaattagagaagtctgtgcacctctgcttaagaatacctgtgtaaataaattgataacaggggtatagcctaagatagattattctacttatttggtggttccgtggcacaaaatatttttgcttataatgaattatttttttcactttatttaaccaaacttaaaatttgatactcattttgcctccccttctaaaatacaaatacttaatgccttatcagttattaatgaataggaattaaaccaaatgaattgctttcctcttaaacagctgaaaatagctggcctgaagaaatgccactcttaaaagaggaaagaagataacaaggcagttaatttggaacatgaggcattttggaaatattaaggatagaaagggctataggattcgggggaaaacggactagaagataaaagaggaaatgcagagatggaggtccaaaggcagactttactattttaaaatattgtctgttcttcattttgttttatttcatctattattttattttatttatttatttattttgacacagggtctcgctctgtttaccaggctggagtgcaagggcacactcacggtagaggcttactgcagcctctacctcctgggttcaagcaatcctcctacctcagcctcccgagtagctgggactacaggtgtgcaccaccacacttgtctaatttttgtatttttgtagagatgaggtctcatcatcttacccaggctagtctcaaactcctgggctcaaggaattttcctgcctcagcctcccagagtcctgggattacagacgtgagccaccacacttagccttttgttttgttttttaaagaatgcattaatgttcttgtttcccttaacaaaaaacccttggggctaaatgggttcttgtcaactaggatgagaatatagttagttatatggcattacttcaatgttataataaatcctggtttacagtcaactgacttcacataggctttggctacccagacagttctcagtggaacagttagcatcctgggatcactcaaggtatgcaaaacgtcactgcatatcatcatggatatctagctggttcatttcttggaattgatctagatattcatatgtttatggtatagataatgtctcctatgagcattccttcaacaaaagtggatcactcaggtaaactttcgttacttttttgaatgcatgaattttttgcaaggtaataagagaatatgtgcatggattaagctaagattcttgctgcatcggcaaaatggcttgttcttttcagctagcacaatgacattcctgcattgagctggaatttctgaagttttgaatgatagtgtgtgctgtgctggctcttctctgcatggggtatctgcaagcggctccttctaggaaatgtaccatggtctggagtgagtggagcacatattatgtaaaataatgacagaaagcagtacttgagaaaagatttgttgtagaaggacatgaaatgctttatttttccactgctcatgtggatttctgggtatgtcatggtacattcatagaagtcatgtaagtgaaattgtgaattccaagcctgctttgtgagaattgttatctgcttgaaatttcagcataggtcaaataatagttcatatccctagcccctggttttcagacttgcaactataatcaaagtctttattacccataatgtaatatctaaccagaagactgggaatagcatatataaaaatacagccctcattcagaattttgctttgttaaactgcaaagacccactaaattggatcacattgttgaaatgaagcttttcaaaatctctaaaagtacatgccactggaagttacaaaggaaacagagtgactatatccttgatatctctctgaggatatgtggttttctaaaaacaccaagcactaattattcattattaatatataagtcaatagaaaaatccccaccagaaaaccaatggctagtgaatatatgaactgaaaggaagctcagaatcaatcagcttgctgagagcctaatggggaggggccttttgtcatgactccttgagccttttccttgccgacattggaaaatgcttcagttgttccaccatgcttcagtttgctcgttctctccatgaaccatctattcttctctctagcatcctttagtgtgggttgagtatcccatttccctttttagccctcattgtatttagtgtcggcttcaacacaagataatagttgagcaatttgaatagtttccaaagacaacagatatcatgatgatgatggcttttaccaattattgatggattttaaatgttttgtcacatactgagtccagcatactcaaaatgtaaaaagcattggagtgaagattccaattttagagccatgatttctaaaaatttttcaggatagagtttttgcctcttccacaatgtatggagaaggtacataggaaactgaatactttataaaagttcatatcttctttatcagtgtaaaatttctataatttggttaatttgagggtagaattttttcctaaagtgtatttggagagggaagtgcttaaaagatatttgtaggatacatgaagacaaccatacgtctttatagataatagagcataagtgggtttcagaacactatctgagccaattttagaaagcttttgtgtatagggaaataacatttaaatatatgatactgaaaattttagaaaaaattatttagcagtcctttattactatcagttgctataatattagtgctgttagcaataacatcattcagaaactacaagataattaatataaataaatcattttctattaaaatatttctggtaataactttgattgctacaattaaaaaaataattcacaagaagtaccctttttgctattttccagttgtttatccagctaaaaaccttgggaaaatacgttcaaagtagcatttcatatttattttcatttgcttgtattctccaaaatcctttaaatttaattttataaaattttttgttatgaaaagtgtcaaacctatataaaaaatagagaggatactattataaagccccttgtaaccatcaatttatagccagttatacacccctacccatttttcccttcctatattatttgaaaacatatcttagatataatttcttccacaaatatttcagcacattctaattccttataattttgtacatctttcaagccatagtgcatgtttttttgaagtggttttccaattattttttcattggctctgctacattcaagaatatttcgtatggtaagccacagtacaaattactagaagggaagttgacactcagtgactatcaggagtatacttagaagaagaaaaacatggaagtttagtgttgcctattacctaatataagaaagaatcggagctttattttcttttgttcttctttaatgtgcaaaacggagtatacaatatggtggcctgtaggcatgccaccagctcatcttgaacctaatttcttgtatcatttcttgcagacagtgcttccatggacaagtccttgtcaaaactggcccatgctgatggagatcaaacatcaatcatccctgtccatcaggtcattgataaggtcaagggttattgcaatgctcattcagacaacttctataaaaatattatcatgtcagacaccttcagccacagcacaaagttttaatgtctttaagaaaaagaaatcaatctgcagaaatgtgaagatttgcaagcagtgtaaactgcaactagtgatgtaaatgtgctattacctaggtaactgcatatatataaggaatgtattttgttaagaaggcttttgtgaaattcagaatttttctttttaatatatttcttccatggaagagttgtcatcactaaaacttcagtactgagagtaacatgactcagtagccacagaagctatgatttgtaaaatatataattgaatcagagtaatcataatgcaggggagacattcaaattagagacaagggagaagcaatgctgaggaagaccctagatagagctcattttactccacctaatcgttatatctggatatacccattttctgcatcttctttctcaacaataaaaaatgtaactattttgaatgcccacaaatcccattccagtgttactttctgtgaatgcagtaccatattctcattttcaatgacatttcaaccacaggcagaaaagactgtttactccttgacccaaagattaaaaaggattttttattattttaaatattacaccttcagaaccataacatgcttaagaaaactttcccaaaatgttgacctagttaaatgaggctatataaatttctaatattttacttattctattcaaggcatagggccaaagcattaagtataatttaatcccatacattcgagttaagtttagtgttgatgttccatcattctggacctcccaggagttgtttaagaatgaatctcttacacctctacttttgcccctctactgtatattaagcccataggcttgtgggaggaaggagaatttccattaggcaagctgtatgcagtggaattttccttttaggagacacacaattaagactctctggttctgtccttgctttggagactttaagacatttcctaaagcacaaataaaagcctcgtatttccccattgagagttttgttccaaggaatatgaagtgagacatatgggtgagtcataataatcaaaataatttatgaagagctgggtctgcaatagctagtctaaaaactacttgtgtgtcagtcctctggttatagtatataagagcctgaggaggtctggcaagatagatggtgtattatttatggatcaggctgctgcatacaaaccttgcatactattatgcagcttacctaactctcagactattctgagtaatgcttgcttgctaatgaatgtataggagaccacattgtaattgttcttagatgatggagtccatgcagtttcttagaaatcggtctcagtgcatgctgtgctttttcacatttgctctgggttatctgggaagtatcaggttctgggaggcaacagcattaagtgataagaaaaggagacattctggcaaagccaatctgcttaaaggcaaagtccagaacctggaacctagaggcctttctctctgcacgaaaaacaggtagtttgcagtctgagatatgggagagcttttaggctacacagcaacccaagggacctctcaccttttgctgagcttcaatcaggaagctatttgcctggctccagcagatgatgagataatgaggtagtgggttttttattactgttccattttgcaacatcctgcaacaccatcctgggagacaagagcattacccagcttggctttcacgggggagggttgtattcagtaaaaaagaatagtaaatataaggtcactgagattctaagtaagatagtaaatctaaggtcactgagccaaatccttttcaataggcatatattaacaggctgcttattttggcggaggttacatatggatgaaaatgaatcttagtcactgaatattcatatacatttcccccaaaaccttagacattcatagtagattttaattagttagctttctaactagtcagatttctgcccaaagtgcttagtcaatagtaattaagatatagcttcaaaaatggctttgcttttgatttctactcatattcgtatggctccagaaaaatatttttttcatatttgacaatgtcagctccactttagaaattttcaataaccagatgagaaaaaaattaagaaattgctcaagggaaacatttgtaaatggatttgaaagattgagccaaattctgttgtcagttctaagcatgcagttctcacctccatttagtcccccatcagaacagaggtcaggaatttagctggggagcctaaatttagttcagcttacctttgagaatagcatcaattcagactctcttttcattatgttttcttttctttttccctctttttaaactacattgtgttagagtcatagtctaggatcctgagagattttccattcttgtcaccattcacttgcattgtaaagattttctttgtctgttgttggcatagattcttttgtacatatttatttatttgtgtttatatatgtcaattggtttcctttcttagcttgatattgcctagctttgttgttttaattaactttctattagagagactgtatatattttttctaaatactttgtgaaatcatttttggtagcaatatctttgaatatgatgaataaaagtgactgtgagtgcaaatagaattagcagtaagaagctactctagctaatttgccattttacttaaatggaaaatgtttttcaaataaatacttatgttgttcatgttccaagttattcaa

SEQ ID NO: 662 - DNA, 9974 bp, Homo sapiens
tgagatcacttcccttgcagactttggaagggagagcactttattacagaccttggaagcaagaggattgcattcagcctagttcctggttgctggccaaagtaagtagaactttgtaagtaatttgcagtgtactttgaaagtggggtataaattaaaaataaaatcaagtccccctactgactgaatggatcccctcttgtcctaggcgaccccagagaaacctggaaaactaaattccaggccataatggaaagggaggtcagacacgcctcattatacacactcccttttggagttcaggcacaactgaccagcattaacattgaaacagtgatcataagactgtcaaaatggactgtttgtgggaataagataccaaattccaatctgactctggtttagcatcacatgacaatagcagaccctgaaggaaatcaatatatttaatccccaaaatatatttctttgacacatattgaaatggtcttgcaaaaccatcttttatggggaaatttgctggtttctggctctgctctgattgaggagagaataaatgagagtctgacaccttaaaaatctgaaaagagatatttaccatctgttttctctaaggctgctagctggaggtttcatctacatgacataaaccatggttcccataagcccttttaactcaagcatttaattgtactgaccgcaagtctttagacaaaacttaactcttcaacaaattgccaatcacaaaatctttgaatccacctttgtcctgtaagctctcctacttcaatatgtctgattttcaggcagagccaatgtataccttatgtgggggccataggctgttggccccctaaagcttcactaaaagtcactgtcatgtgacaggttgattaataggggaaagggagtacaaatttatttaatgtatatacatggtctattagccaggaccctttagagggccagaactaataggatagatgtatacataaaggggagtttattaaggagtagtgagtcacatgatcacaaggtgacgtcccacagtaggccgtctgcaagctgaggagcaaggaagccagtccgagtcccaaaacctcaaaagtagggaagccgacagtgcagccttcagtctgtggtcaaaggtccaggagtccaaaggctgaagaacttggagtttgatgtttgagggcaggaagcatccagcacaggagaaagatgtaggctgggagactaagccagtctagtctttccacattcttctgcctactttcattctggctgtgctggcagctgattagatggtgcccacccggattgagggtgggcctccctttctcagtccactgattcaaatgttaatttcctttggcaacaccctcacagacacacccaggaacaatactttgaatccttcaatccaatcaagttgacactcaatattaaccaccacacttgggaaacttgagaatgaagacccaacttcccagtaagttacagaaactcatgtattattccgaggccacagtaaagagtggagactcaaagcatggccagaaacaggtaaattagttttagtggcaacacaggttaagagagagaggaaggaagaagctcggctagcaaaggtggccttgttatgtagacgaaccttttctcagaagcaaaagatggtaaatgtttctatccagatctttaaaggtgtcagactctcaatcgctctggatcctgggaaaggcttagaaacaggagagggtatggctgcattaatggacattgtccacagacgcaaattttcctcagttaagacagttttgcaatgccacttctgcttgttggccagtggaaaccatttttaaatatgtcaaagaaatatatttgagggtaaaatattttgattttcttcagtccccactttgaaatttaaaacaagtttcacatactaaaagccaaggtaatagctttggggagatttaagttagaggtgtttagatagagacagtcatagcagtggaaaaacacatttgggataaatataaatgagcaaatttaaatatatcattccatattttctttaggcagtcccttggttttgaggtgagatcagttcagttaaatatctacgtcccattccaggaggtgggactgcaaatggtttaggcctttagacgtaatgtaggcaatcagatttctagtaggaggcatttctgtagaaacagaaaaaaataaataaataaatgttactatctggagtagtctatatatctagaaaagctagtctatagctttttctctgaggcgtcttcatattgcagtggcaatgtcccagatttccctggaagttcaaaccaggtgttccactgaactttctgagaaggcctcacatcagcagatatgcatgaaggttgtttataagttactgttattttctcctgataccttcagtttgcaagactttaagaaaaccccagttttaatttctagtgaattcaagtaagaaaaatgggagaaaacgttgaaaatgttactttgcagacttgtagccagaaaaaaattcaggatttggtctaacttgtaaaaaataataaaaactgaaaaaacaatgggcaaggctagaagatactaacagatacactatagtttttgaaacatagtatttctgcttccagttcttcaattttatgaaagacatagtttcatgcacatccgtgtgaagagaccaccaaacagactctgtgtgagcaacatggctgtttatttcacctgggtgcaggcgggctgagtcctaaaagagagtcagtgaagggagataagggtggggccattttataggatttggatagataaaagaaaagtacagtcaaaggggggttgttctctggcaggcagagtgggggtcacaaggtgctcagtaggggagctattgagccaggatgagccaggagaaggaatttcacaagacagtgtcatcagttaaggcaggaacaggccattttcccatcttttgtggtggaatgtcatcagtaaggcaggaaccggccatctggatgtgtacatgcaggtcacgggatatgatggcttagcttaggctcagaggcctgacacacagtagaactgatttatttgcaaaataagttttgttactatacttggtctgattttttgcataaagggcagcaagaataattatttactatataggctcctttttaaaaaatggctttgctggaacattcttttttgtaaagaatctcatattagacctcttaaaagcatcctgagcccaaccaaggatttatctgtttctacgagatacctgtatgaattaagtgaattctctctcaaggtcccaaaataagttggggttcctgggcctgtcagaatgtgaccttcttttacccattacaggccagaaacctgtaaaggaacctgtaaaggaactgcatagacaagctgtgaggccagttttatccacagggctattatcagctttataaagtcccaatatcaatttcttaaaaatagggcattccagtcaaatccttgatttttgtctccacttgtggcctgttacaaaacaaaacagattctaactgaatttatgcaaataattatattcccataaattagcaataatcactaagagtttccaaatttcagagaaatcaggcagatagagggaaatatgcttcaaattttgctcacaagagtatactttacacaaatattaaaagctgtaaatgtctaaaaagaaaaaaattttgactctgaaaaacaaaagtggcaatgtttcaacaaaacccataaaaagattatttcagtcttctattatttcagtccatgcaattaactcctattctgttagatattgggtgagcaatcttcatgaacatattagttctccatgagagtcctgggagttttttttctctataccagtggcacaatctccaaagttatcataaagcttcattcaaaagcaccccttagagtcctatagctaattgcaaaccacctttttaaaagcaccaaagtagaacaactgtcaatgacagaagtcttaggacagccatggtcaaggacacacttaacaaggaaatttggttatttctgtggcatataacaatttaacataataattataaatactaataacatatataaagacatcagaatgataggaatatcacgcaatgttgaaaaacatactagtaacaggtttaatataaatgtagaacaaataaagttgaacaccatttcatatttgacaatgtttcctatatgattttaacatgccaaatacaccgaatatgtctgtttttggcttcaggggacttaatatcaaaaaagataatgaggtcaacaagactgaatttagaatttgattttggaaagtttgattttcttcagtccccactttgaaacttaaaacaagtttcatatattaaaagccaaggtaatagctttggagagatttgggttacgggtatttagatagagacagatattgtggtggaaaaacaaattacaatcaccaaacaggtcattgtaaataagtcattcatttaggcaaagtgataactcaaagatttcaaaaagtaaaaaccttcactctttgagagagaggactcactttcacaaacaataagacctaataaagacagcatgaggccaactaaatttgtctctcttccccaacccatctttttttttttttttttgcagttttctcaaaaggtaagcaaaaatctttcactatctcttaatattaaaagaaaatcttattcaaaggaaatctaaattttaccattgcatagcttattattaatgctaaagttagcattaataaaatcttacaaacaaatctatttaattagttgtaacacaaggtagagatttttataaatcttttacaacattttataattttccataaaagagcagattagtattctaataaaaccctgatattttgacataagggcctagattctggccctgaattagtatgctttttattttaaggtttaatttatgcaaaaactaaataatccctttcaaattttagccagctggcttatatatagaattccttttacaagatcaatgatcaatctttcataaacctttagttttgtccacatttttaacttaaaacaatctttaaaatctaaaaaatttttttttgttcttttgagaccgaatctcactctgtcagccaggctggagtgcctgcctccagggttcaagtgattctcctgcctcagcctcctgagtagctgggattacagctgtgcatgaccacacccgcctaatttttgtatttttagtagagacggggtttcaccacgttggtcaggatggtctcgaacccctgacctcgtgatctgcccaccttggcttcccaaagtgctgggatgacaggcatgaaccaatgcacccagcctgtaattttttaaataaataagactagcttaatattcgtttcataaaaacagctaaatcctgagctatctgtaaaaaaatacgtttaacattaaggtttatacttgggtgaacacctgatattcacaggctataaaatagttagcaaggaaataactttaaatgtgactagttttgtctaatgtctcagttctcaaagcaatctaggtaaactgctaacaatgaataaattgaacaaatataagtgggatggataaatgcttgttggttaacttttatgtaatttaaaatcttaaacttattttggattaaagaacagctactcattaatagtttggctcatttccaattaagtagagatatggagaaacatgcctaaaaattatagagtgatttcatctataaagtactgatacctgatatgcagtttaggatttcatgtttcctaggtttaaggtcactaaaaataaaaattccacttaatatataattctgtttataaagtctgtcaaagacatgtttttgatgaaaaaagaaaataatataagacaaatagaaaaatgtattctcattaaaaagaaaatcacttttgtctaattcaaaggttatttatgaaacaaagtaaaaaggaaccagtaaataggggaaagagatgtaaagaaagttatagatataaagatgtatttgtgataagagagattaaaaagaaaagagaattattttgtatgataaataattttatatttttttctgaagtaagatgactggtaatctaagaaagagggaaatttaggatacaatggaaagtccaatcatgttggaagtggcatgtgtataatcaaattcataaaagaaattttgtttgtggttatgttggctttaattaaaattgaattatttatagtcgtctttctggaaactgagctttgaccaaaaaaaccacaatacaaaaccaaaacattggttagagcaataagggtttcttaaagtattgatttgctcttcattaaattccaagaagttttaatgtttaatgctatttttttctttttgaaacttctcagatatctcagaagttcaacttctggtgtatcctgctgcttttagccttttcttcatttgagaatagctgagatcttaactctctctttcaactttttgttggctctggcaaattttttttttcttcaggtctaaatctgttgctatagcctgatgctgaagtgtttcgtcttaaagcttcaaaaaaagcaatgttttcttccattatcacttaattctgtgctgttggcttttcctcctatgagtaagggccagaaaccctctgaaggattactgaaaaatcaactcacaaaagatagatcagttgaagagaaggcatgcagatttgtttggagtgtgtatgctggagtcttcagaataaagaccccaacacacaggggaaattgtcctttttatgcttaggtgcgacaaggtatgggcacatataaaaatatgattgaggcaaaaggcataacctaatgccaatggactggggaaacccagcaagacctgtctgtctagattcctcttgacctctctgagcatgtactccttccttctgggtatagggatcttatgacctacaatccaacaaggtaagttggataatttctttatggctaattcatacacagaaagggagagggcaaattagagtaatatttttagactttgtggctggttttgagaaaaaggagttctgatttctaggttctgccttggggaaagagattctagtttgtttggccagctttgagggatattgggactgagagataggaggccaggagaaggccaaagaaaaactgacttctgaagcttttaccttggggcactgtcttctgagctacaacgtgtatttaaagtcttcgacgaaaccatgaaacttcctatgctggtactaagagtcacgtattcccctgctcaagttactagtaaattctttgttagtattgttcttcagtgggttctccccagtagctttgggttgatatcctcccagcttctagccttgcagcataatacatgtgcttagatttcagcaaaaatgcctcaatagagtttcaatgatctacttaggtcacatgccacccatcagccaagctttggtcctagagctgttgtgtttgaagtggtcctacatagtttatgtgacagcccatagagctcaatatgggcagcctattgtccacacagtagctagacagatcactttgattaggcgaacactgttccgcttataacccttctctcatcctgtctcactttgatttctcatctcgtttagaatagaagccaaaatataagcattggctccaaggccactgttagttgtcagatatcatctcaatccattccccttctcactgactgtgctccagtcaccctggcttcctggatgtttcctcaacacttgggacaggttccagctaaggatcctggtactttctgttccactgcatggaacaatcctcctcacacatatccacagaacttattctctagcatccttaaagtcttagtgagcctttctttaaccaccttgtttgaattcagtgctctccctgtgcacccactaacccctctttttgttttcaccaggcacttaccacaatctaacagactgcatgttttatccatttattcagtttcctatttgtgtcccttcaactcccattaaaatataatatttttgagggcaagcaagtactagaacaataggaaacacatcaagagtattctgtaaactatttcttgaatcaatcagtgaatgaatgaattaatcaatatattttttgagtgaggagctttgtgttaggtacagctaaatgggaaatcaagtgggtcatgtaccatgaataccatatactctactgtataattctcctgcttatatcagaaactgtttataagcctattataattgataccaattggaatctcttttttactcatcaccaagaacaccacaaacaagttgtttaccatttggctccttatttaatctggatttccaactcctcatgcttaaaagacggaagatacaataatactttccttacagggttctgagactactaagagaacttatgcatgtaaaagggattcatgcagtagaaatactaacaaaagaattactatgacagatacttataaccattgtgtttttacgtatttaaaatacgttatacctataattagtcacacgaggaaatcaaatgctaaagtatgatatgtttttatgttttgtttttcttgcttaggggatcatggacattgaagcatattttgaaagaattggctataagaactctaggaacaaattggacttggaaacattaactgacattcttgagcaccagatccgggctgttccctttgagaaccttaacatgcattgtgggcaagccatggagttgggcttagaggctatttttgatcacattgtaagaagaaaccggggtgggtggtgtctccaggtcaatcaacttctgtactgggctctgaccacaatcggttttcagaccacaatgttaggagggtatttttacatccctccagttaacaaatacagcactggcatggttcaccttctcctgcaggtgaccattgacggcaggaattacattgtcgatgctgggtctggaagctcctcccagatgtggcagcctctagaattaatttctgggaaggatcagcctcaggtgccttgcattttctgcttgacagaagagagaggaatctggtacctggaccaaatcaggagagagcagtatattacaaacaaagaatttcttaattctcatctcctgccaaagaagaaacaccaaaaaatatacttatttacgcttgaacctcgaacaattgaagattttgagtctatgaatacatacctgcagacgtctccaacatcttcatttataaccacatcattttgttccttgcagaccccagaaggggtttactgtttggtgggcttcatcctcacctatagaaaattcaattataaagacaatacagatctggtcgagtttaaaactctcactgaggaagaggttgaagaagtgctgagaaatatatttaagatttccttggggagaaatctcgtgcccaaacctggtgatggatcccttactatttagaataaggaacaaaataaacccttgtgtatgtatcacccaactcactaattatcaacttatgtgctatcagatatcctctctaccctcacgttattttgaagaaaatcctaaacatcaaatactttcatccataaaaatgtcagcatttattaaaaaacaataactttttaaagaaacataaggacacattttcaaattaataaaaataaaggcattttaaggatggcctgtgattatcttgggaagcagagtgattcatgctagaaaacatttaatattgatttattgttgaattcatagtaaatttttactggtaaatgaataaagaatattgtggaaaaa

SEQ ID NO: 663 - DNA, 1249 bp, Homo sapiens
aagaaacaagctgggcagctctgggagagaggagtgtcagacagctgttgtcaacaggcacctggccagagtgaaaaggaggggcagattccatccaagtcccagcggcgccagctgacactctctgccaatgcccaggtgctgagcgacagtgtcccaccggtccctgtgcccagaatggcctgcaccaagaccctgcaacagtcccagcccatctccgcaggagccaccacaaccaccaccgctgtggcccctgctgggggtcattctggctccacagaatgtgacctggagtgtctggtgtgccgggagccctacagctgtccccggttgcccaagctgctggcctgccagcatgccttctgcgccatctgcctgaagctcctgctgtgcgtgcaggacaacacctggtccatcacctgcccgctgtgccgcaaggtcaccgccgtccccgggggcctcatctgcagcctgcgcgaccatgaggcggtggtggggcagctggcccagccatgcacagaggtatcgctctgtcctcaggggctggtggatcctgctgacttggcagcaggacaccccagcttggtgggagaggatggacaggatgaagtaagtgcaaaccacgtggcagcccggcgcctggccgcgcacctactcctgctggccttgctcattatcctcatcgggcccttcatctacccgggtgtcttacgatgggtgctcaccttcatcatcgccctggccctgctgatgtccaccctcttctgctgtctccccagcacccggggcagctgctggccctcctccaggactctcttctgcagagagcagaaacacagccacatctcttccattgcctgagtgccctctgatgaggctatccctgcagccctttctgcccttgggcccccggacttccacaatgaacagggtaaggggttacggactaagactggctcctttgggaaatcacatgccagcgggacttgcaagccacaaccgagatggccagcctgggtcaagaattacacgcttggatgacaggcttgcacttgcccttgggatagcatagctaaaactgttggtggctaggggagcagacacaaactacttgaacatgacaagatgggggaagctcctgttcctcttattccaatgttcttggtttttctttatataacttgatgaaagtattgcagtattgatgccattgtagaatagaactggaattccattctttttgcaattt

SEQ ID NO: 664 - DNA, 32951 bp, Homo sapiens
ggccaggaacgccagccgttcacgcgttcggtcctccttggctgactcaccgccctggccgccgcaccatggacgcccccaggcaggtggtcaactttgggcctggtcccgccaagctgccgcactcagtaagtccccgcgagcgggcgccgggagtgaggttcaggcgggagcacgcacgcgggtgggtttgcatccctgcgtgtggcagtcggattcccgctccctgccttgagtcccctaggcgctttgcatcagcgtgcacagcgggatcagcagctccggcaagcgggcttcgggaagaatgcagttggtgaggaagctcggcgaggcgtgcccgtgcagctgcccctggccctgactgctggtgcgaggcagtgcacgactcagctggccggggcctgctgtcccgccggtgccacgcacctgcagacgcccgggctgtgccatctcctgggccggtccgggggctggggcggggcgaaaaagaaaaagctctgatctctgccttcgcctcgcgcagctgtgcggcgagcccgggcagtgtggagcggatgcatgaatggacatagtgtgaatgagtgatgaacgggaatgaaccgatgacaggttttgcatatgcagtggatcacgttagctgaaagggattgcaaacttaaaggtccgcgtgtgcgtgcccccctacgccttacaccagtgtttgctttagccagcacttaggaacactgcttttcagaaatgtaaatttgaaaaccttcagtccagctttcccctccttgtcccccatagaacctaccctttcctaaagcctttctccccacccccctcctttttttaacctgcttgtcccctaaaggcgttcgagtattctaactctggtagactttgggctgcttaacccaattccctgttcatttcgttctggagtaaaccgagtgattgaattctctcccgggccacaatcagatcttgctggtggaactcactctctgccttcccaggccccagcccggctcctcccctcccccgccaaacccaccgtccccagccccacccgcagtgaagaaggcaaagtctccgatgtgccttgagcccattgtcaggcggctgccgccgccgttagatttttatttttctaaccaggatagagctgataatatgttggagcagcatgaggcatagccaagtattttacaattatcaattgttgagcagagtagaaatctccctgggacagagcctcctctgtgttgtggtaagaacagagaatccaattttaaaggggaaaggacttcttacttttctaggggcagcgctcacagtagctgagaggacagggcttattttttctcagtggttacagttcattttaggcgagattccctgctccagctgtggagatgtttcctgtagcctcctcctgcaccccccatgttttggagtgttcccaacgtttgttccctatgtatttcgttattaatttattactataattgtaatggcaattgtcatcagtaatacaattatttgttattaatttttctgggaggatttttgcccttggactgcatgtaacctggggggcaggagggtgagggggcaggcagatgttgctttttatgtatttccttgatttagttgaattgtaaatattagagaagctttcaaacttcttttgactgtaacctacagtgaaaaacatgtttacaaaatgacaaagtatacacattcaattgtaacaaaaataaatgccttatgaaatgatgtgtagcctaattacctgtgacatacactattttgtattctatcctgctctagtctgttctgtttcattaaaaaaattagtcgtgagctgggtgtggtggcgcacgcctgtaatccaagcaactcaggaggctaaggtgggaggatctcttgagcccaggagtttgaggctgtagtgaactgtgattgtcccactgcattccaggctgggtgatagagcaagaccctgtctcttaacaaaaaaaaaaaaaaaaaaaaaaaaaaaattggttatgatccacaaaagcaatgcattcttcaactggaaaaaaaaaaacctactggattagggaggtgtgatttttcagtaggagtctttaaaactgtttgtaattattttggttataaacttttatagaactattttcaatgaatgctgtctataagaaagatacagtctcaggagcaagttcaaagattattcacagatgaatgtttctctttactaaaagaaaagattcactctattttatttgatcagctggtgctaacaagcatccaacatttcagaaaacaataacacattcttagacccagtcgtcaaggcagtcttttttttaatctaattcttttttttttttttttttgagagaagtcaagctctgtcacgaggctggagtgcagtcgcttggtctcggctcactgaaacctccgcctcccgggttccagcgattcttctgcctccgcctcctgagtaactgggattacaggcacccaccaccaagcccagctaatttttgtatttttagtagagacggggtttcaccatgttggccaagatggtctcaatctcttgacctcatgatctgcccgccttggcctcccaaagtgctgggattacaggcgtgagccaccacgcccggccttgtctaattctttattgttaaaatactgttttttgagacaagttgcaatccagtttaggttatagctgtgttttaatgatgccctccttagcaagcatcttaaaaaaaaaggtgcctcctatctgtagaccttctctggctggttgcttttgcacttattttgtgttcatttttaaagcttttctttttctctttattttttattaagggaatcctcacatacacaaagataaaagtagtgtaatgaacctccaaggacccatctctgagactcaacaattatcaacattgtgccagtcttgttgcagcaccctgggacgaatcttattcacagcaggctcttccttcttcctgcccaccccacgcttcccagtctagcaccttagaccaaaagagatcggaaaattgagttacctgtataatctgggcataatttttttatcgttgtccctttaacccagaactttatgcattctttactttagctttaggagagtggtgaatgagatttgtgaaggggacattttctagggaatcggtaaattcgggcctttggaaaaagtgtatcaacatcagtcacattgcctaatttcatgcttaccttgtgtgtaagttgcataatcgctggctttgtggacatgggaaggaaggagactggctgtgggtggggatggaagcctggggacctcactgtagacccttccttgtcccctcgtcaggtttgtatgttcagagggaaagcagtgcagaacatatttaaataaccctattttcctttatttttttctaggtgttgttagagatacaaaaggaattattagactacaaaggagttggcattagtgttcttggtaagatttacttttgaattctgtgaatgtccatgtttcaaaggaagcttttttttttttttttttttttagaggcagggtcctgctctgtcacccaggctggagtacagtggcgtgatcatagttcactgcagcctccaactcctgggctcaagtgaccctcctgcctcagcatcctgagtagctaggactataggtacacatcaccacacctggctaattttttttaaatgtttaaaacattttttaaagatcccatgagatgggatctcactttgttgcccaggctgatctgaaactcgtggcctgaagccatcctcccacattggcctcccaaagttttgggattacaggcttgagccactgagccctggcccaaagggaactaatttaaatgcatcaaatatagaattacagggcctatagggtcttcctataggcctttatagatacatttttaaactttaatagcttgggttgcatgtctgatagaaaccattttgaaaatagcataaatgctggtgagaggttctgacatctcagcttaccctgtcataattggtttttgctaatcataggatttaggatcagaagatactgtatatttgcataacagtgcctccaaacatttataatattgctttacattcaatttacagtttttattatacttaaatacaacctcattaaagtttaaaagtacataagccttttatgaagacctcgcacattgataatcttattaagtttcccctatattttttgggaagaggacctctgcattctaaaacttattttcttttatttttggcggttctgaagactgcatggtattaagagaccatagggttaactatattgcttatttctgttaaattttgctcctgttggtttgggacatatacttagatttctgtgaagtgagatcacagcatggaattttgtgctccagacctaaagggcaactgttgcacatggattcctgtttgtgagaaagagatggtaagaagaatcacagagagcatcacggagtgatgaattaataaataacttgctcagtgaatgtaccacttgaaaaatccttctgccatgactataaagctaaaatgtttgcaatttgaaaatcagtttgtatggtcccctaaactaagtgagccttggcccacaatttgaatgcagaataactgaaatttccctgtattgttgtttacttgcaaatttcgtaggtatttctgttcatttggttttgagctggaatatttgttattgttgtttatctttcctttcacagaaatgagtcacaggtcatcagattttgccaagattattaacaatacagagaatcttgtgcgggaattgctgtaagttttaaaaagaccaaatcatgttacttttgttagatacttcctaaatctggatgtcttccagtattttctacactctattgtttgttcagaatatttcataatttaaaataatccttgtaagattctctccaattcactattagtacctaacgctttttatttgttccccatcccgtgtttatatgtttttgtttttattttatgtgatatttccaaagatttgaaatcattgtatctaggaatgatttttcagcactgtggcagttaaactggtgtgaaagagatgtaaatgacacagaaatggtcatctttgtcagcataattgactataaactagttcaggtgttctcgaagtttgagtctcatacgatctgtcagagtcacctggttagggggaatattaaaaaattcaagtggggccgggcaaggtggctcatgcctgtaatcccagcactttgggaggccgaggcgggtggatcgtgagatcaggagatcaagaccatgctggctaccacggtgaaaccccatctactaaaaatacaaaaaaagaaaaaattagctgggcatggtggcgcatacctgtattcccagctattcgggaggctgaggcaggagaatcgcttgaaccagggaggcggagtttgcagtgagccgagaccgtgccactgcattccagcttaggtgacaaagcgagactccgtctcaaaaaaaaaaaaaaaaaaaaaaaaaaaatcaagtggtgggcaccacttagtcctgctgaatcagaatctctggagagactttatttttaacaggctctttgggtaattgtaagagttctgaactgtaggaactactgcttagacgaaatctcctgggttatctgtactgcctttcctatccagagaatcccttattcttaaatagattgctatttaaaggagagatttttatatattatataaacatgttcacataaacctacgaatatagcaagtttgaaagcataccattttttttcctgctcacagaaataatgcacatttatggtaggaaaaacactgtagctcacaactaaactgaaattaactttaaccccactaatcagggataatcactaatatgttaggacccattcttgcattattacattaacaaaattggaattatactgattatttcaagttttctttttcaaattgcttgataaaatgattcagatggggcaggcttggtgatatttctgtgaggagctgtagacgctaattgcaatgtgaatgttcagagctggtagccatctgcttggcttctctcgtccattggcctgctgagtatcatgtcacattcataggacaatcctgtccttcatggagtgggtatttggaacatcagcctgggagagatgacatttgaccacatggctatgaacttcctctgactggggtcccagttcaatttaagggcctatcttttcttctcctaacctggttcccaccttgtatacctgtacctagacctcggcctggtttctttccatctaattcttggccttgttaactgccctgcatctgaataatgtgaacctggaactctgtcttgggttatcagtcttcccagctgctaagaacctcatggccagagtctcctaagacctgctggttgcttgctatcctactaagcactgaatataggccatacatctttcaggacaagatatttacactcctaccaccccattccccaagaccctgccacattgccctgccctttattaatttacctctgtatctttgctggagctctgttccctggccatctggcttccgtacacctattcccaggctctgaccttactcagtggcttgggtccagtttccatggccttgtccttttggagctgggcttatttctactgcctgtagccattctcatcattatcttactttttcatcctggagtcaaagaattttgctttttattttgatgtataatagatacatgatttcatgggtaggcctaaaacattatcgaaaccccctgcccaacatccacctggttcatagcatgttgcataacacaggattattggttgcaagttataggacccccaactcactggcttaagtaaaaaagaaatgtattatctcacctaacagataaatgcaggagaatttaggtgcttctaaatgactgcaggaaggtgattttcccccatcttctggctctgctttcttatgtgttctcttcattgggtggccaccattggttgcaggattagctcctacaagtttcttctttccctcaatagaaacagctttccttacctagaagtttgagtaaaggtctcagtaccaaattccattggccagcctggggcaggtactcatccccttgagccagggttgaccacagttgaaccatgtcgactgagagtggcagaggggtaatttcctaaaggaacatcaggctgttgtcactaagaagaggaggaagagcttcaggtcaaacagtaaccctaggctttcaacacagtctccagtaaatagttgtccaaggattgcataaataaatgagtgaattagggaagacaaagtagtattgtaacattaccatatttcttgtagtaaatccacccaagttaaagcacttggtagagcatcacttgttctcaatctttgaccacatgagtttatgtattgactgttacctatgcttctgcccagagctgttccagacaactataaggtgatttttctgcaaggaggtgggtgcggccagttcagtgctgtccccttaaacctcattggcttgaaagcaggaaggtgtgctgactatgtggtgacaggagcttggtcagctaaggccgcagaagaagccaagaagtttgggactataaatatcgttcaccctaaacttgggagttatacaagtaagttctgggagctgagctgggtggtgacgtgctcaatggtgggttaccccgacccagggcaatctgtagttttcaattattttctccccttgacagtgttagttcattaccatttagattgggtggctgtactagctaagactagagcctatgcatactcttactttattttattttctattttttttctagacagagttttgctttgtcacccaggctggagtgcagtggtgcaatctcagctcactgcaacctccgcctcccaggttcaggcgattctcctgcctcagcctcccaagtagctgggattacaggtgctggccaccacgcctggctaatttttgtatttttagtagagacagagtttaaccatgttggccaggctgcttttgaactcctgacctcaggtgatccgcctgcctcggcctcccagagtgctgggattacaggcgtgagccactgtgcctggcctatgcatactcttcttgcagaagctagtcagtagttagtagtagtttttcagctaattagctgaaaaagtccaggggctggtttggctttagatatggcttgatcaggggccccaacaatgtctccaggacctggtggctccacaggcagaaaaagctgtccctttcttgaaaggtggctgcagctgctcctgaccttatattctcccaagtttcaatgcctttatggagcattcccagtaacggtctcatgtcctgtgccccattctgaatcagtccctgtggccatgcctgagttgcattctacctctgggctgtaggtttcattggctcccctggaactacgtgggctgagagtaggtgagggctggggttccaagaagaaactactagtccatcaatggatgtaggatagatggatactgggcgacaagtaaaaactcagatatctcccatgccttttgaaaaaatttactttattttattttgttgagacagagtctttctgtgttgcccgggttggagtacagtggctcttcacaggcaggatcatagcacactgtagcctccagctcctgggctcaagtgatcctcccaccttagcctcctaaatatctgggactatgggcacataccaccatgcccaccttcccatgccatttttgaagatgatttgttcccagtaaaagtcgaaaggttggatcgctcatcctctcaggatgttgataacgatggtaacaaaggatgaggctgggaggttgctttcactcgtgcaatgctttggagtcagttagtctttccctgctaggggaggcctgtcagtctcctggttgactcccatctatgtaaggaaagaggagagtgaaaagtgcaaagtctcaaacttgtcttctgtgatagaaattccagatccaagcacctggaacctcaacccagatgcctcctacgtgtattattgcgcaaatgagacggtgcatggtgtggagtttgactttatacccgatgtcaagggagcagtactggtttgtgacatgtcctcaaacttcctgtccaagccagtggatgtttccaaggtagagtataaaaggcagggtgaggggaacccactgactcggtgtctgcagggacattttaatatatacaagagcgggaagaaccatgggtgtttgaggcctgcagaacccctgagccagtgcagctgccagtgagcaggctgccaggtgcgaattcccagctgttgcagtgcctgagtcctgctgttcccagcctcgtggtgatgtttgcctcacagggtcccactcgagtccttggggaactacctgcttttgagagtggttcttagaaacgtgtttggtcaacagacggggagagacttgtcttcaagagcagatgcagattatcccgagcccaggggacctatgtgagggagcttccccttgcctggtacccacctccaaaagcatcaacaggataccgttttatgagtggcttgccaaggcagggcagtgggactggcgctgtaggtacatgccccagggtgcgatgcgggtagagaatctaagaacaacagttgaactgactgagtggtattctgcctttttaattgggataaaatataacaaattttaccatttaatataaaatataccattttaaccatttttaaatatactggtcagtggcattgagagcattcacattgttgtgcaggcatcaccaccatccatctccagaacttttacatcttctcagatgaaatctgtacattaaacactaactccctctctccccaccgtccagcccctggcagcctccattctagtttctgtctctgtgaatttgactactctaggtatctcctagaagtgaatcatgtactatttgtccttttgtgtctggcttattgcacttagcagaatgtcttcaaggttctattgcacttagcagaatgtcttcaaggttcgtccatgttgtactgtgtgtcagagcttcctttctttttaaaggctgaataataattgtttagatatactgtatttggtttatggtctgctttttattatcaccaggcactggcaattttaaataactataaattactttcccccacccccaacttcctgccaacgctcaattttcctaagggtttcatggagagaggcatgggagagggttctgtatcttgcacaacagaattacctaaagtacctttaagcctctgttttctataatttcttctccctcaggcagcttgtcccatcccttctctttgtcataacagtccctttctcagcaccttctgactgttcttttatacaaatgtaaatagattaaaaaatctgttttggccaggcgcagtggctcaggcctgtaatcccagcactttgggaggccgaggagggtggatcatgagatcaggagttcaagaccagcctggccaacatggtgaaaccccgtctttactaaaaatacaaaaattcactgggcatggtggcacacgctgtaatcccagctactcggcaggctgaggcaggaaaattgcttgaacccgggaggcagaggttgcagtgagccgagattgcgccactgcactccagcctgggtgccagagcaagactccgtctcaaaagaaaaaaaaaatgtttcttctcttggtaaccagggagagttagaggccccacgttaaagactcctttctactttgggggtagaaaggaggtgtgcagagcgaatgtgaatatgtgccaggactttgcagtgatgggcttgggttagccccatccaggtgaggaccaggctgacggatcatcctcaggctttggaactctgagtatgggtttgctgtccacatggagattgctttagagcatgaactgctccctacacaggatagagtcatttccttaaaaaaattgtgcttcgggaagagttgggaagtttgcatacatgtatgaaaaatggccaaatccttcttaagcagcatgtctttctctttttaagtttggtgtgatttttgctggtgcccagaagaatgttggctctgctggggtcaccgtggtgattgtccgtgatgacctgctggggtttgccctccgagagtgcccctcggtcctggaatacaaggtgcaggctggaaacagctccttgtacaacacgcctccatgtttcaggtaactctgggagtcagtcttgtggacccagggaggggtctcactatttttcatcaaagcggaggttacattttaaaataaaacatgtaagcctgggcgcggtggctcacacctgtaatcttagcaatttgggaggctgaggtggatggaccacttgaggtcaggagctagagactagcctgaccaacatggtgaaaccctgtctttaccaaaaatacaaaattatccaggcgtggtggcacatgcctataatcccagctactaaggaggctgaggcaggagaatctcttgaaccggggaggtggagattgcagtgagccgagatggcaccattgcactccagcctgggtgacagagggagactccatctcaaaataaataaataaataagcaaacaaacaaacaaataataagtaaaataaagtaaagcatgtttccaggagccggtgatcaaatgccccagatatcctatcagattctctgcccagctcacctctccctctgcaccatctctttaccatttgatcagcttttcctcttgttcttttctggggatgttgttttttgtttggtcttggtaatccaggatccggtggttcaccattaacccaaaagctctctatacatgaggtgctgtggcctgcatctcaaacagccagtgcagctttggagaagaactttcaaaagctgggcctcccctgccttcatttctttctctgtcgggcctgcgggaagctggctgcctgacagaacatactggcttaaatacctttctgggttttgttgttgttgttttttgagacggagtctcgctctgttgccagcctggagtgcagtggcatgatctcggctcactgcaacctccacctcccaggttcaagcgattctcctgcctcagcctcccgagtagctgggattacaggtgcgtgccactacgcccagctaatttttgtatttttagtagagatggagtttcaccatgttggtcaggctgctcttgaactcctgacctcaggttatccgccggctttggccttctaaagcgttgggattacaggcatgagccaccacaaccggccaacatctttctgtattttagcctaatctgaaggggtccttttagcctggctctcattcgctgactgggggctgcgttgcagcacttcaggaagagcagggttgccctgcctcaggatcctataactcccaaacttgggtattttgagaaaatcttcatggctcttaagatttacaattgcctaagagagtctagtatttactagctgtgtgaccttaggcaagtcacttaacatgtctgtgtggtaggttctagaagtaataatagtacccctttcactgggttgctgtgaagattaacatacatataaataaatctgtgtatatatataaaaattttaaattttgcactgagtacctggcacttggtgattgataaatattagctgctatgttgttattgttattgtgagttctcagagcctcagcaggagcagacacaagggaagagctggagtttgtagatttatctttctagggccactatgatgcagaatggtgatgctttatgtgtatgaccgtttaatcctcccaactaccctagtaggtagccagtgttatgatcatgattcccattttgcaagtgaggaagccgaggtcatattttaggaagtggcctggctggggtgtgaacccaggccatctgactctagatcctgggtatgtacattctgccattagtgctctctcttcaccagcaaaaggatgagtgtggatttgcgtgtgtttgcaggattctgccttaggagaatagttcactgttggagtccagctcttctctcaacaggattttcttgtcttggtggaagttctcttaaaggagcgtaggaaagagggggctcaggctggtgcagttagtggttccatctgggccaggattttgtcagagcttcccctcctccaggtgctgcttagggaaaatgtcttctacataatttactatggaaaggaaagaattttttttttttttgacagaatcttgctctgttgcccaggctggagtgcagtggcgtgatctcagctcgctgcaacctccgcctcccgggttcaagcaattctgtctcagcctcccgagtagctgggagtacagacgcctgccaccatgcctggctacttttcgtatttttagtagagacggggttccaccatgttggccaggctgctctcaaactcctgacctcaggtgatccacctgcctcggcctcccagagtgttgggattacaggcgtgagccaccgccggaatttttttcaatgttagaattctggtgaaaattctgctgggtttctgcttggtcacacgatgcagagcagcagctcctcacattgtgtctcccactttcctcaggggagtgttctgggatgcactctcctggtcacctctaaaccctactgtcttttaccttggttgaaatgtttctaaaatgcatggtagggatgggagtggggctgagtcttacctcccactcgcctgtcttacctctggggaagcaccagtggtcactggccaactgggacacaagaactgggcaggctgagcggtgagggtgcagctggggacctcaagtgctggcctccgggggaaggggccgagatgtcaggctgcacatggcaggtagaggtacaggaggctgtccttacctgtttggagatggggccagggcctgccttgcagctagaggaggctttcagaggagcccaagaccatcacccatttcagaagtgagaaggtgggagggggcagggaaagagtgctgttcctgaactgtcccacagcctgtaggccagcaagttgcgatcagggtacagcttggggcagggcagacagtcactctctggtaccttcttcaagggttaccttgaagagcatttttttaaaaaggaatgaacacggccgggtgcggtggctcacacctgtaatcccagcactttgggaggccgaggcgagtggatcacaaggtcaggaaatcgagaccagccagaccaacatggtgaaaccccgtctctactaaaaatacaagaattagccaggcatggtggcgggtgcctgtagtcccagctactcaggaggctgaggcaggagaatcccttgaacctgggaggcagaggttgcagtgagccgaaatcacgccagtgcactccagcctgggtgacagagtgagactgtctgaaaacaaaaacaaaaacaaaaacaaaaacaaaacaaaaaccatgcaaggttagaaaatcattgctcacccaatgagaacaagctgcaaatggagacatcaagatgtgtgcaaaatcccctccccagtccgtgatgtgaggctgatggggtacctggagcccttcagaactttgtatcacatagtagagttcttgaaaaggcctcacttttgaaaagacgcctttttttttttttccccacagagtctaatgaccataggccctgggaactttgatttaattgtgctggataaaactgccttcaaatcgttgctccgtagccctgagtgatgaactagagtggaataaagaacacactgctgttctctttaacccttcagtagaacacactaaccccaattagtgcatagagaaaaagatccctaaacttcccttctgactgcacaaaatattttttacttaccatgactaactgaatacacaagcatacgtttgttttagctgcagtatgaggtgaagtaactaataaaaatacaaaacaaatagaccattaatcttaggccacctgttaaaagaatgagaacaggccaggcgcagtggctcatgtctgtaatcccagcactttgggaggtcgaggcaggtggatcacctgaggtcgggagttcgagaccaccctgaccaacatggacaaaccccgtctctactaaaaatacaaaaattagccaggcatggtggcacatgcctgtaatccaagctactcgggaggctgaagcaggagaatcacttgaatccagggggcagaagttgcagtgagccaagattgtgccattgcactccagcctgggcaataagagcaaaactccatctcaaaaataataataataataaataaataaaagaatgggagcatgcaaattaagtttgtgggcctgtttggaaggcttcactggtcccagactaccttctcccagtgggatggggatgcctggaatcctggaattcacagaggggtgtgtagtggagccagttttgggagctttcctctgggaaaagtgctcaactcagtggctacattcaccgattcctgagaaaactgtgccataacatcaacttcagaacctcatctgcagagctggagtcttagaacagccagggagagttttccaggggactttctggtgtccttttctaagccctggtgcacagggactattttgtattgctttaaaaaatttataacagtgatatactcttaggctgggtgtggtggctcacgcctgtaatcccagcacttcaggaggccaaggcgggcagatcacctgaggtcaggagttcgagaccagcctggccaacatggtgaaaccctgtctctactaaaaatacaaaaattacccgggcgtagtggcgtgcacctgtaatcccagctactctggaagctgaggcgggagatcacttgaacctgggaggcggaagttgcagtgagctgagatcgtgccactgcactccagccggggtgacagcaaaactctgcctcaaaaaacaaacaaagaaacaaagaaacaaacagtaacatactcttagcaaagacttgcaggtgggcagagtcaccagggtagccactgttcactgcttgctttgtatcctaacagactcttaactgggcatatgcaaatatacagagtcatatatttaatcatgcaaatggaacttgaactttaccatacaaattgttctgtgaattctatttttccactccacaatataccatgggcattctgctatgtcagctcaaatgcctatttttattttttacttttaaattttatttttgttagagacagggtcttgctctgttgtgcaggctggagtgcagcagtgtgatgatagctctcagaaaccgcaaactcgtaggctcaagtgatcctcccacctcagcctcctaagtagctaggactacaggcaagtgccaccatgcctggctacattaaaaaaaaaatttatggcgacagggtctcaatatgttgtccaggctggtctcaaactcctggcctcaagctgtcctcccacactggccgtccaaagtgttgggattacaggcatgagccaccacacctggcccttttttgttttaaaatatatatggtgtcctgtagaatggacatacctcgatttatttaatcatttaataggcagagttaggaaccctatcctgtgtgtttgcaggtggcattttagaaatgaaggcataagtcttaaaaatgtcacactggtagtgggaagaattgagaccactctataagctgtgtaagcgttttagagcccttgtgttttcaagattttagacggtatgggagttgaaacatgagttaataaagaactggaagccacgagggtcctgtgttaagtagagccacaggggctagacatcagtgctctgcagagggctgggtgggaggggaggcaggacctcctatcctgtgttaagtagagtcacaggggctagacatcagtgctctgcagagggctgggtgggaggggaggcaggacctcttatcctgtgttaagtagagccacaggggctagacatcagtgctctgcagagggctgggtgggaggggaggcaggacctcctatcttgtgttaagtagagtcacaggggctagacatcagtgctctgcagagggctgggtgggaggggaggcaggacctcctatcccagggatgtcttcagtcttcaggacagcttgcttgcttctgagttgtctgcctcttgtttaggcttcatagagccaagttatgggtgctggctccaggcagcccctaaaagtgggtgagctttctgctggccttgcctcctcagatcccattaagaaagccagagatcatgggcggcgagtgtgagcacagcagtcagctaggggttcaggcgtcggtactgaggtctggctaggacggtggacctgacatgggccttgctgcactttggatttagacaaaccaaatccacagtgcagcaagggcccatgtcagctttgaaaccctgggctaacacagagcttcaggcaaaagggaagcttggtcacctggaagtattgttggtgacctgggctctgcttggattcaatcacatggcagggtgtgtttctgtggttctgtgtggaggtggggggtgaacaggctgcaggtgtgggagaggagcagttggaagtgaagtgggaattgcagagcatctgatgaacagagggctgggcagcctcgtgtctggaatgcacacccacgtgcatgtgtgctgtgtgctggacttggccactgtcactggtgtgtggtgatagctctgcagtcccactcgcaggggagctagtggctggagccctgcagcccctggcaaagcagagggcctgcatacttgtgggaagagcttgcattcttggagtcagacaggctagagttggagtcctggctttaagctgcttgccagatgacttgaggcaaagttaacctctctgagcctcagtttcctcatctggaaaatgggatgacggtggctctaacccgaggattattgtgatcaataaagataggctgaggccacagtagacttcaggaagtactcattcccttctcttactttctctcttctgtctcttttgtccctctgacttcttggacgttagccagagagctaccgctgaggctgtggatattctcaggggctgtttcctcttcctccctgccttccctttctgccagcagccactcttgctctttcttcccagtgctgtctggggaggtaggctggggaagcttcaggagaggttgttggatgtttgtggctgctggctgctccctgcctaaggcccctctgggcagcccggtgttggcttttgccaacatgagctggcatgagccactgcacccaggccttgggtcccacttgagacagtgaatgagccagttggtatagggggcttccctgtgacaagctgctggctgttagagcattttccagaccccataatgtcccctcctgttaataaaggaggaagcagctgggtatccccaccctagatcttagctgagcattgactcccagtaaatttttgcacaattcccataggggatctttgattcacacctctggagagggcatagttggcagctgacctccagactcccagctcaagggagatggtgtcttccctgggcgacctctcctcctgtgccctgagcttttactgagtacacgtggagcctttagcaccttcttaaggagaggggttttcagactggggaaaaccatgcaccgctcctcagtgtttcatattttcagcttaagtttgaagggactactgactgccatttgtgtggcccacctgccacgtgccaggccctgtgctaagcgttggtctggcaggaagaagttgaaatacttggttcagaaagggatggtcctgagctgcgggaagggcccaggtgcagctggacttcctggaaccagggacacaaatcctcctccatctgctctccacttctgatcctggcttctctcagcgggaatgttggcttcattttcagatgggccttcttcagatgtttcctagaaacatgatcccctagggctctcatctcctgtctcacagttgcactaatattctgccgctttttctgctctccccactctttctccccacacccaattcagaaaatctcagggaaggccctgattggcccagttaggtcctatgccgaactctgagaccagggagccaaggggccttgctggacctgcatactggctggagggtggagttgggaagagcagggtggataaaatgccaggtgtccaccacaggtaggtggatctcccggttccagatgggaaaaccgaggtgactaattctgggtagtctgttagtgagtggctgccctacaatgggagtcaggactgggagggggagcccgtccttttaacccctcggccacagtgctctctgctggctggaaggcactgtgctaaggatgtgggtagaaaagatgaacagcgtgggcttctagccttccaagaccacagaggccaaacaacaggcacacagaaacttaaaagagcaagtggaaaaaaactatgcaggtaatatgggcaaggcgctctgggagttcaggaagtgaagagctcgctctgggtaggggtgggattggggtctgctgatgccttctggtggagataaggaagtgtgttctggctctcaagaagagtttacattagggcttaagctggacaaggagggactgatatgatgtttagtgaaaaatctgattaaacctttttctgaatggccctcagggatctagaattgggttgaccctagtccttgcttgatgacatgctcttgttcacatgggccctgcttttgtcttgtgtattttctttctttattttttttggagacaggatctcgctctgtcacccaggctagagtgcattggtgtgatcatagctcactgcagcctcgaacccctgggctcaagcattcctccctgctctgcctcccaagtagctgggactataggcacatgctatcacacccaactaatttttcaatttttatggagacgggtcttgctatgttgcctaggctgctttccaactcctggcttcaagcgatccttcggcctcggccttccaaagtgttgggattacgggcgtgagccactgcatttgactatcttgtctatttcaaataatgtgtttaagtctgttttaatgcaccttcaacagcagtttgcttgaatatagttctacttttgcaaagatgagctaaacggattttttaaaaatcttcattttagcatctacgtcatgggcttggttctggagtggattaaaaacaatggaggtgccgcggccatggagaagcttagctccatcaaatctcaaacaatttatgagattattgataattctcaaggattctacgtgtaagtcaatggattttatctcctattttgcctcttgtgaatttaaaactgtgtatatactgtgtacctttgaaaagtggacatattcacctttctctgagacattaaaatactggtgagtgtgtgtggtcctgggccccatgagcaggggagtgggtggtgagttcttccctcctgtacctcaccctggggctctcaggctttgggacctgtgtcccagtgggtggtgatgtttctcacaccaaagacatcgccctggggaagaatctcagttcactccctggggtaggtcccgtctactccctcctttgtatatcttctgggaaaaaaacaaatgtactttctgaaatgtgtcaatttaaggactcctgttagcgatctttgggacaaatactcctgtcctcctcttctgcgttatttccctttttaagaaaattcactcctttccttattataagacagatgctgttatcccagagtctgtgaatggaattggctttggcatgggctgactccagtttaaatattcccatgaacaaatgattaatgagtatgtcttaaccactgcccctgcacctgggaattctgcagaaaatgtctgggtcttgtattagtttcctggggctggtgtaacaaagtactacagacttagtggctcaaaacatcagaaaactgattctcactcttctggggccagaagttcaaaatcaaaatgtcagcagggttttggtccctccagagagccatgccttgcctcctttagattctagtggctcagggtggtccttgatttgtggctgcatcactccagcctccacatctgtcttcacatggccttctttctgccgtgtcttcccttctgtctcttaaaaagagaggtctttggatttagggcctgtccagataatccaggatcatctcatctcgagatccttcacataatgacatctgcaaagtcctttttttccaaataggtcatattcacagattctgggggttaggacatgcgcataccttttcagggtcaccattcaatccacaacaataggcccttcaccaaaatgccagatgggaagcacctagtgcggtgccttggatgcagagaagtgtaacaggtggtatcttcatttgcttttccctttcccttaaggtggttacaggtatacaaagaccagacttcctgctgtgtacatgtatgtgcgcctacacatatacataaatgcttaaactcaccaaactgagaacccccttcttagtggccattgctctttggggttcagtctatagtaacaaaaatatctgcttgatggtaagttggaaatttgccctctctcagataattcagtggccacatgggaccgacaaaacgatgcctctgtcctaacttaggattgtactttttagccaagacttaactaacacatctccataaccacccatgggcgggcagtgctggtgtactttttggatggcatgctgctgtcacctttgttcttgcaatgcttgttgcctgtttctgtgagctcttgacatgcagtggccctcctccagctgcaagcccagggggagttaggcttggcgggatgccttggcctttgggctcctttcccaggcaccatctcagggaaggggtacacactctgcattactgcctgttctctggttctgtgcaacagagaagcaagtgcaggctgggggctcagtgctggggaagcttccacactagaccttgatgtgtgagtttggaggccaggataccctgcctgtgctcactgaagccatttaaagtgcacgatcagcagtaggtatccaaagatttcatagccaagggctaaagaatgtggcatgagcctggaaaagggggatactctttggttggagtgaagagagggcttttgcatgagcttattatgagccctggtcatgagtggaattaggcagagaagagggcagaagtacttttagaaaggttagaatcatccccgcaaaggcactgagggaagagtgtacagtgtgtttggggagcagaacatgggctgcttgaagggcatggtttatgctgggattgggaagaaggtccgtggaagtgtgtgagggcgtgtttagtccacctatttattcattcattcatctactcacccacccatccacccacctacccatctatccatccactcattcactcattcattcattcatccatctgtctacccattcatctatacattcatccactcatccactcatccatccaccattgacccacccatccatctattcatctaccacctgcctacctatccatccatctacccactcactcatccatctatccatccattacccacccatccttccacccacctattcacccatctacccattcacccatccacccatctatccacccgcccattcattcacccatccactcatccagacatccatctgtccacccattcatccatccatccattcatccatccactcacctacccatccactcatccatcaatcttccatccatccatctatccatccatccatccatccatctgcccacccatccatccattcacccacccatccacacacccacctatctatccatctacctacacacccacccatccatctatccatccatcacccacccatctattcattcacccttccacctatctacccatctatctatccatccatccatccatccactcattcatccacccgcccacccactcatctgtccattcacccttccacctatccgcccatctatctacccacttgtccatccatccatccatccactcatccattctcccacccacccatccacccacccacccatccatctatccatctgtccatccatccaaccgtccatccatccataaaatggctcctgaggacctgctctgtacactagccttgttctaggctcctggaagaccgagaagaataaatcatcttccctggctccctaaaaagtgctgagaacctgaatgtgagtaaaagcacttggtgggtatagtggacgggagaccaatttttctattagcttttagctctatacatttctcaggagatgtgtagacatgatgttagaggacagaaagaacggtgataccactgggaaaaaaattaagggcatcaggaacaaaataagaaagcatagaaggaattctgggactctcctgaatccccccccgccacgcctaggtcctttaactccaagcactaaacctgggcctctcccagaaggcagcctgccaaactaatgtggcaggcaggtcatctcctgggcaggtcatctcctggggaatctggtcatccttcacacccagagctcttcactcatttctgaactgccttgacccaggacttccagtccttttaagaataaacctctttctaggaactcccaccaccccctcagttgcctgcctggaaagcgtcatcccaggcacttggtgttctgtgggaccttgttactggagtagagaggaggctgtactctgtctctcctctgtttatagctggagactcccaggctgtgcctgaactcacttagattttcaggaaattcttcttttctttggaactatggaaatagttgagcaacatggccccatgggaggtggccacttttaaagaggaatacctagaattagaatttgcaatttaccaccacctttgctcctcatttttgtctctgagaagatgcaccccctccccacttccatgccccctgactcgtaaaccagctccttaacatagttccaggttgtttgctgggggtttcaccagccctgccagtgaccttggcagggaattctgggactagataagacaaccatcgaagcctccaagttgattccatagcccagtcacccacactgtgctgactgaccccatgttgagcccacgtgggccgtttagcaccttgggcttagaagccccattttgccacggtggtgcgtgtgacctcgtgcaaatgacctaactgctctaagccacagttttctcatctgtacaatggaggtaatgatacatacttcttaaaattgtcaagagaattaaaaggaaatgcttctgaatcaagaatatataatataaggattgagagcatttttacattaaggattgaggactcttgtgctggttaatttgtataaagtgctagaaacagtggttggcacacaggaagcattccttgcatgttagctcttaatatcattatttgtggttattgttatataaagcaattatgatattcctgacacacagtgcttatataagcttatgtaatataattaattatataagtatataatatatattaattttattatataaggatgtccaagtgacagattccatgtctggatctgaggtcacctttatcaccttatgtgggtaccaggccttaggaaagagaaggaggcacgtgatgggtctagcgaagaccctaaaataaaatgaagcaggcagagtcctaggcaccttacacatgtgaatgcattttgttgtcatcacaaccctgtgaagtagacattgagcctatgcagcagaagcacagataggacaaggatgcagctggaaagtgggaccagccaggctacgaacatgggggtggaaggctcattccagaacctctgctgctgtctatgtccaggagtgcagaaggccttaaacatacaactcaagctataaagtaaaagaatgacgtatttaattacatgaaaattttaaaattttatatggcttaagacatcataaacagaatcaaaaatgacagaatgagaaagattttgtagtatattaaacataaaggttactatccttaatttaggcaagaacccacagatgaatgaaaaaggataaggaaataaaagtgggggtgtggtggttgctaacagtatgaggaaacaactcagaagaaatgcaagctgcctcatagacaaatggaaagatgccaccttcattagttccttaggaaatgcagattaaacccatgagatatgttttgcctttcatctgcatacattaaaaggattgataacatctggtgccagcaagggcatgcacttttggtgagagtataaatctggacaaatttggagcaaagattgcagcgctcattataattcaaaacttacatgggctttgaccaaggattttgatgtctacagatttacccttccccagcactctgcctgggtacagtggtgtgcacaaaattagggaccagcaagtccaatgtaagatgtaatggtggaaatatgcagttgtgcccatcagtaggggtctgatgaaaacaatgaggatctgtgggtaatatggaatgactgcattgagaaggatgaagcgggtctcttagcagacatgggaagatgactgtgttatgtcatcagaccaaaaggagcaagagcaagtgtaggaaaagacaaatctattagtctttaaaaactacaacaaggccagggacagtggctgatgcttgtaatcctagcactttgggaggccaaggtgggagaattgtttgaccccaaggagtttgagaccagcctgggcaacatagtgagacctcgtctctacaaataataataataataaaaaattagccgggtgtggtggtacatgcctgtagtgccagctgcttgggaagctgaggcgggaggatcgcttgatcccaggaggtcaaggctgcagtaagctgagattggaccactgcactccagcctgggtgacagagtgagaccctgtctcaaacaaaaacaaaaacaaaactacaagagttatatatacatacatatttacacatagacacacatacatgtatacatgcatatgcacacagacgtacatgtgtatatctaaaatgatcttcaggaatgcacagcagaccattagggtagccacctcttgtgggaagaggggtggcagatcttcatatttttattctagattttcataatcatgtacaaatttaaaattaattttttgttgacaaaaccaggcagtaaggagaggcctacatagggttgcatttggtaggcttctcttcacatactcttctttctcattccctgtgtatctgacacatcctttcagaggggcctgactgtggagtgatgtttcttcactgcctgctcatctcctgtgactttcttgcgttcccttctgagccttaccaccttcgtgggatgggtgtccctggctgaaggtgtacctctgccatgttcccctcctccagtaccttggaaagtcccggtgtgtccctgagcagcgtgtctccgaggggactgtctggaactctcatccccacaataggaagggtttttcagtcatgggggaacactgcgttcctgtctgacctcctggggttcctcatttacgtggtcggtgagctgttgagaggcttcaggaagtcaggagtgaggaggtctgcctagctctgtgaatgcagctttcctaagtttctctggccatggaaccactttcccagaatgcctgttgacatcttcgtgctccaccaagatgttgggaagtgcggctctttccctggttcccacttggactttctccttaaatctttgcagccctgggatttccagctggttccatgcccatccatagcccacatagcctctcagtctgccttggccccttctcctacctcggccctcaacccattcaaacaacagacctggtcacctctgaaatttggtgttaactccagggattgattgctcactggggagcaggggctagatccagcccacagtggtgcttgacggggtcacccatgtttaaaaacacaacttgagccaatattgggctcttggaagatacttagagatctggtttcttattccataatccatgtgcctgtgaaaatgggaaaaagaaactttgacagggatagccatatgtttcaggaaaaaaaaaagggagagcctctttttcagactagtcctccacgtttaaaatgtgagagagcttgtttgcaccttccacaccggcccgtcctactcatttatgtgagtggtgcggggacatgctggcttagagtttgccgcccatgcttgaagctcctcggtgccggcaccttggtacaggccctagttcttttgacctagaaagctttttttttgtttgtttccagccatttcctttttttaatttacagtttgcgttcagtgcaaacccatagcatgagacattactatgaatcaaaatgtaaatacacaaacacaatatagaatccaaaacagaggtgcagctttcaggaatgaagcagaagacaggttcattcacatgcacagtagcttcagggctgtgtgatctggttgttcccatgtagcttcctaaagatggaaaaaaatgattttggtcatcaagactactgtggccatattagatactggaaccgtagaaagttcttcataagagctttccagcaggtctgtgcgttcccagtttcttcaccccccagtctctcctctgtgtgctgtaattatttttctaaaacacagaccgcattttgttgtggattactcctcattgctcaaggatccagtccagttcccagcagggcactccacagccccggccctgtaggtcttccagccaccccagccaggaagccagtgctccagttaagtcagcagacttgccggaagcctttgtgcctttgcagatgcagctgtctgccagatgccctttcttctcatctgttggaaccatgccttgtcccctcccctgaaacctgtcaaccttgccgctgctgaattccttatctggcttctctgcctttgcagcccttggctgttacagcacttcctacgtataattgtgattccctccggagccatctctctgtagattggaagcagttaatttcccttaatctttttttctccccccagccccatactagagacactctcccatgggtagtgcataaatatttgttgcatgacaatttagtctttaatttctcacttttatgacattattgctttgtgatatcttctactttcatgataggatgggtaaattgcagggagaggaactgtaaatacggatgcttaattcttcctgctttcaatttttttctgttaagttaaatgtgctttttgttgctccacctctctgattggagcctcacattgggagcctgaggcagtggaatatcaaaagagggtagccgttgaatgtttattttcaatgtcagccgtgaaacctaccacttcgaatagtggggcctggaattcaggctcaaagtcttttccccatatttgtttccccctttggcctctcttttgcttgaagctgtgtactagactctcattaactttaacaagaattacagatgtgccctcagggggcctctcacactgcctttatttgctgtaattttaatgaattccacccgtagaagtgtaagaataaaagaggatatacttgagcaaagggaaagagagggttattacacattgtacctttttttaaaaaaattgcagagtaatgtcagctattcttccatttgtctcctttggttgccagtgaaaaataattttggctgcttattttccaaagcagaaactgaagtcaaacacgaacctttcctagacaaaaattcactcataatcatttttgagagtcgatatgtaccttatgcaaagtgctgggaataaaaagatgaatttattcccataaatatgtacacctactatgtacccagaaaaatttaaaataaaaatttttaaaaagatagatgtattaacaggtacttatatagcatttaatatgttgcagacatagttttaaattgtgtcagttatttgtttctgcatcatagaacaccttaaaacttaagtgactgaaaacaaccaccattcacttgctcgtagttttttgggtcagcaggttgggctgagctcagctagggggttcttctgctggtcttgggatgcctcattctactgaagtcgtcatctggttattcatttggagccagatggtctacagtggtttcacatatctggcagttggtgctggctgttggctgggacacttatctccagcactctagctcaaacatgcttaagtgacagcaatatatatatatatatatatattttttttttttttttttgagacagagtcttgctctgttgcccaggctagagtgctgtggcacaatcttggctcactgcaatctccacctcccgagttcaagcaattctcctgcctcagcctcctgagtagctgggattacaggtgtgtgccagcacgcccagctaatttttgtatttttttttttcagtcgagatggggtttcaccatgttaatcaggctgatctcaaactcctgacctcgtgatccacctgcctcggcttcccaaagtgctgggattataggtgtgagccaccgcgcttggccatgacagcaatattttaagagagcgggaggagaggctgtaaggtcttttgagacctaggcttggaaggtgcaaagagtctgttgtaaactcttggccaaagccagtcaaaaggccagcccagattcaaaagatggaaaactagattccacctcttcttatttttaaatgggccacaaaaattctctataaagactgacttatttaatgcttacaacaacttgaggtggttgaggtaggttcctctattattcccactgttcagatgaggaaggtgaggcatagcagagaggttaagtaacttgctcagggtcacacagcttggggcaatacaccatggtaagtcctttggaagttgctgctcattatttttgccttacagccactataggaccaacttattatttctctgcagccttgcagagaaagaggtcactcacatttgccgtgcagctgccatgtgttggaagcttcatatatgtagtaccactaaaccgtcacaactagtctgaaatggagatattattattcccagtattcaggtgaggaaactgaggctgatggaaattaagtacaagtcatacaaggggatgataacccactgttccatatgcaagagtttgttttccctaagtaaacaataaatgtgctggggcagattttttgttttttgttttttaaaaaatcttctgcttgcatctaggaagtgttaagaaaaaaaaatctgttgatttgtttatgacaacccatacatttcagaaaagtagctggaataataaacatgtttttcagttgtccagtggagccccaaaatagaagcaagatgaatattccattccgcattggcaatgccaaaggagatgatgctttagaaaaaagatttcttgataaagctcttgaactcaatatgttgtccttgaaagggcataggtgagtacatctgcaatgcacgagcttggcaaagaattagcttagtttttcaaatgcagaataaaacaaatctataggagcctgcttagcttggagtagcagttatgtaatttgttgggccaacccagctgttataaggatgtgccttcttcctgttgtttatggaaccctttgcataattccccagctgagagtataatggagctccatcttccatgagggttttggcaaaattacctttgaaaatctcttacactgctcgtatagcacagaggttgccattccatctctgatgaggccagcaccactctgttctggaggtagagaatcattattattccaactgaacatcaaattagtagctagtcttgcatgctctatgaaaaataaatgtcctcacatgagaatagcagcagggaatgtcctcacatgagaatagcccagccccgatcttgctggcactgtcacgacaggctcatgaatgttgaacagaatcgctatcttcttccaacttaccttttcttccccacatcttgcttgctttctttgccaagagtgaatagttcgaatgactctaaatgtgagcatggtgaaccttcacagcttaagggagaattttctgatgactgagacgtgtgaagctctgtgccaggtgtcgggagtttttaggtaggagaccggaaatgatggtctcaggtgctgcaactctcaggagccagtggctagaaaaaggtgttttgatgcgaaattagacgtttttgttctcaatgcctggatctttggtcattctaggtctgtgggaggcatccgggcctctctgtataatgctgtcacaattgaagacgttcagaagctggccgccttcatgaaaaaatttttggagatgcatcagctatgaacacatcctaaccaggatatactctgttcttgaacaacatacaaagtttaaagtaacttggggatggctacaaaaagttaacacagtatttttctcaaatgaacatgtttattgcagattcttcttttttgaaagaacaacagcaaaacatccacaactctgtaaagctggtgggacctaatgtcaccttaattctgacttgaactggaagcattttaagaaatcttgttgcttttctaacaaattcccgcgtattttgcctttgctgctactttttctagttagatttcaaacttgcctgtggacttaataatgcaagttgcgattaattatttctggagtcatgggaacacacagcacagagggtaggggggccctctaggtgctgaatctacacatctgtggggtctcctgggttcagcggctgttgattcaaggtcaacattgaccattggaggagtggtttaagagtgccaggcgaagggcaaactgtagatcgatctttatgctgttattacaggagaagtgacatactttatatatgtttatattagcaaggtctgtttttaataccatatactttatatttctatacatttatatttctaataatacagttatcactgatatatgtagacacttttagaatttattaaatccttgaccttgtgcattatagcattccattagcaagagttgtaccccctccccagtcttcgccttcctctttttaagctgttttatgaaaaagacctagaagttcttgattcatttttaccattctttccataggtagaagagaaagttgattggttggttgtttttcaattatgccattaaactaaacatttctgttaaattaccctatcctttgttctctactgttttctttgtaatgtatgactacgagagtgatactttgctgaaaagtctttcccctattgtttatctattgtcagtattttatgttgaatatgtaaagaacattaaagtcctaaaacatctaa

SEQ ID NO: 665 - DNA, 23367 bp, Homo sapiens
tcctgaacctcctggggcagttcacacgttccctggccactccctcttttcctacatgctggccatggggaaatcaccactgggcactataagaagcccctgggctctctgcagagccagcggctccagctaagaggacaagatgaggcccggcctctcatttctcctagcccttctgttcttccttggccaagctgcaggggatttgggggatgtgggacctccaattcccagccccggcttcagctctttcccaggtgttgactccagctccagcttcagctccagctccaggtcgggctccagctccagccgcagcttaggcagcggaggttctgtgtcccaggtgaggaggccccagaatctgaatgagctgcattcattcccttccatttgcttttgggtacctgaatacaatttcatggatggctagacctgggcactctaaaagatttacgactcattttgttaactataggtgccccggaaatgaattaaagcctcagtaaaataattaaattgttagcaagagagacgatatcgcagttctccagctgggacttttgggaatatctatgctttagaggaattctcaaatctggctgcacattagaatgggtggccggggggactctaaaagtacagatgcctgggttctgtacttaaaaaaatcctacatagatgtatacaaatcaaatattttaaaaaacctctccccaggtgattctaatatatagtccaagatgggaactgttagggaaagactctgtgagttgcagctctgggaagtttgtccagttgttttgctgcctggcaggatcccggaatggtgaacagtagccctcgagggagtgagagccgcagtgccctagttgaagccctgaccatttctcttggcctggtttataaaggaggtgggtgtcagaaataaggggggagttactggtctttagcaaagtgttattaccagtggacattcgcctaggggagtgttcactctttgcagtcttctttacagggaatcttcaggaccatttccagctccaaacaacagtagcaacaaacaaacaaaaccaaaagtcatgcattacaacgaggctggtacagctaggctaagtgcattgaaggcatagtaagccagttccgtgggggatgagtcctctttggatctcctttaaagaaaggagaatgggctggagggcatgagaggttaggaggtaagaagcagttattcatttcactctgggcctttctgcgggaaccccactctgcaaacctcctaggctatttttgctaaggtataacttggggtgggggagtcttatctgggccaaagcttctctctctaagcctctaggatctttcctcacaggtcaggtagctgcttacattatcatgcttgaatggaagggcaaatgggagaagggggaggaaaagacttttatttgttttattttgaccatcagaaattacagataataaaaatgtgataattaacaaatgatttggatagggcctagatagaaacagcagcaataacatttactgtgtgtctaataaatgccaggactaggttaagtacataatatatatctttttgttgttgttgttgtttgtttgttttttgagacagagtctcattctgtcacccaggctggagtgcagtggcacgatctcggctcactgcaacctccgcctaccaggttcaagcgattgtcccacctcagcctcctgagtagctgggattacaggcacccgccaccacgcctggctaatttttgtatttttagtagagatggagtttcaccatgttggtcaggctggtctcgaactcctgacctcatgatctgcctgcctcagcctcccaaagtgctgggattacaggcatgagccaccgcacctggcctgtattatcttatttaaccctaagaggtaggtacaattaatggtcccattttagagatgtgaaaactaaggcttatcaaggtgaagtcattagttttaagtcactaagctagcaagttatatagctcaaaattagtctgtccattctcttcaccatgtctgtacatataggtttctatatttccaaggagtatagatgaaaattgcttattttttagttagaggagggaggcttgggaatcataagtaggcacaaggattctttgcagtcagaaatcagttacataagtttattctgtgatactcaatgatttctggggatgatcagaattgtctagcactcttttttggactgaggttaacaataataatttattatgaagctccatcaccagtcagaaaccagcatttgggtaagattatcaactataataatagaaaataaaatacagatcaagaaacagagaaatccagaatgcctattgtctggtaaaaagacagatatttaaaagtagatgagacatggtagttaaattggacttagaggttttaattttcctttttacttatctctccctggtgagtcagtatcacaactccaactttttttttatactggactaggagtcaatttcactatcaacctaattttctggggctggctgtcagcttgatgagctctttggaaggtggtagaaaacccttttataactgtcattgagtaagttccaaacatatcattttctgtactttgaaaatgttgagtaccattattttataccttgaatctttgctgacacttagccttggctactaattagagccagttgcaacattaaatcaccttaaatgtgagttgcaccttctgctgtaagcactcagagtactctctgcctcagacgtctccctcctgaggaggggcctctgcagggtcctcaattcacaagactaggaaaagcctcaatgctcactccacagagtaactggtatagttggaactgcaacgagtcacgtgttttcttgtcatcaggctacaaggctggtttgaaaaaacaagtagggctttcagagtgacagtgggcctgattcctgggcagaaattgagtcttaatcatctccctaaagccagaacctggcatagtgtagacatcagtaaatgttaattgaacacgtgcttagggaaaacctaccaatataaggtgtcttgtgaggtactcagggtcctatttgccctacagaaggggaatcgcatattcttccaaaggccaaggggacaagctcttgtctttgtctcccatcccccatgcttcattcatgtagagtttgggcattcaccgcagagagagactcatcaccattagcttcattgtctttgaatgcgaggagcagaaatatctctaatgggagacactgatcaaacttatggaccattttgatgtcagctgagcatgctgggctgatgataagcaggatggaagctgggggagtccacagctttgggacagagatgttcaatagaaaccgatggaatggctgacagcagggctcataattacttgtctgtctttcaagtgaacttcaggactaaaagttgttagctagtggttcctaattgactgtctagagattgcttgatgatatccactgttttctgagttggcagaatttttcagagaactctgagaatggcccaaccctgtttgtgcagctaattaaactccccttgttaaaatgcaatgcaagattttttttttgctagactgttattataataagctatttcttcaaaagtccttgatatgtcggtcttttctgtaaaagccttggcatgcttgagttggagtctttctatctttggagaaatgagtaaagctggtttcaagggaagctggcctctctgataggttcctggtgtatcttaccgagtctttattcatctctggcaaagacccttcccctattcaaaccctgctgtccacccctatgttcgacataaatctgcttgtttctcctccctactcctgaactgtttcccacgtagggatgtgattggaaaagaaaattgagaccaaggtaataaattttgactaaacacataaaaaatatgattggatacacacacatattttttttttctgctcatcttgaaacttaaattaaattaaaaacaacttagatgcaaaagccttgattggccccgaggccagtgataaaataagtcttcattatagaagcatctagacccagcttgatcaggcattatggaggttggtggccattaaatgcacaggacccattacaccacctgcagctggctgacctgaactttgagagacatggccagagtcacttctggctctgaagaccattgctgtctccttagaggtttcataaaaagtcccttcaggctgatgttccacaggtgagctttgggttggctttcagatgagatcattaaaaggcacagcaaattggctgccaagggttactctgtaaggcaatagtagtaataaaaaaatgttaattgtgctgggatcctcttggggaagttcaaaggggacaaaagaaaaacaggatctttcaaaagtgtcatttaaaaatatgcggtggcactgaagtgtgagtctgaatatcttaaatgaacataaaatattttaaaatgactttttctgcaaatggtaagctggaaaaaaacttttattaaaaaaaattgcacaaaaccttcaagctcatacgctattcactttctaacaaatggctggttcccattttgaaggatgttaatttgcaatttcccaggcgatgagaggatatgaatttgcatcatatattttcactgtagcccacatctttggtgattccctcattctgatgaaaaggaattggattgggttggggtgaaggtgaggaagagaaaatgagcagtagaaggaaagagaatgtgacattttcagatcacctactctgtgccagggacttggctcacattacttcgttaatactgaggacaaccctgtgaagtaggttatctctattttacagatgaaggaactaagaattaaggagatttcacatctagcaagtgctagaattgaaattcaaacttagcactctcatagcttctttatttccctttccttgcatagagataggaataatctcctttaagactccagaatggccgggcgcggtggctcacgcctgtaatcccagcactttgggaggccgaggtgggtggatcacgaggtcaggagatcgagaccaccctggctaacacggtgaaactccgtctctactgaaaatacaaaaaattagccaggcgtggtggcgggctgtagtcccagctacttgggaggctgaggcaggagcatagagtaaacccgggagccggagcttgcagtgagccgagatcgcgccactgcactccagcctgggcgacagagtgagactccgtctcaaaaaaaaaaaaaaaaaaaaaaaaagcctcgagaatggggaatcttcctttaggtaaagtctgctggcgtagtggttttcgtacaaccagtggcgatgtggctaaacgctgggtggtccccacctgtgaaaacaaagctgttttagcttgtttctatgattctattcatttatgtattggactccacttacttgcctgtaagtactctcgacaagccaatttctgtcactccagttgccaaaagctcagattccagcttgttattgatgttcaacttgttattatttgcagttgttttccaatttcaccggctccgtggatgaccgtgggacctgccagtgctctgtttccctgccagacaccacctttcccgtggacagagtggaacgcttggaattcacagctcatgttctttctcagaagtttgagaaagaactttccaaagtaagcattttcttttcaaacaatatcttgataaagagaaacaaaacaaaatgtgttttaatttaggattttataagcaatcattcttcactatcaaagacatcacgtttttattctatggtgattttagtatttattttataggacaccaatggagttcttattaaggcagggaaaatgagagcacaggaagaaagtggggttcaaattgttcacgccgtggataaactcactatagtattgtggtacttaggcagttggaaagaagccttgagctctccttgcaaaccccaacctgcaatttttattttgttttgacgctgcttcttccttttggtcttctaggtctttcctcaagctttgctttcttttctttcttctcctctatcccctttagttctattctatctcccttctctttttccttttcttctatttctattccattcctgcatcctttagtttcttatttctcttgcctcaatccttgcccttattcatcccttctaatctctcttttcctttcctggttaattcttttttgggggggacatttttgggtattttcttacttttagatgatctttttttccctccttcttttcccttcctccacttccactccttcaaatcctctccctctcatcctcctccctccctctctctttcctttaacccttttttatctttacaaattgctcacttccttctctctccccctcactctctttttttgtgacaataagttgtagtctcttttatttttttctattttctccaagtgaaatccaaggttgtagtctctttatttttaatcttatttttttttggtgtatagtaggtgtatgtattaatggggtacatgagataccctgagacaggcatgcaatgcgtaataatcacatcatggaaaatggagtgtccatcccctcaagcatttatcttttgtgttacaaaccatccaattagactcttttacttattttaaaatgtacaatgaaattattatggactatagtcaccctgttgtgctgttgaatactaggtcttatttattctttctaactacttttattttttaccctttaactatccccacttccatcctcaccctccatctctttcttgatggttatcttctattgtctcagcaggaacattacatttgatgtgtccaatattagacaaaaattgaaggcttccctgggaatttgaatcaagactaataggtttctcagccttggtaaaaacactgacttgaactctgattactgtttttttctttagccagaggaagttatcttaaagggtttgcctttctctgggctggctggagcaatgtgacttggtgttctagttttgactccttccaccttttcagcccaagttaaaaatcaattagaaaagttcctattttctgcacaggtgaagtccaagctagtctataatcacattatgcattatttaatacaactccattaatttacaaggagctctggctttactgcaagattcagaataagttttcctaagaaatttgagctttgccacctcaacatccaacatagttatcctttaaaacaaaaattatgatgaggctgagaccctactttcagcctgaattggtagataaatattctaagtttaaatgagtgtccaggaaaatgtgtttgactactctagaaacctagctgcttaagaaatataatgtccttgaattaatcagtggaaaaggcacagcattaaattataaattctaaccattaatattcatagccttattccagcataatcaagtacagataagaagttatgcataaaaacataacaagtagaggaaaatcctaggtaaagatcttttcagttagagtcatttgctttgaaatagtggaaactactgatttacatgttgtctttgctggcagcagtgtgaaaggcagtttgaaaccttatgtgctccagggagagtatgtggcttgccaggtttgtgaatatgggacatttaattccaatactgtacggggggctggtaacatctgctttgctaatgacagatagggaagaagtgcagaataggtgggaaagttttagttctgaatgtgtcggtggctgctctgatcccaaaaaaactgtgattgtggcctaagaaaaaagtttatctgctagctaggatttatataatcgatttagtgtgacaggtgataataacaacaataatagtagcagtttgtttgtgctttttcaaatgcttccagttctattctctcctctcaagtaaccctttaaggcagataggccaggtgttgtctctcccattttagagacagtaaaactgcagttcataaaggtaaggagacttgcccaaggtcattcctctcttggctggttaagccaggtcagaattcgagtcttcaaaatcatctcaactctctttcctcttggccatgctgttagcatcctccaaggtaggcccaggaagagatgcagtagtaatgccttcaaatccaaagttatccctttagctgagggctttcgaatttccaagtgagttattacagctgtccctaggttgccttgaaaattgtcatttatccgggggcctgggagaatgcccgtttaggacaggccagtagaaaaggtttttgactgccttacattgattcattgtctgtcagtacacagagaagacagggagctgcctctgcataagatgctgaaagcattttatacttttctgttgtttacggtatgtccttttgtgactatacttaggaaagggatggcacaaaaggcagctcaggattttctctttctctggaggcttatggtctttggcatgagttatttaatatgacacatttgctagtagatcctcatgcacgggaaggttgaggcagcctaggagacattaaggcaacccataaagaaataacattgattgagccgtatttgtatagtgaaatataataaattaaaaggtcagattggaaaatgctgaaattactgtttctctattaatttctataattcatagggcctccattaactaggcacttaacgtacattatctctagtctttatgataatcttgtaagctcagtatcattacccccagtttacaggaaactaagggttaaagaaattaagtgatttgcccactaagtactgaagttagatttgagtctagttgggtctagctccaaagtactttatatgtctttacaatcactccaggctcaatgaaccctgttacgtttactttgaaacatatattgaaaatagtagtatgttgcaaagtaaacgtacttatttcaaatagtctggccatagttataatcacaggttttgagagactggcagaaacatgaaccagattaattctttagcttgctagcactacacccttatttattacaagaccacattaattataaggaacaataacaggcaccctcaaatcaacgctcacacaaattttattcctcatcaatgatatagtatgtgcataacaagcaaaataaaatggaagctgtgaatgttaggctggtggcttaaaggctcaactaaaacatagatgagccatctagtgctcagacttgtcatgatgaggagcttcgagataaagatgttgacacaggacgtgtctcctcaaggctagacccatattcttgatagaatgtttagcagcgtccctggtctttagatgccaatagcactcgcccaccccccagttatgagaaccaggacaaaatcaccaccactaccgccctccctccatttagaaccacttttctagatcaaaatacagccataggtcagctaaagacagggacatgttctgataaatgcatcgttaggtgattttaacattggtgaacgtcattgtatacttacacaaacctagagggtgtagccaactacacactcaggctatatgatatagcctattgccaggctacaaacctgtacagcctgtgactgtactgaataatgtaggcaattataatacaatggtaagtttttgtgtgtgcatatatatctaaacatagaaaaggtacagtaaaaatatgatatttataatctcatgggaccactgtcatatatgcagtctgtcatagacaaaaatgttatgcagcaaatgactgtattttccagaagaagaaaaaaatgcagaaagtgccccaagtgccagatgtgggactggaggctcccaggcaggctgggctgcctctcccaagactgcacctcccaggaggagctgacatgtggtcagcattgtccacgcattcccaaagctacagattcatatatgtgaaaagttcatatgaatgatttacttaaattagtaaagttcacactctgaagtctttctggcccatccccaagctcttttgtgtcttctctaactccatggatgattgccattttcctgaacaccactgagcatcctttaagtgtcagctgaagaaccttgagttttttcctcaaatggatctttacagacccttcattttgtctgcaccagggcaggcacaccacacatttttataggtaacaaactccagaatatgccttgcttttttttgtgaaaatctaggagaaccacattttatttagcagagatgacagttgaatcactcatttttgtagaacaacagctgcgatgtgccaccaaaatgttccagagaagctgagggtgtttcatttgttccaagagctggcaaggccaaatgccaacaagcatatttatttctcaaacttccatttctgtaatggattggcactttatttatttttatcatagtcaaggttttatgcctgagttttgtagacactggaacctggcagccctatatctgcagtgcacttctcagggggacttgttaggttttatatatagtgagccctccatagccttggttccgcatctgcagatataaccaaactcagattgaaaaatttcacggaaaaaaactaataaaaataaccatgtaacaacaggaactatacaaataaaaaacaatacaacaatgatttatatagcatttacattgttttaggtattataagtaatctagacttgatttaaagtatttgggaggatgtgtgtagattgtaggcaaatactgtaccattttctgtcagagtcttaagcatccttgaattttgttattcttgggaggttctgaaaccaatccaccatggatactaagaggtggccgtatatatgttttaacctccctatccaccaaaatatcaccagctttgtcatcctccgagttatggtacatccaatggcagtgagcatcagttgcccgaggagatacactagcagtgccaaggactgttttttcgactttcattaaaatcctttttgcctgaagccctagcccttcaggtctgtggtctatgagtctactttaatttgcacaatggggttaagtggaagggctgaaatgacagaagttaggattgcttttggtataagaaggattaaaggccaacatctggctctaaattcatccaggcactgtggatcagctacttgatattagtgtagttttgggaaaagtatcacttcagttcaaatttttaaaaagcatataaagccagcaacttatttaatgagcaggtccttaaaaaagccatggcattttctttagagatcagacacagaaagaaccaccaactgtgtttattaaaatatccacttggatattccaattatacactaaactgccaagggaatttttggaagtattttaacttaatgatcagacattcaaatatatgcaacaaatctgtaatttaaaggtctgattgcaataatcagttcttggaataaatgtgggtgcacttaatgaaatgtgtactctacagggcacacacactcacatattgtgtagtaggttggatctctatgccactttgtaaaaggcagaggggatcaaaactaattgtatatggcgatcaaagaaggaattcggcatagcgcatttctcccttctccagaaaatacttagatgtagagccatgtttctaaatggaaggagggtggtgttggccgtggcaacgattttgtccccagggaacatttagcaatgcccagagacatttttggttatcataactggagagtggttggatgcaactggcatgaagaagccagggatgctgcttaatattgtgtaattcacagcacaacccccacaagaaatgacaatccagtcccaaatgctaacagtgctgaggttgagaaacaattagagtaagtgtgttgaagggaggagagatggcaagagactatgatacaaaccagtttagtttggggagttaatgtcttcaaacattaaaatggagattaagaaaaaagggctcaatatcacttgatcattagagaaatgcaaatcaaagccatagtaagataccatctcataccagtccagaatggctatcattaaaaagtaaaaaaataacagatgctggtgagatggcagaggaaagggaacatttatacactgttggtgggagtgtaaattagttcagccattgtggaaagcagtgtggtgactcgaagaactaaaaagaactattattcaacctagcaatccctttactgggtatatgcccaaaggaatataaattgttctaccataaagatacatgggcgtgtgtgtacattgcagtactattcacaatagcaaagacatgaaatcaacctaaatgctcatcaatggtacactggataaagaaaatatgggccatatacaccatggaatactttgcaaccataagaaagaatgagatcatgttctttgtaggaacatggatagagagctggaagccattctccgaagcaaattaacacaagaacagaaaaccaaataccacatgttctcacatataaatgagagctaaatgatgagaacacatggacacaaagaggagaacaacagaagcgtacttgagggtggagggtgaaaggagggagaggaacaacaacaaaaaaatctattgggtgctaggtttagtacctgcgagacaaaataacctttacaacaaacccccatgacatgagtttacctatataacaaacctgggtatatacccctgagcctaaaacctttttaaaaaatggagattaaaatatacctgcaaatgatgatgctgaagcaaaattatgtttagcctagcaaagtataaaatctacctcccttcaattggagtaataagttctttgtatatggatagattttaaaaatctagttaaatgtatttttgatctatttatttacaaaacacaatgattggcaagaatcaaatagttctcaactcaagggctcggtagtggaagaagatggtgtgatactactcagggaattggcttgaaccttttgattttctttcaggtgagggaatatgtccaattaattagtgtgtatgaaaagaaactgttaaacctaactgtccgaattgacatcatggagaaggataccatttcttacactgaactggacttcgagctgatcaaggtagaagtgaaggagatggaaaaactggtcatacagctgaaggagagttttggtggaagctcagaaattgttgaccagctggaggtggaggtaaggagtgaactcacttcttggtaaattaataataaactcccttcagtgactgtaagcaagtactagtaccaggaagtgaaactatctcttccaacttctaattctctactgtctcatggccacatggcatatcactatgttctgttttggataagggcatgtgtttgaatagtaagttaagcacattgggaatgtgctgacttaggagcagatgttgtctaatggtcagaatcctgccccagaataaaatgccctttcaacttctctgaaaaggagctggcataaagttgaacaacggttcatggccaagctatatgaggtgtcttctctgctctagatttatcctcatggaactagaaatccacaatatacctgattgtggtaaaattgctaggtttgtttctccttttgaataacctggaatccttctctgcaaactggaaaccccctttaagaaatttcttgtatatttctgtaaagccttttaagatctgtggataaagaccatcacattaacgttatggttgggtaatttatatcaacaaaaatttactagcacagtcatgacatgggctataattgagaattctagttacgtattttagaatttaagctttctctggccctcaccattcattagaatcttaattataatacaacatgagtaaacacaagtttataggggaaggttattagaaatgaactttaatggacatttgtggatgctgaggatgagcttgggctctattattaaagctattaaaatctttgccattttcttcttgtcacacacatctgcctgagatctgacaggcattcatgctaaaccataaaatgtattcttccaaatgaaaccattcagaagaatctctggtgtattctctggcaatgtttcactaaatgacaaattcagccctggaatgtttatgaaagaaattgcaccataatataaagtcactctgaatttttatttccttagataagaaatatgactctcttggtagagaagcttgagacactagacaaaaacaatgtccttgccattcgccgagaaatcgtggctctgaagaccaagctgaaagagtgtgaggcctctaaagatcaaaacacccctgtcgtccaccctcctcccactccaggtaagcatgccagtttttttaaccacttgtgccagaccccataaggagctgtgagtggggtggggaagggattggggattgcaatggtgaaagaagaaggtgggttgttttttttttttttttttcagttctcagttttctcttccatgttttaaaattcccttcctcccaagtattctacatgctatcatattctgggtttcaaagaggaagagcacaaacaatgagttgatttaaagcaaaatccacgagttacacgtattctctttgcattttctaacagggaacaaaaatctctatggtgatggaggccctatcaggggcctcaggggaaagcctctggaatctgtgtgtggcatccactttcctgtggagttaaggactgattggctcacttatctgatgagctgggtttatgcctttgatgctgccatcttctctctctccttctgtttctctttaattttttcttttttcttcctataaatgcatgctgagcacctgctatattgtgtgtcctgagattcagtgaggattaaaggaatgaccccacatatcatgtgcttgtgggtgtgtcttgccattcctcatggattgtgagttcttggagtaggggtggcatgttcgtctttaatgaattctcattggggttaagtacagcacagaggtgggtgttctgcaaatatacccatgaacagaggcagtggagtgtagggtacaagaacatagctttagaattccaaagacctgagcttctcagctaggtggctgcagcaaaaaggatccttaatatcctcatttgtaaaatgggagaataatagtgcctgccttgcagggtggctgtggggattaatgagtcagtgcttgggaagctcggaaccttatgatcggcactcacacgctggcaatggatattgttaataatgttgataattgaagcgaaagccttgcagcaaaacaaaagcagtgccagattactgtgccctgcaatgcattccttcaggtaaactaaagcctctcagccacagtgttcagccccatcctttagagatatcaatgacacagggaccttctctctgcaggtcctgagcatcttagcctgagtggggactgtatcttttcatcaaatcatgcaatccttttatttttatgaattccaatcctcacacctgctttcttttagactgtgtttctggattattgtcattgtaactgattttttaaggcttcaattattaaataggtatagccatagatataagcctcttggtcttcttcaggtggatttttttcctccctctgcaaataggagtgtgtcctactatgacaggtgtcatctaatggttagaatcctgccccagaatgaaatggcctttcaacttctccagaaaggaggtgacataaatttgaacaactgttcaaatttcgcatcctgcataggaggtttagggcagacaacatggtctgtcctctgtaataaactaaggctaaatttagtctgggattagtggtgcaaaaatgtagcaaatgagagctgtttctggtggaccacagaggactcactgaggcagaggctgaagcaatgacaactcctgataatccctgaacgagctccccaacaccccttgcaaatcctcctcatggaatagatttttctggcacaattttctatgcatcccttagaatgaggacattttagatgaaggaatattcagggccatctaacttagcctcgtcttgtctcagaggagaagacgtggatggtaagaacgctgcttttcctgaggccacacaagtagttaatgacagagcagaagctgcaaggcaagggtctttgctccctggtcagttcaggaccgaaggtgtcaggcagcagtaatccaaggacaacggtggggagaaaatgcattgcttagtatccagggaagaaaacaagtgagcctgttgggttgtttttgttggattttttttttcccagaactttcccctaggccctcacacttagacttctgtgatccatcctagcccagctgtgttgtttaagcaaattggacccagatttttactcactttcccacaaccttggctgtacctgaatccctgccaagccacttggctctcttccagctttgttcatattatatttatgatgtttatattaaactgacttttggtcatgtttttaaatcaatttctttcacttgctctctttctgtttggattggttgataatgcagaattggaaaatccccaagcaccacaaacttgtgagcctgtggagactttaattaaagttattctctattatgggactttaaaatctggcctgtctgcttttttcactgcagagttgcacagaataaaaaagactatatgcaagtctcagctctaaagtaactctgcgctctctgggccccctcccttatagctacagtttgctgacccagtggtcagcttgaacttagaacaagtgaatgtatcccaggttcaataaaatatgcttcctatttggtttttgctacaaacaacgtcctttttctgcctcatttcatagaactttctaatctaaaataattggccttctactcattaacttttttcccttaaaacttcagtctgtctctgttttgcctgtgaatctaaatgactgtatataggccaaatgtgatcgggtgctcaggggttgatctccagtttgcttggggatgcaaggttctgtgctggtccatagtgatgctcagtaagtagctgatgattaaatggggtctgaaagaaatggggtgacctgctaaaatctcaagcttagggaagagccacatgttgaacagcatatatccaacacttcagagtcaatttagtcttaatcattttatgactatgattgttttaattgcctaattcttataagtcaatcatattctcctcctggctcaaacaaagttcagttgcccagttgagagagtgcattaatagatccaagactaattttcctctgtaggcatataattattggcttcaaaaaaatgctactaaccatgatacttttaaaaagccaagtcagaatattttaaattctcatgattatggcttcctcaggtattttcagagtaccatggtgccatctaatgaattgcatgatgaagagagtgccaaccaaggctaaacttctatagagggttcctcaaattatgttccatggagtaaatgccaggctttttgaaaaaccagatatgtagcagggtagaaggctagtgttttataaataagggtaagctgagtttaggtgacttgattaatctttcattcctttattccacaaacataatttggtgccactgtgtggctggccctgttctgggtactggggttaccagcatgagtaaagaaacctccagaagccactatctaggaaatgagacatctaaacctccagttgtaacatgatgtgattatattgagatatttaccatttactgagtaacatttacatgtcttctctgtatttttcgtaactattttgcagagttggtattatttttcttctgacatgaggaaactgaggctcagaaggttaagtaacttgctcaaggatacacaactactgttggaatcaggctttgaattagaatctgtctagtagtattttccatactaggctgccttccatagctgctctaacagagaggtgcacctgtgatttctggagtgaaaagaaaattccaacaactcacctatctgcttaacaccaaattatttttgcttccttggtagtggagtaggtaaaagggtactgttgctcctgacagttctgtgctgtgtgttctcttccaccagaaaatgcaaaatgattcaatggtctttcagaattcttggatcatgattgggcaatgggctgttgcccaagtgtcagggtgaaattgggatggaaactgggtatgaagtatggaatgaagtatgtctaagaccttgacatgaaggaaggggctggcaaggagcatgagataagggagggtggtgagaagctcagtgaagatgggatggggggatggggactctgaggaacagtgggcactggactggctgtcagtttcagtatcgtgtccaagatggtttgctgccaggagtcgaggaagcccgccatagcatttttcctggtctgacattgttgtggccacatttgtagcattggcagcaatgttgagttctcatccccatttccacttcctttctaccacagccggggccctaaaaatagccctttatccttacccatagaggataaaaggaggataacaaatgaacaggaaagtgtttaggaatgtttgggaggtgagaaaaacaaagtttcatacattttaatatttacactgggcaatttgaattttctggtcaacttatgaaatgatgagccactattactattagtagtagtaacaatagtaatagtactaatactattatactaataataatgcaattagttttatgataatagcagtagtaatagtaattttttgagaagtttattttggttccttcatgtctaaaaatttccacatctggggacagaatagtttaacctcttggtagtgcttgaataagttatatgcatcatcaattttccttaaatattttgttgctgtcggtttgggatattttcttttcaggaaggcaagactcaatgaagcaaacaattattgtcttccaacctgaaagaaaaaaaagtgactttcctcagagtgaaatgtagttaaataaataagttctcaggaagatactttagctagaaaatccagtttgtagcatatggaaacttgaacagtttttgttatcattaaactgaacacaccgctaactttattttaataattcatgcattgtttcataaacaaaagcaaacaagcattcatctgagagatcacttttagtagaagaaataataatttataattttatttattatttcttcagtggagaatagtctcttggctgaaaacacgttgcttttttatttatgaaatggcacatgcattattaaaataaacctgtgactgtgttctgcttaatgatatgcaaaattatttgaggttggatacagagtggtttcatttctctacctgttgtatggttggctggctttctcaccaactgtggatttatgagagcatttaaggagcatatatttaattctgggaccaaaaagccccagccgattggaaaaataaaaacagaatttctagtaatggtttcacctttgagcagtccttgggtgaggaggatggggagggaaagcatttagcaaggaaaggaatgggtctttccatattggacacagcagagacccagagacaaaggctttgctcccccttccccgcctccatgctaatctcaggcaattctttggagctctgcttttggctccagctcacctcatgttcctcaatggctctctgagtccctgcaagtatttcaggccaaatccaacaattcaggttctgctcctttcctgtctcacctgctctgctctgagcagcaggacgagggaaaatgacctcaaatatacttgaagttgggttttctttgttatccaataaaccatctcatgagtttttttgagtgttaagatcccagaaaatgtgtgttcaactctttggatagttattataaaaatactggaggaactttattttatttttatagctcataaactcctgggatggcaggcatttcagcgggagtacaatgtgaagggttgatcgcccagactgagttatttacccaagtgttacagggaatgtagattcagtggaccagtgaatcttgtcccacttgattgtacacattgtgacaatgacagtgtctggatggaaagatgaaatacttgcatgtcattctatggcacaatagcatatgggttatgaacagcaggactcaccatgtaactctgcagcaggacggtcagcaagtgatttattgatgggctgtgcattgggtacggagcaggcaatgttgccccaaaataactttatggcttctcaagggtgaaatcccaccattataggaccatctttctggatctataaaatgctatatttaaaacatcctcttctgagaatagcttaaagcaggattggtacctggcgtggatgtgcaattgggggtcccaaggaaggggagagtgaggaagggcatgaagccttgcctgggaaaatcttctccctcatcactattctttctgggatagatttctataaatcttgtggatttatagaaatagggtaggattgtggaataatcttgcttccttgattttgctataagaaaaacaaaataagataatatttgcaaaatgctttctgatagaaggaaatatattaaattcaccaagtctccctttcctctctctgggcctccaaactttttaaatatagttcttgctggtttcattattcctattttccagattgaaagcccacccatggaaacagaatgtagttctctgtagagctgacattgggtttgcattgagactgaatgcactgaactaagaggaggtttggctcttctccatcagaaccactgttgttattgaaccttgacaggaaaaatatttatagattcctttggtgcttaggatattaaactatttgtatcctgtcattccttttctctaaaaatgcctttttattttcttgtttgtatagggagctgtggtcatggtggtgtggtgaacatcagcaaaccgtctgtggttcagctcaactggagagggttttcttatctatatggtgcttggggtagggattactctccccagcatccaaacaaaggactgtattgggtggcgccattgaatacagatgggagactgttggagtattatagactgtacaacacactggatgatttgctattgtatataaatgctcgagagttgcggatcacctatggccaaggtagtggtacagcagtttacaacaacaacatgtacgtcaacatgtacaacaccgggaatattgccagagttaacctgaccaccaacacgattgctgtgactcaaactctccctaatgctgcctataataaccgcttttcatatgctaatgttgcttggcaagatattgactttgctgtggatgagaatggattgtgggttatttattcaactgaagccagcactggtaacatggtgattagtaaactcaatgacaccacacttcaggtgctaaacacttggtataccaagcagtataaaccatctgcttctaacgccttcatggtatgtggggttctgtatgccacccgtactatgaacaccagaacagaagagattttttactattatgacacaaacacagggaaagagggcaaactagacattgtaatgcataagatgcaggaaaaagtgcagagcattaactataacccttttgaccagaaactttatgtctataacgatggttaccttctgaattatgatctttctgtcttgcagaagccccagtaagctgtttaggagttagggtgaaagagaaaatgtttgttgaaaaaatagtcttctccacttacttagatatctgcaggggtgtctaaaagtgtgttcattttgcagcaatgtttaggtgcatagttctaccacactagagatctaggacatttgtcttgatttggtgagttctcttgggaatcatctgcctcttcaggcgcattttgcaataaagtctgtctagggtgggattgtcagaggtctaggggcactgtgggcctagtgaagcctactgtgaggaggcttcactagaagccttaaattaggaattaaggaacttaaaactcagtatggcgtctagggattctttgtacaggaaatattgcccaatgactagtcctcatccatgtagcaccactaattcttccatgcctggaagaaacctggggacttagttaggtagattaatatctggagctcctcgagggaccaaatctccaacttttttttcccctcactagcacctggaatgatgctttgtatgtggcagataagtaaatttggcatgcttatatattctacatctgtaaagtgctgagttttatggagagaggcctttttatgcattaaattgtacatggcaaataaatcccagaaggatctgtagatgaggcacctgctttttcttttctctcattgtccaccttactaaaagtcagtagaatcttctacctcataacttccttccaaaggcagctcagaagattagaaccagacttactaaccaattccaccccccaccaacccccttctactgcctactttaaaaaaattaatagttttctatggaactgatctaagattagaaaaattaattttctttaatttcattatgaacttttatttacatgactctaagactataagaaaatctgatggcagtgacaaagtgctagcatttattgttatctaataaagaccttggagcatatgtgcaacttatgagtgtatcagttgttgcatgtaatttttgcctttgtttaagcctggaacttgtaagaaaatgaaaatttaatttttttttctaggacgagctatagaaaagctattgagagtatctagttaatcagtgcagtagttggaaaccttgctggtgtatgtgatgtgcttctgtgcttttgaatgactttatcatctagtctttgtctatttttcctttgatgttcaagtcctagtctataggattggcagtttaaatgctttactcccccttttaaaataaatgattaaaatgtgctttgaaaaaagtca

SEQ ID NO: 666 - DNA, 79114 bp, Homo sapiens
tttgatatgacgattagagcataacccgagtgacacgttgaattcgccataatcaaggaaaccttttccgggtggggatctctgaaattactcaggtatgatccatgtgttttgcttttttctatttcaactctgtgaaactgtgtattgtggtatcagtgggaatgcagtgaaaacagcttttaccctcttctgttatcgagcctaattcaaagaattatctagcttgtttttagactaatgaaacaaccagaaaacaaaagaatatattggaattattatataatctctaaatgagatagctgccaggatttaataaatttctgtagacttaccacggagggttcaagagtggagccaatgttgtgagaagtttatttagctctaaccagacagcagggagagttgtggttgagtgcctgtcccaatcctaggaccctgagaaacaaaaatataattaacaaaagaaatagtattaacatcaccagcagattttgagttctgtgtgtgggtcataattcctatcatactttagacttcatatattcaattatctccagagctactaccaccataaaaaagaaagtcttggtacaactcttgcgattccgcctgccattatcttgctaaccaaaggaatgtttaaactattcacttttgattctgaccaaaaaaatattatggaaaatgactggttttcagtgtgttaaatctgaaccttggaatggctaattattatattgtttccacaatttgggcaactgtgctgaggtggatatattttcacatattttttttgtgtactccaaaaacattataatggtattttagctaaagaaagaaatcaatctggacatttaccaaaaatatcccatttttaccagaaaccccctaaactctctgactttttgtcatgattacctatgtaaattccaagaagaaaggattccaaactaaacaattttatttactataggacttttcagatatgtattgtatatctccaagaagatgaagaacacagcattatttgcacattgtgcaggattagtgttttatagatcgtattttggcaaattcagctctagttatagtttaggagcatcaaaaaatgtgttggtctgctctgaaattttctttataacgtgtgctatggagcatgcaatgggagcacaggtctggaaatgacagtgatatcacttatttgtcaaagcagtaaggttttgccctgctaaatacagagaaagagacaaatgacttataaggttcatactttctggaataacattgactctgcccatttcagacaactcttaacattttactgttctattttactatttatcgatttcaagggaaaaaagaagacagctggcaaggaaaagaaatattgttgtgggcaaacattataaaatgacataatggatattaaaacactataaatactttgttcttattttctactgcactaatgccaaggtggttttatgtcatttcaaatatcaacatttcctacactatattcagtggatgttaataaatgtggctcaaaagaaaagcaactccattgtcaagtaagttgaggaaacagtgttagaaaagttatagcaggttttgttaccacatgagtgttttgagtaataatgataacaagcatctgtgaagcactatattatcgggtctacttctaagttctctccatgcattatctcatgttattcttggaacaactctatggtgtgatactattataacagtttataaatgggaaaatggaggcacagacaaattacctaacaggctcagctactcagttagcaagtggcagagccaggctcctttgtctggtagtctgatccagagcccaagcacgtaaccattatatcatacgctcgagcactggggactcatgacacatgcaaatattgtcatttatcacaactatctaagagagtaggcaacgttttgtttcctgggcttaatttacaacagaacatcttctttcaggaacatctatcaatatctctcaaaattggcatttctcagaatacagaacaagaaagaccaaatcgcttttatagcccatgtccagcattcagaacaatcagaatccattgaaataatcacagttgaaaaatctaaaggactttagagtctagtcttccaccaaataggactatgcctatctgagaaacttttaaaattaattacggaaagaacactaggctttgtgcctcgacacagctaagtggaaacgcctattgtaaaactccctaggtttgtgaccttgggcatattgtttgactccactgaatctcagattcctcaaatgtgaaatgggggtaagatctgacccatagtattttgtgaagtttaaattagatgataaagcaaaggagagaaatgtggtccccggtacttaagaattcagcaaaaaccccacttcccttttcattttcctatttgtaacaacctccagaaaaattttctaaaattgcccaagtatacctattaggccttgtttttcaaaacaatactaataaagttgaaatcacaaactgtacataaaaaattttgattaatcacaaatagtagcactattccatttattcagagaaagacagtctgtaaatttttttagtattaaagcacacacacagagtatatttttattttagagattattgctgaagaaaactcttagttataaaaccccaacaccttttcacccaaacccatgggacaccctgacacagtgcatgctcatttcatcatggaggcagttgatgttaaaaatctgtttcagtaactgtcttttaaaaattgtcatcccttagaaagctgagtagtactgtgggtactattgcacaatggttttcattaccttatgtgtctctaaaatgactcaataagttcaaacaagacagtattgatcgacagaggataaacaccattttatcttattcacagaaacagtaaccaggctcctgcaaagtgcagctctcacaatccaactgcccccaggaaaagcatctggaaaaggagcagcactcttgcggtgacattctgtattagaaatctgtatcccatctgctccttggcctgatcctgtaaaatctggagagttattaacaaatgtttgctgctgattcaaccaggaaagctagttcatcatttcatttcatcaaatctactccaactaggttatcagttttttgttgttgatgatggtttgtttgtatgagatggagtatcgttctgttgcctaggctggagtggtggtgcaatctcagctcatcacaacctccacctcctggattcaagtgattcttgtgcctcagcctcccgagtagctgggattacaggcacacgccaccatgccaggctaacttttgtatttttagtagagacggggtttcattatgttggctaggctggtctcgaactcctgaactcatgatctgcctgcctcagcctcccaaagtgctgggattacaggcatgagccaacatgcccggtctaggttatcagttttaatgaccacttagaatttttaatttaataaactaaaattttgtattgaatatttttgattgatgcaatccaaaaattaaaacatgcccttttgtaaaaaatcatcgtcctgtataagatatgctggtatcttgagagctctaatttgatttcttttaaacatatgtaagctaagatttttatcctatatagatttatatgtggagttttatgcatatatgtattaacaatcacatggagaacattttccaagtttgtttattcaataggaattggtccctggtaatattaagagagaaatactaataaggatgtaagataaatccttctgatttgcacagttaagtgcaatgctctgctccagatgtaatatgactaaagagaattaacacatgacaatttaggcagacagaatgtctaagtgagcagattggtttataattctataaaatcccacctgcagtagtgatgtagtgatgccttccctccctccagcaattaaaaactattcattgttttaggatgcccaattgatttaaaaatcactaggtttaagtagtagaactaactacaatatcttatttccataggatattctagtttataaagcttttcatatacaagaacttataaagatttttaatggcaaatttcttatagttgatgtcaattcagtatgcctagtttcttcaaggtaactgtgtcaatattcaccattccaattgtacaaatctgattaactgaaagatgctcccacctatcgtttataagcccaactctgtttatgtaacacaatgatgtccaacttcactggacattaactaatgtacctatcagttaagaggctagatgaggccgggcgcagtggctcacgcctgtaattcgaacactatgggaggccaaggcaggcagatcacctgaggtcaggagttcaagaccagtctggctaacatgacgaaaccccacctccagaaaaatacaaaaattagccaggcatggtggtgggtacctgtaatcccagctacccaggaggctgaggcgggaaaatcacttgaacccaggaggcgaaggttgcagtgagccgagatcgcaccattgcactccagcctaggcgacagagtgagactccacctcaaaaaaaaaaaaagagtctaaatgaaaacagtgaagagaggacataaaggtccatgtggaaggtgagagaagaaccacccccatatgggacctagaagaaaacagccctaaaaagatgtaattataactcagtccagatgctgtgactaacacagtgaaagatataaaggaacagaggtttataaaatctcctacctgcctggcaggggactggcaaaacattgtgcacaaatgaaattttttatttctattgattttagtattctatccagctcttctactgggattctgcttagtgcttatctttccatctggggccttcagcatgaactaaaatgtactttaaattattagatgtaattaaactctaatgcctctgattatttgaaatggaagtcagaaatcaaaatcaggttccatggggggaaaactgtgttggcacatatagatgttcatctcaggaatcctctttctaaccttcttttccgaagatccctaagagttcctcgccattcatgtacttactaccaactaattataattggcaccctacgatgatgataacaatgatgttaataaaatctcttacatcctcttacatcctgccacatgccaggcacataggttaactcatttaatcctccatcactctatggaatgggtactattgctacgccatttttccaataaagcagctacagcttagggacacagagaaatttgccccaggtcacaccactaataagtggtgcaggagtgagtccgggcagtctggcacaggccaccctgtgaacaaaggacaaatggaacactgggaagcatcaaggcttagaactgaagaaaacttttgagatcctttatttgacagagaaaagcaagttgggttccccagcttgggtttttgttagaatgagaacccaagagcagaacctgaaccctctgtggatacttttccattataccacttcccactgtaaagcatttctaattcagcctgattctctgtgaaaattctgagagacgaattaatagaatccctatagttaaacaggaatactcccttcactccaagtctcaccttccttgctgtgcccagactcatggactgacctagccagagactcagttaaaggagacccattttgtgacttggagagactgacaggcccacatcacagaggaaatacatgcagacacagacatggatatggtttagctttttgtccccacccaaatctcatcttgaattgtaatccttaggcctgaaggaaagaatctggtgagaagtgataggattatgggggtggtttcccccatgctgttttcatgataatgagtgaattctcatgagacctggtggttttataagtgtttgacttttccttctgtacacactacttctctcccctgctgtcacataagaaggcctaagcttgcttcccctttgccttccaccatgattgtgagtttcctgaggcctccccagccatgcagaactgtgagtcaattaaacctctttctttataaattacccagtctcaggtatttctttgtagcagtatgagaacagactaatacaggcaccatgaacatagtgacaggataaaccatggaggcattgataaaaataaaaagtaattgtgatgaatgacttggttgcaattacactcaaattctgttagtgtctgaagaggacatagcacctcctacctggaggacatacccttttccccatggaaaaaataattgggctgctaggtctgtgtctgctaagggagtcccatatttaaactgacctaattcagaactttaaattgagactcagatgctcccaaatagcagctccaccaacctgaatagagttactcatttagaataagagtttgttcccacaagttttgttaaaatacaaattagttgggatgcggggtgtgagtgatagggactaaaatcgcttaacagactagcctggcaaagccctgtgggaagcaagttttgatgatagggaagagaagatgtcaagagcagatggtccagggaggaagtgtcacaagtaacttgggggtgatataagggacttgagtagcaggtatttgtctgatctttaaggaattaacttattaaagaattttgttagtaaagtcatttgagtatcacacttgcaacatactaattcatccatgtctagttttctcattaaatcacagatatttaacaggtgcattaacttgaattgacatcatgcagcaaatgccattatatggacccttaagatattttaagagaaaaacctataatgcctggaaactcttagttttctctgacatttaaaaacaagccgtaaaatcaaatcctttctataataatttagtaactcagaattgcaaaggatttcctaaagcccaatgatccaaagctctgacctgtgatgttggcatagcagagtgggagacaaatcatatgttaaagcagaaggctctggatctggaatgcttggatacaaattctggctctaccacttgctacaatttaactctaggcaaattactgaactctgtgactatttcctcttctgtaaagtcagggttgtttcaataattagatcagaaattgtaaagtgcttagaataataccaagcaagtgtgcataaactttagccatttagctataactctcatcatatttctgtgttgattacaaaatgctttactagaggaaaatagatgagaaagaggccatgaggtaaaaatgtacagtgctttttaaagtagaatgaggtggcttagaaattaattctatccccatcactggcttgtagtagaaatttgaaacagtctctccctgattctctggcagtttttctctttttttcttttttttctttttgagatggagtctcactctgtcacccaggctggagtgtagtagcgtgatctcagctcactgcaacctccgcttcccgggttcaagcgattctcctgcctcagcctcctgagtagctgggactacaagcatgtgccaccacaactggctaattttttgtatttttggtagagacagggtttcaccttgttagccaggatggtctcgatctcctgacctcgtgatcctcctgcctcagcctcccaaagtggggggattacaggcgtgagccacggcgcccggccctctttcagttttttctaagacagagacactccctatcacagacagggtcttctaaattagtagagaatgatttgaaggaaactgggtaattatcagaggaagtaaaagagaaatacagatcctcacaccagaatgcaaatctctaagactttattattttcatcactatgaaagaaaagatcagtactcaaagccacttatgatgatgcatgtaaattagcataaaatcagaacaaatataatatggcttttaaaatagaaacataaggctatctttccttacaagtgtcagattgcttctgtgccactgtaacacagagctttagatggattttttaaagcttcactcagagatcaaatgtactccattagtcagtgattggcagacttggtgaaaattgagttttcaacttaaatttctccaaattggtctgaggaaaccagatgcagcaactaagttcagaaggtcagagtctcaataaggttaaaaagagagggagaaacataacactagaagtatgaatgaatgaaatagaccacacacagctcatcaggtctctataatataccacgcaaataattggtaccaggactattgaataatcaactgcttttaagctgaagaatatctacattgtataccatgattaccactttaccaattcaaaagacaacttaaaaattaaacatatatacaaagacattctgcttttttcattaggccatgtcattctataatttctaaattctgtcaactctcttccccaggaatcttctagaagtcaggcattttgggaatagttgagtatcataattgaataaagatagcacaacagtcacctgtagtagtctgatcttacaggtactagaacaataacagcacaaaaacagagttacgtgtatgtattattcagtgttctctagaagaaaacatagtatatgtatatataggcaatacatttataaatgcataaaacaaatataaatttgtgtaagtatgcatataaatatgtaagtctacacatataaatacaaataaagagatttattctatgggattggctcatgcaattatagaagcaggagtcccaagatttgcagtaagcaagctggagattcaggggagcccatgcatagttccagcccaagtccaaaggcttgagacccagaaaagcaatagtgtaagttccagtccagaagccatcaggttagagacgcaagaagagccaatatttcaagtccgaagatcaggaaaggccaatgtccctgctctgtcatgcaggcccagctccctcttactcagcttttatgttttattcaggttttcaattgattggatgaggcccactcacattgcatctgctgttaaaattttccaagatctttttggggttaaaaacctatcattcatctctcaatcttcagtgttgacaaggacagagcacttatgagtattcctgtttctgagtttctgataagcttgtccaagtggagcacaggctggacaatttataagacagtattgaagtcagagcaattacaaaaggaaaggggtaggtttcttgtgtgatgtgctgcaaacactgacctctcagaatttattcggccctgtgtgtatatacgtattcatgtctgcacatatgtgctagttcacttatacatctatacatacacacaatcacatatacccaagatctgatggaatagacatgaatttggcttagccagggaaattatagaaagaataatgggaatcctaggcatgtgggaaatgggaaacaaggacaaaggcgcctaggtaaaataaaaagcaactggtgtgcctaggagacctgatggacttgagcatggaatagctccagacttgtattgaaagaaaatcaggaaagtcaagttacgaccaggtcatggcaggcactgaatgtcaggttaaggggctgaactgtttctttctagttagtgatgggtccagtgaaggatttggggcaggagaatactagaaggaatattttagggagattgatcttccagtggtgtgcagaacagatatgccatgcctagagggtagtaagcagtgacatttctttcactctacactttagctgagctcagggtaagtccagtaatggaagatggggtgggaaatagagctaggagtgtagagagggcaacaggtaaggatacatatgtaccaaaagcagaaaacaagttaagatccaggcttcatgaggtgcctatattgaagattgctctggataaagagactgttaggacttcagagttagaattcatagcaattcacagaactgctcaggctcttcattattcacctgactcaactctcctacatctgctcctttctcctaagagatttccttgctctctgtcctttctctaccccacagcttttgcttcctttccgtacatagaaccacacaacaagtactagttttatgcatgcagtggtcatataaatatcttattggcgagtcctcatcaaaactgagttgaaacaaaccatttgagccagaatttagtaagagtcagattttttaaggtacttcaaggattttatttataaatacaactaggaaaacatttactcattagaaatgatgaaaccatagacaaaacaattattagagaaaattttgaattattcttttctcctgctgtctaatttctacctttctcatgtagtctttttctttttaattagattttttatgtgagtatatggtccatgtatttggctggtggaataaattcaattattctcaattgttttgtttgacctgtcacgtgtgtaaattagagcttcagtcagctgttctagatgcaactgcatattgttatcacctgagaagctttaaaatctgtcatttcctgggccccattccaaaccagctgaatcagaatccttccgggagggtaagatgatgcctaagcacaggtgattctaccatgagtccaggcagggagtctggtttttgtgcacagcttctgtatgtcatggctattggcacctggctctgctacggcggttcttaagtgatcttttaatgccgattgggagtatgttttaatagtggcacaatattttaagaataaggctttaaaggaagttattgcaagtaacagttaagggatttactcaaactggacacaacctctgttggagcagattacagtgaagttttgggggcatgggataaaaaagaggaaggagagatttaatggagcgaatattatttgctaaaatttaagaacgtttgcagttaaatctcgtactattgcaacaagatgtgcacaggtgcataggtgaatgcttcctcttctggtatttccttgtgtcatttatagttcaagttaaatcctagggatttaaagtgcttctcattgatatttaaagggcatttttaacaaatggagaaatgtctttcgaaacagataaaatgtacctttataaaatccactttatgagaatatgctaaaaaggaagatgtgtttctattggatcataaattatacaattttaaacagatttttatatgaaagtaaattgttccaactatttgaaattactttttcctcaaacaaaacaaaaaagatttctagatgccaggattgttttgcaaaaatgatgatctgatgatctgtgggccagatgaatatgcttaactttcctaagagttaaggtaacatttttcctttaatgagcctgtatctgatttctgatttgatgtagttttttaaaaattgagaaaatatgcctcctctaccccttgcatgttttaatgccctgatttaatgccggtgtgtgtacatatgtgcatatacacagatatatacatatatacacaaacacatattaaaattataataaaataatcatttgttcattttatacctgcttgttctttttctctgataaactctaagacagtggttcctatggtattttttctctgatatagtttttcttttctctatagatattttcattacagtgcaatttttccagtgtcttaggttttgctattttaatttactctacttaggacttagaatgattccatataggatggtatatagattttaaacttcaacaaacagtaatcaaacatcagctagccctacgcatccttgcaaaaataacaatttatttagaaagttgtatcagcattactcctctacaacatttaatatcttgccttaaaagttcaatatacatgtcagatggattcagaaacttctttagccatgggtgtcaccaaaagagcaggaaagggaacaaaaaattaaagaataaaacagaaaaagagaaaaaggaaaaatgaattatatggtcatttgaggatggagagtgagaagaccttactcattccctgtgtgtagctgtgtgtaacacaactacacatagttgtgttagctgtcttgagaagcacttggggctttgattacctccattgcaacctcatgagatatttggtctatagataatttcttcttctcttgctatctacaatccagaagaactaaagatcagtggaaagaagaatcaacactttaaagaatttaaatggctgggcgaggtggctcacacctataatcccagcattttgggaggccaaggtgagtgaatcactggaggtcaggagttcgagaccagcctggccaaaatggcaaaaccctgtctctactaaaaatacaaaaattagccaggcatagtggcacacatctgtaatcccagctacttgggaggctgaggcaggagaatttcttgaacccaggaggagaaagttgcagtgagctgagatcaccccaccacactccagcctgggtgatagagcgagattctgtctcaaaaaaaaaaaaaaaaaaaaaaaaaaaggaacttaaatataagaataaaagtaagcatgaaagctgagccagatcttgccaaatgatacatcatttggtaaaccatgaaggcgccacacttgccaaggagtaacatttcaatgagatatgactctgcatagcagacagctgggtccatttggaccatatccacaggggatcaatccttgatgtgtccgagtgaagcatcagacaatccacccacaccactcctcgaaggagctattacaatagctcactttcattccggcaaagaggctaagttaccatagtgcttcagatgctccagaccatgtgtccctatggaagagaatggggaccacagcatccccctcattggttcattatggtgtcctgtgttcttcacagcaacactttaaggcaggcagggtagatataatttccacaccccctgcctatttttttttaagatgaggaaactggaaagaagtaaaattagtaattaggaacacaatctcagcctccaggctacctaaattcaaatcatctgtctgccactcattaccagtgtaaccttgggcactttagcctctctctaccttgatttattacccatatcataggaataataatagctacatcactgagcttttatgaggattaaatgaattatgtttaaaattttcagaacatagcatatgtgttcagtaaatgttagctatgtttattatccttatttaaaatatttttacatattgccacataataggcaaaaaaatgttatcttggttttttgttttaatttgccttttcctgatcactaaagattaccatttttaaatcatgtttataagctattttgatttctttaaattgacagttcatttcctttgctcatttgtccactgatatgtgtctattatttaaaagtaatctgtatattacagataatatttctctatctattatataaataacaattattctcttcctgtctgtagactctttttaacttcatttattttgccattacagaagtttgtaatatttttgtagtcaaatctgctagtcttttcatttatggttcttaatatgcttggtttagaagaccttctgtaccatgagattataaaaacactctactatatttacttctggaagttacacaatgtttttaaaggttatttctttattccatttagaatgctggcatgttatgaggtgatatgcccactttattttttttctcaaattgtttatgatccccctatgaatttgaaatagcacctattggtgaattccagtataaacaaaactatgggtccagagtttttattttactccattaatctggttctctatttctatgcttgttttaatctaaactgttaattagggctgttccaaatcattatacactttcaatatatgttgtggcatttattgcacattgttcctgcccggtgaactatgaaatcaatttgtcaaatttcagaataatttcattggactttaaattagaattgcattaaagtaataatttgggaaaaactgatatttttacatcagcaaaacttccatttactaaggcctttagatctttcagtcaaattttatcatttttttatataggttttaaacttttctcgttaagtttattcaacttttatgtttttattctattgtttagaccttattatacttcacttgttatttctattaaatacagaacatttattttataattttccttgtagtaatctttcattagtttcaatcatattatatagttgatttacttgtttttaatgagaataaatgattgtggtgtttcattactaagtataatgtttgtttcatgtttctgagagatgctctttatcaatttaaggatgttttgttctattgttcacttatgaagattttttttaaaccaatactgggtattaactttcattaagtgccatttttagatttactgtgatgatcacgtgttttctttttaacagtgaaatgaattaaacttcgataatccctaatgtttaataaactttatatttttgtagtgatcccatcttgttcattgtatattattattttggatgctttttcatatgtagttcatatctatactcctatgatactggtctagtgttctactttgtagtatatttttctctatcagatatgatgagtttgtagataatttcagaagttttctattattttctactcttcaaaaggctttacatggcaaaggaataatttgcttttaaagagatttataaaacttgcctaataaaaccatctggatctggtgttatttgggaggaaaacattgaatgttttcaatatagattatgattactagtttattcaaatttttaacttatccttgagattaaaaattcacacttttctaaggttttgtccactacatgtatatttttcaaattattggtaaaagtattctcttttttaaaagtctatgaatctttggttatatccaatttttctcttgttttgaaaatttattttctcctttttaccttgtcaggattgccagctgaatgctaatttactactacactcagctgttacatacatttatcaagtctacaaatttgttttattaattctacttttatctttgattccttccaatttctttttgtccatttcattcttttcctagcttctttagttgaatgcttattttcagtgtttattgtcttgtaattaataataaacagactatcgtttacaaaaatctagtgtacatttcaaaatagctagagaaaatgattttaatgtttttagcataaagaagagacaaatgtttaaagtgatagatatcccaattatacttctttaagctttacaaattatataaatggattaaattatcacatgtaccctcaaaatatgttaaatctattatgtattaattaaaaaagaaaaacaagaatagaaacttgaccacatcttcatgaaaagtatgatattttcattaacatccatttattaacataattttaacttttatattttatattatgagcaagagctatatatcataggaagctaaaaatagtcaaataagcaagaatgaagaaaacaaaaataatttgttaatccactcacccagagataacaaattagccttgtgtaatcaaagcatatttgaatataaaaattaatacaaatgaaatcagaccatacattctgttttgtaacctgccttttctactttattatatttcacaagtatctgtctaaattattatatattcttctagaacattgatttgattagctgtactgtatcactgcttattcaaatatttctttatcattagatatttcagttgtgcctacctttcataacaatactaatatattctatgagaggtgacaaacatgaacagtcttaggaccttaacaacttttctactaggtagcaaaaacaaagataaatgaaataactggatccattagtaaggcaatataaaagagctcaagataatgcattcgaaattgaatttttctctgcattggagaaacaggaggagaataaccaatgagaaaatcacaggtcatggctaagatgagttaaacaaagcagcaaataaagaataagaatagaatatttctacagcaccttctatatgccaggtactatgttaggcgctctcacattcattaccttatttattccatgcttaaaagaaccttcaagttaggtatcagtattcttatccttttttagactagaaaactagacctcagaaaagttaaaatcatggtggcagaactaaattttttttaacttttttttttaagttcagggatacaagtgcagatttattacacaggtgaacttgtgtcatgggggtttgttgtgcagattatttcatcacccaggtgttaagcctagtacccactagttatttttcctgttcctctccttcctcccaccctgcatcctctgaaaggtgccagtgtgtgttgtccccctctatgtgtccatgtgttcccatcatttagctcccacttatatgtgagaacatatggtatttggttttctgttatcctcctctgcagcaggttccacaattttaaagatgcttacatttacatttcagttctgtccctgtgtaagtttgctacagttaattcaagaacagaactgaaatttcagtgtaagcttgttcttctttaaaaatgtggaaacctactacagaggaaaatttttgtcaatacttacaagtaaaattaacatgtccactatgaacaacttttacatttcttttctttctttaatttaagccttgtcttggcttaaattgacaagttccaaattaatatatgattttttgctaatgcctgaaaaacatagaggaggttctggttagttttttttctagtattgttttaaaaaactaagatgttgcacattgggactttttgtgatgtcttcatggctatattttgaaattttatgtatacatattctctattaattttgctatggctcatgatccatgaccaaagtgcatgctaccacaagaattaatttccaaaatagacttaagatcaattgtaaatatttttccaaggtggatattagagctttgtatcaagcaatgcaaagcaatatttacttagcatcatcaggcaaatatatagacttcagtcataaatccttcaccaaccatttcagtactatctagaatttctttcacgtaaaattcccaggagatactcaagggctgaaattcgtgctaaaaccacttgtacaacttgcatgttacataaaagttatgtccagcctacatcatgtaatgtcaaggcacaactaaacattgaggaaagactaggttcagtttggagaggtcccagaggcaagtgaagccatcatggatttgaaatgcacgtggagcacctcactgtacgggccccagtggcttctcattcaattatgaaagaacacttctctgcttaccaagtcagaaatagtctttgtccccattcagtttccttatccaatttcttccgaaaaatcaaatcaagatagtaaacatactattaacagaatgccttcatttcctaactctaaattgtctaccacgttgcagatattaaattaatatttgctgatccttttgttaaagtcgaggataattactttaatttttaaccaagaaatcttctaactttaattctgtctttatcttttgtctcctttctgttcctctctgcctgtcattcacaatgaccatttcttttgtttgtataaacttatagggtgcaagtgtaattttgttatatgcctagattgcagagtggtcaagacttttagggtatccatcatccaaataatgtacattgtaaccattaaggaatccctcatcatccaccaccttttcacttcattacccttccaaatctccattgtctatcatttcactctctacctccatgtgtacacattatgtagctcccatttatgaatgagaacagatttgtttttctgtgtctgacttgtttcacttaagaaaatagcctccagttccaaccaggttgctgcaaaatataaaataaaataaaagaatttcattctttttcatggctgaataaaattctactatacatatataatattatataaaattttctttatccaattgttgatggatacttaggttgattccatatctttgccattatgaatattgctgctataaacatatgagtgcaggtatgtttttgatatattgatttcttttcctttggatagatacccagtagtgcccaactacgatttctagttctgtttttgccaagctatgctttcatgactcgttaaatgtgtttttctagtatgtactcctcttacctttgtcttgtatcttccccaatttaccatttgaaagacattaagaaaaaaaaaaaaacaggccaggcatgttggatcacgcctgtaatcccagcagtctaggaggccgagatgggaagactgcttgagcccaggagttcgagaccaacctgggcaacatagctagccccatctctattttcttttaaaaacttatatacatatattactcattttccctctttgtctgtttccctagctgccaacttatggtctgctagggcagtaagaccttctaccattctcataacttcaggcaaatctagataacaaatctcacttaaaatcctcgcttagttttctttccatgacttggttcttcatgtgggatcagcttttaggtacaagataaatgtgtttcctctttctagctcagggttataatcaaagagcaggacatactatccagctaacaggtctagatttagaaaagtcagaatgtactacactgcctgtgtctctcttccaacttccttctcatctgtttccctgccaacttccctgaaactggacccactggcacctgaggccaacagggtcgggaactgcagctctaactttgcccaatagtgaactatggcaatttccattgagcagctgcagccaagtgacgaggtgagctattcattccaatccctctctgcctctcaagaaggcagaagtcttgaacccccaagaatttctagatctttgttttcttggtcaaataggcactgatgttgcaaatataaaaccagaaagagatagaaaagtgtatacaaatatcaactttatattttaatcactctgcactctgaatttttttacttttcttgtctctctcacaagtatgatgacatattcataaatgcagagaaacaacaaaaatcaatttcttatataaaacaaattcattccaggatggaaatttcaggaaggaactggaaaaagagaaataataagtattaggactttcaattcagattaaatttaattctgattgactgcaagtctctgtaatttataaaattgctgatccaaagttttgcatttcttctaaaagtatcaattaagcacttagcataatgtcaagctgagccttctgggcaaacaaagatgaggtacaagatagtccctgtgctcagaaagctcacagtttagtgaaaaagttagacatgtaagccaataaatacagtcatgtgcgaaacaatacaaggatgtacaggtttttttgagaggactgaggagctgacacttgaaggttacctacagaggttgtcaaagaaagaaagcatcacagagcaaagaagatgttaatcaagtctagaaggatcagtaaggccaatgtggcaaagttaggaggcatgggaaggaaaagagattccaagcagagaaactggaagtgtaagaaagcatgggaaggccaagtggcagggcatgtgaatgacactggaaggggagtctagggtctagtcctgaagggacaatgtgtcatgctaagaacctgggactttatccttcacacagttggttttgaaattctgcctcttggagttagagattgataattataataattaaaatgatataatagctaatatttattggatggttattaaattccagaaaccattttaagtattttaaaggcatattcattatttagctcccaatattaatattgaatcctcaaagaaccctatgatggaattatcatcatcctaattgtatttattttagtagtagtagtagtagtagtaatagcagcagcagcagcagtagtagtaggagtacctttgagacagggtctcattctgtcacccaggctggagtgcagtggcctaatcgcagctcactgtaagctcaacctcccaggctcaggtgatccacctcccaggtagcatgactacagatgcatgacactacacctggctaaatttttgtattttttgttgaaatgagcttttgccatgttacccaggctggtctggaactcctgggcctcccaaattgctggaattacagggatgagccactgcacccggccccatcgtaattttatatgtaaagaaacaggctcagatagcttcctctagggtgaaagtggaagaagaaaagaggagacctgccgggaggattggccaggcacggtggctcactcctgtaatcccagcactttcggaggccaaggctggcggatcacctgaggccaggaggtcgagaccagcctgaccaacatggagaaaccctatctctactaaaaatacaaaattagccaggcgtagtggtgcctgcctgtaatcccagcttctcgggaggctgaggcaggagaatcgcttgaacctgggatgcggaggttgcggtgagctgagatcatgccattgcactccagcctgggcaacaagagcaaaactccatctcaaaaaaaaagtaaagaaaagaggggaccatttttacatagcaggtttggtggtgaggatacatttaaaccaagtgttccattgctaataaaaacacagtgtctgagaggacaagaagactctgatcgccagttaatggaagctgtaagaactagaggaagccctggctttcaatactttgtgtcctttgctcatcccattgttagaagggatataaaggagaagggaagggaaaggggaggaaattatacaaggaggagttgacatttcatcaggccctttctggagtccttttgctgttcctctactctgcttctctcctccaatatgagatattagcaaacctagggcaatgcttcacaggtgttttctcatttcatcttcacaacaatatgttgcacagcctgctcatcaccccaattcacaaatgaggaaattgatgcttagagacagtatgtgaatatatgattctttcctgtaatactaaccgtagccttcccctccatccaatctccatcttttttgaccctttctgctctcacccatcctcaactagataacagtgctgtgccaaaaacctgtggattttctctacaaaaattatgtaagtatactatattttacttactgtgtattggcatatattagttgtacatattctgagggtatatgtgatattgtgatacctctatacaatgtgtaatgatcaaatcagagtaattggaatatcacatcaaacatttattttctctttatgtttggaacattataaatcttctagttattttaaaatatataattattgttaactataatttccctactatactatcaaatagtagaacttctgtctcactgtattttgtaccccttaaccaacttctattcatctccttctccccactacctttctcagcctctagtaaccacctttctacttttaacctccatgagatccactttttgtattctacttattgatcttatttattacctctctcatcccctgtaaaactccatgatattttgggggatgagaggtttggttttattttttctcatctacatccctatgtcttgaaaattcttagaagacagtagatactcaataaataatttctgaattaataggtgataaatactcatgaaagcttttctctatctttccaaagtcttaatgcctgctctatttgttttaaattctattgcttcaataagatactttaagaactattctttcataattctgatctgaagaacttacaaggtgctaaattagaagatgtattgcaaaggctttatttcaatttggccaagctttttaataaaagtttgacttgcttaaaagaaatatttatctgggattcgagttcactccttagactaggtcaacactttgagagggggttgtttttgcaaaataaaaattaaagattaagtgtttctcatgacaaattttgaattttatttccatgccctgattcccaatgacttgacactataattgagatattatacagattttctcaataacttcagagtgcatttatatgtgatcaaaagacctttctgatttcaagatacctttaataacctttactaattattaaccaaaactaaaggcagattttgcaaatataaacttgtcatttcagcatgactgttatctttttgatggaaaagatgaagttcagcgaagaacaaatctacaacttggccagaagactgtagactttgccttcaaagaggtgtaacacatacgtaaataatcccatcagaccccatccacagcctccctgctcttgcaatttaattaagcacagtgagagggtttgagagtatcctcacgaaaagacaattttggtagcatttgggaaaaaagcaagagttaatttttatctgaaagactagtttcctttgtaagtcttcaaaatgttttgccttttgcaaagtacagacactgaagctggcatgttaacttactaagttagcagattccccctaaaatgcaatgccctaaagctggacagagggtagaaatagcaaacagagagcattaactatatgcttcttcaaacaatcagtgaatgcaaactgaattgccctgagtcagcagcaggcaagaaccatcagaaaggtgaaggcaagaatatccatgtttatataaagaggatgacattgttctgtccctaaaaacagctaactcttgataatctcattttttcctttgatgttctaaattataatgaaaatatacttccttttttttttgaaacagagtctcactctgttgcccaggctgcagtgcaatggcatgatctcagcttactgcaaccttcacctcccaggttcaagcaattctcatgcttcagcttcccaagtagctgggattacaggcatgcaccaccactcctggctaatttttgcatttttaatagagacagggtttcaccatgttgggcaggctggtctcgaactcctgacctcaggtgatctgccttccttggcctcccaaagtgctgggattacaggccagagccactgcacctggccaaaatatcactttctaaatgatgcttatctattagcttggggacatttatttaattctactacttcagtagtagaatacccattgctattactaatagtagtactattagtattactatagtattactattattacgattagtattgctaatcataatatatatagtattagcatactatatgcactactatagtaatactatactagtatactaatagtagtattataaatactattaatattactattgctactatcatagtattattataattactagtaataattactattactattattatgattagtattactataatcataatagtagtaatagtaataattaccagtaattataacaatatattactattgctactactattactatattggtattactactattagtaatactagcactgtcattattaatagtgctacaattagtaatactagtgttattagtaatattggtactaatattggtgctattagtaatagtagtactattaatactaatattagtaggtagtcctaataatattgttattgttactaatagtatatcttattactattctgttattcaagtaatagtaattttagtaatagaatacctctactttagtaatagaatacctattactatattgttatcattactactattagtgatactagcactgtcattactactagtgctgcaattagtaatactagtgttagtaatattggtactaatattagtgctatcagtaatagtagtactattaatactaatattagtaggtagtcttagtaatattgctattgttagtaatattctattactattctgttattcaagtaatagtaattttagtaatagaataccttaaagctgcatttttcagaaacgatcacttcagcttcacttttttctttcacccaaattttcacccagtttcttatattattaatggtgtcttcattctgagtctttaaaggacaatgtgaagcagtacaggaattctcaacgcatatgacagaaaattttcaaaagtacctatattcaaatacattctagttgcatttgattcagatcattgtaaaacatattcctctgtcctggttggcagagcacattaagcagggtgaaaacccagcaaagaaccttccctgagccactaataactagaacccagtgtggcagccttcacctctgtgtatgtgggaacttccagggcctcacactcctacagcctagaaccttcaaaatggacattatcttgttctgggaacttgtggatgtgagcaaccatcatatttggaatgtgattcaaatcatgttcccaaaatagaaaatgtagacaatgaaatgctgaaattatacatttatatctgtacacacaaacgtgaacatatgtaaactttcatcattttttaaaatttacaaaagttttcatgtactctactgaacatgtctgtggtatgtgatctgggtgttagcaaacccttcccacgtcaagtcaaaagcatccattgttcttgttttgttaaaattaatgtcacatttttattacatagagtactttgcatgatgacttctgtgtatgtgatactggcatattttgctctaaaaatttatctttggagaataagtagataactatcttagctgacacacagactaaaactcaatctctgagaattctgatttcttatcttagtggttagaatgagcgacagtgtcctcttctcacgtctgtaaggaacattcttcatattcttttaatagatgtgagctgatctgtttttgagtatttggtgacatcctgagataagtggattcagaattactaatctgcattataattggagaatgggtattgttcatttttttttgtttctaaatttcaaccaatattgtgcatttttaaaagtttttttttaagagcacatttacacagccttgtttgtatgtaactcttagttgctctaactttaatgacgcatttacagagaatatttcctaaagatgtccttcatgaaaaggagaagtttggacttgacaacagtaatttacttaatttatcttaaatttggtttcagtgagcaaccctaattaacctgattttttgctgataatcactctcaatggaatcaaatcacaaatccggggatggattgagcggcactcagaaggaagcagccctccgcgcactggtccagcgcacaggatatagcttggtccaggtaggaacttgtgaaatctgctgagactcaccactgaatttgcacagtggtgggaatattggaggtcctaagatgcaaaatgggaatggtcagttacatagctctttagagaaatgtccctttctaaaagagaaggaaattgcaacatttctgttttgtagatgacactgaatgtaaccttctttctactctaggttatcaattcaaccttaacttgtcacagaatcagtgtccacagttatagagactatcccaaaaaggcagctagaatttgccacccaaggctatgaagtagaaccacattggtgtttcaggaatcagcagaaaataaactacagcaggaaccaggcttagtttccagagagatcactgcacacctaagacttctagatgtgggatccaaggaatgaactttttgtgtctagctgctgcagtttgttctctcagaacacttgctcatccagtctaggatatgtaatactaacttgtctccatgcttagcattttgtaaaaggaaaaaagaaaacaccacaatcttaaaactgtctatttatagacactgccttttagaaattatctgtatattattattatctttatgatatcttcttttagagaacttatgctgcatttaaaaaaatgtagtgttagatacatatattatcttatttaaagaaaaaaatgttgctgtttttacagtaggacaaagtattttaatttctcagctattttctttcactcacatactttcccaacttaaccaaatcttgaattcaaactactatgaattcaaatgtcatgtgtgattagcaataaaatatgcaagagtgtccttccattagatgctcctttgtcagttgcaaaatatacatttattttttaattaattttataaatcatggcatgctttgttagacatagtaatagttattttcttcatcctaatgaagagcgttagtcttttttaagatttcaaaaagtttctattatttcatagttgactttttgaagtttcacttaagtccatggagatactgacatattagtttttttaatacttaaaattcaaattattttagactcattaaacttttgaaaagagggttttctttctttttgcaatcaacacttccatagatgttatacaatcaagaatgtttttgaatctttttaaaattttgaacttcttgatattagaaacatttgtgcaaagacagtagaaatagaaagcatttcaaccctttcaaacagcaatctgttaatatttatatatgagtgttccttttctggaactgtatttctaatgacccataatataagatagaaatatgtataaatctgtcaagggtgacattagctgtaatgcatatcacaaacttaaatgtataaatacaagaaaattattaagtaaattatgaatgtataattattatacccaacaagcagaatttatgaaaaataatcctaaaacaatataaattatcaattacatttcattcaattctggatactggttcttccttttccccccacatgaaattcaggtaaagtctcataacttttctggtaacgttcaggtaataaaaatccttcatttaaaaaaattgatatttttttcatattgatgttattccaaactagattgtttggaataatagtaaagacataaaatcattcaaagttgcagttatttccctttctcaagtatgtcagggtggaggataatttcttttctgtttttctgcactatgttttcctctttcaacaccagtttggtaactacaatttctgactcctgattgaagcagaagggagaaataaaagcaaagaaaatggtaaaggaaagtttttactgagctaccttcattgggctctcaggcctgacaggtatcgaagcttgtgagattctttttacgatcttcagacacccagcctcctgctgggttctctttgatatttgaagcagccctcatggagaggatggaagataatcattaatttctacacgtggccaaactctgatccccggaaacacacattccctgacccaacaaaatctggaaattgaggtgacacaaagcaaccacttctccttgccaacaacaaagctgcaggccaacccattgttcacagtgagagatttcaggagtgagttagatccaccagcttagtgtgttccccaaacacaaaggcagggaatacacatcaagctgtctaagtggtttctcctgctttaggcaaaatgacaggcgcctcccaattcctcccacttagggggaactaagagtcacaacacaacagcagtcatctccaaatatctttgtgcaaattccaaaaacttctctcaaactctccaatctcttttctaagcttagggtgttgggtgacagttaacaatggaaaaatagtttcctgctaccttctcatcctgcttggtgctctagtcacttggtttcatacctaaatcagaggctagagttaatgataatttattacatatttcaaaacagctagaagagaagatttgaaatgttcccaacacaaataaatgtttgaggtgagggatatcctaattaccctgatttgatcattacatattgtacgcgtgtattaaaatatcatacatggactccttaaatgtgtacaattattatgcaccaattttaaaagtccaattccgtcttaaaatcctgtcacagatgaaatagtattcagtaactaacagtaatcatataaaaaaatctgaaggacaattgtaacacattattgttaaagctatgaagaaacctttcaaataatttttttgaaaagagacccaaataacaatggagataatcttactccatttaaaaattttgctccattgtaaggtcaaatgttatgatttaaggacatttatctgatagagaaaataatgatatgtataattgaaaatgttaacatataaaatactcctaaaatatatggccaatctttattttactttgatcttatctattaaatgatattcagaaaatgcttataataaggacctagaccacaagttaattgtaataataataataacaaaaaatattctatctgctttgtgtatattaactcatctagtccttactatacactgtgtgatagctactatgtttatccccaatttcctgatgaagaaaacaaggcacagacagtttagataacttgtgagattaagattctgttgttattggccaaaatttttggttagactcagaaaactgagagttgttataatgtgacttttaagattgcaattttagagatcagcatcctagagcatgtgacaaacatttttttggaacctaaactttgtaacatgattcactttaagtaatattgactagcagcgtgactgttgaatcagaagtgcttcaataatgtagaagcttaatgttccaaaagctagttatctatacctaaggcctctaatcaaaatgtaaatacctatataactcaatcattttgaatgaattaaagaatccctcctgattttggctacagagtgtggaaaattatccaagactttaaatcagaaggcctgtaatctaatctagtccctatgacatatgagttgtatgatctttaaaaagtcccttaacatctccaggccataatctcctggaagatcaggtacgcaatacccaactatttgtccatgatttttgtgattctagtatcttctgaatctagtcactggttagcacactggactatttggtcgaaagggtagcctaaatatgtagaaacacaacttcaaactctttgtaacttagggaaaatcctttagtcttactaatacttcagccttcctactctggattatacaaaagatcaatatgattatccaaaaagaaagaaagaaaggcaacattaagaacatcaagtttactttttaaaaaagtttttgtacaaaaattaagataaagaaacatcctaatacaatccaagcagcatacccataaaatgatagtttagaattttatagattagggtttgaaggatttacttttgctgtatctttgcagtctctgatattgaatgttgaatatttacagaacaagaattcaaaaaacagagggtgatgaatttgtgctctcttatcactagcaggacaaatacagctatcaaaaatagaattttgtgagttacttaataacgtgacccaggcttttatgtagcaactgatgcaataatgcctgcttctaagggtttggaaatatgctttgtgatctttttaaaataatcaaacatctttggatattgatgactgaagtttttatcaaagtactgtagagaaaaaagagatataatgtagtaccccacatatagtatgtatttaatacatactcttgttgaaaattgtataatattactaagttaaactttaagcttcataattgtattatgccttataaaaatattttgtaaggaagtgtgctgcagtattaacatgtgaacagtctttgtctctgtgtaatggaattatgtgtggggattcttttctctacttttttattcttaactgtacttcctgatttcgaaagctagcatatacttctttgatagctaaagacaaaaaaaattacattatgatgagtctttcctcaagaatgcattaatgatgtgggtcataaactatgatatgtgatgctcctctcacctgaaattttctccttagaactagaaaaatatattctcatatgtgagcatattcagaaaaatatacacttccacccaacgtggtgtctgttgacatcaagtttaattctattgcaactaaacctaaatatatatttaataaaaatcaccctcaggtagtcttaattttttaaaaatagactcattatatctaatatatataaaatttaaaatgtggtgtgtattagctttgtttatctagttatcctattggtagtctgttttctaaaaatcattacagcacaatcaatttttctgaggtgtgatagtccccttgctttcgtaaaccaatgatcatcctaaataaacatcaatattttttgttttgttttgttttgttcttctgttttgcttccttagtccctattattgagaaaaatgtattagtgctgggtctcgggattatagagtataaaaatgcagtgcctgacctaaagttcatataaagtgggtgaaatgaaaaagaatgtatctaaaatttacaacaacataaggcagcctcaaatgagcaatacagctgtgggtaccaaaaagatcagcattttctatatagagccttaaaattgacaatgctctttgacctgaggaatgaggacaaatatttagacataatgatgttattatagtgaaatgtataattttttagaaatttaaacttaaacatatcctaaatatccaatgtaatattaatggtcaggcaaattatgatcattcttatattttcaaattatacagtaatataaaattatgatttcaaagaattttcaaagacatggagaagtattcaattttaacatttagttaaaaatctgaaggctacatataaatttgtgaagaatattttaaaaaattattcacatacagtaaagaatattgtaaaataacaaagtataatctctaagtttttcttgcctgatgctcttcttcattttctaaattttctataataaatgcagatcgtttttatcacaaggaaaaaatctcataaggtagaaaagatttctaagggtcagtcaggagttaaaaaaaagaaaagaaaaaaatcatggaaaaaaactttattattaaatttgggtgataggtccctaggttcactagactattctttctaattctacatatacatgaaatttgtttaatattgatatagtccaatccttttgttctgcagttagaaaataagccccagaattacacaattattaatcaggggtcaacaaactatgccccatgaaccaaatgtggctacagcttgtttatgtagtaattgcaagatatgattttttttttacattttaagcattttttttaaaaaaaagcctaaaatatcaactatttggccttttacaaaaaaaaaaaaaaattgctgactccaactcgattccttagcctactgctctatattagaagcgaatctagtttttaaagaaaattctttaatttagtatttaatctcccttaaaagaagtaggtgcatcccttcttgtgctgcccattcacaccacctcaagcactgggccctcactcgttcatgtattaattcatttcttgattccaccacaaagagagacatgtttctacctttatgaagattagtctcatagaaaagatagaaaattaacagataaagaaacaagcaaagtaattacagatcatggtaagtgtcaagaatgtgataaaccaggctgtgtaaaagtcaaagccaggtgaccttctttaggaaaaattacattgaagctaagacttaccagatgagagcaaacaaactctgcaaggagccaagtatccctgggagatggagcacacaggcagtactccttaaacaaaatatttatacagtgcagaacacttttgggtagtgaagacattaatgtgtcttactttcaaagatctagtgagattacagcagataagtcggtggatttcatctttcccttcctctgttaatcagccatgaacctggtgtcctgggaacaatctcctcaaactaggaacaaaatacagtattcaattcccacccctcacactttcctttatatgcattctctcttgtatggaatttcaatgaaatcacatgttttgattctaatttgttcagttcttcagcaaatacaagccatcaggtacaaagaatggagctagatcaagtctaattagaataccgttcctcttctaagagtgccccaaattaagctaactctccatctttccggtttgagataatgtacttaggtaattttaattgaatgttcctcaaatggcattttttcctataaataatacaataaaaataacctgagggtctcaggtttactaattggcttcatctagactggctccgagaggagcagatggaaaaacactgtggcattgacattctttttcaaccactgcacaaaaaatcctagggacagaaataggaatttgacttcatggcaaaatatagctcctgggtcctactttttcctctattgcctgttttcaccacctgctcacatccctgctatccaaggacttaggtcattcaccaagtgcacggataccaattctttaaataggtagcaataagcattagaacaggatgggaccagtagattatcacaggctcatgcttccctaagcttatcaccccagccacccacaggccaactttattttaaagctcagaagcagtcttacttctactagccagagatgccatagcgtggtgtgaaagactccaaatgaaggagcagttctgtgaatccctttgtggagggggtgtgtgcccaacatttgtgggaacttcattatcccaaggaacacagatatgttccagaagctattatttccaaatagcaatgaatttctcctcgaatagcctcatagggtgttgactatatatgaagtgtttgatataagattcaaaatcttcataaacgacacaaggtagtgctttcccttaagctagaagcacagactttttctattttatcagcttaaaaattggtgtgacctcatgacccaaatatgcagaagcatgagcaggtcttgtggactttggactgcgcacgctgacaaattcacactttttcttaaagtgctattcatttgtgagtactgattggcaactaaaattaagtgactcttcatcttcagaacctgaaagcttagcattatgagatgcaaaagacagctttcaaacaagctaggcaaagaagaaattattgagatcacagttccttgcaatcatgaatttgtataggatttcagcagctgtgatcctttgtaacattgttaaagaagtgctgagcagggaaccaagatgatgttaaatggcacattgtccacatcattaaataacatccaatcccatatagagagaattattccactttcagttctctctcaggcttccaggtgaggaaagttagttgttggaggtatgatttaaacacctcttcaggccctgctaacctttttaagtcccgagagcagaactagagtgcagagcttttagtagacagtgtctatgtagaagttgaccatgatttcccttgtttgcaattgtttttataatcaccgaccatttatgggaaatgatactgatattccacttataagaacaatatattttctttttgatataagcttatttaagtaacaaagtgaatcaatgcataaagtcattaggtaattaacagaatagatgtcaattggacatggaattgaagatacactgatttttaaaattacaatatcctcttaaggctccaattgactaactcacaaaacatcctatgaacattttcctccattaaacatgatatcaaagtcagccttccttttacaagcaccctcacacccctacaggactactgcaatcacctagtcaaccctcctactccttcatagatgaaataattaaagtcagaatagatttagtgccttgccaagtccctcagcttgtcagaaattaaaattcacaagagtgttgtaaggagaagaatgattatacaaaattccttacatgcctcaaacccggtgcattggatgggattatgtttggcatatgttgaactaggaaaagatagaagagcaattacccaaaccaaatgttctttattatgtctttatctgcacatgggaagttttgcataacttaatcagatctagcggccataataatagttaattcaaaaaggcaaattgtaagtaaacaaaaaagttagatgggcctattgaataaattacacattctttaaggataaaagctccaaacggattaaggaatgactaaagctgtcacctaattacttcttgaaaggaatttagaggttcctatagatggaagcagtgtgtctgggcacatgcccagagccagaagcgagcatgagcacagcaattcctggcctcaaaaaaggaaataatgctttgcagtccatcattttgcaaactttgctggaaaaggtaagcagagggtcttagaagtgagttggcattttactcgttctcttttacagaaacacacacacacacacaaatgctttttgttttctaattttgaaaaacactcgaataagttttctgttttgtaattttgaaaaacactgacaaaatgttttctgttttctaattttgtctattttcaaattcaatattcttatgaatgaccaaaatcttacattataaaaagctttgcaaaacacatcatttaaaaaagcctatttgcttttgaatgcttcaaacgttgatactgaataatccttaaacataaagggaaattattaaaagatattattaaatgcatcaacttgaaaacataaattacttctgcttccataagatagttaacaacttcaagtgaaattgggattaatttccttggaaatagactttcaatggtcaatcttccaaagtgaaacaggaaggtgactcataatttactcatagttgtttccttagaagaaccatatcatacattttttaaagataaaatgtcagggctttgtaaaaagtgaaaccaataaatgaaagtcaagagccaagagccatttgcatctttcttcatgatttttgccatagatacatgccaccaatattatttatttagaattcattaaatctcctggctaacacagtgaaactccgtctctactaaaaagtacaaaaaattagccaggcatggttgcaggcgcctgtagtctcagctactggggaggcagaggcaggagaatagcgtgaagccaggaggcggagcttgcagtgagctgagattgcgccactgcactccagcctgggcgacagagcgagactccgtctcaaaaaaaaaaaaaaaaaaaaaaaaagaattcattaaatcaactcactatttttagtcgtttatgttaaaagcaaactttttctcacatatgtaagaaacccacaggttttgtgtgctaattatactttttctaatgtacattaaaataaatgcataattattaaaataagaaatactgacctataaaccatctaatatcatcctcacatattttgagaaacactaggctatatgatgataaagctaaattaatatttgataatgttcatatcgtagcttttcctgtctttgtttctaatctacatttccacaaaatttcaacaactcatttagtctttatacacaatttttattattcttcctactttaggaacattatatctggcattcaagttgcatacatcttgtaaaaattgtagaaaaatagccaatagaaataatgccaacttctacagtatattaagccaaataaattctgctttctaaattccagtctaaaaacagattttaccaacatgaagtcactgattttaacaagatgtgaaggtgaacaaactatacaaaatagataattattttatatacaatttagaaatgaatattccctgcagcactgtgtgttgttctcaggcaacaaaaactttagaagagaccaaaggtaaaatcacattgaagaggatcctgttggtaccttttatggccccatagactttccttaaactatctatcacataatgaaggatctagtatataggtggaatacaatagaaataatgtctaataaatacttttattcaatttcacaaatcaacaactaggaaaatacagtatagactcatgaaacacaagtgacacagtcaagagtgatgtcctccatgccttgttgtcaactttaagaaccatgcacaggagtctgatcacagaaccactgttctgggtatggtcctggtgactggcaagctggtaaaatcttgaaatgctactaagcaagggtagatttggctaggacccaagggaacaggagcaggaataaatactaacctggtcaattggaaaatgtacaggaaaacatctgaaacaagtttagttatgaaaaatacacagtttcttccctcttagagagaggggagaaaaagaaacaaagaatcaaagagaaccacaaagacgattacaaacttgaaatatgaactttccaaagagccattaaagaaactgaaattactactcaggaaaaaacaggctgaatgagggttcattaattaatgtccttccggttatgaatgggctcatttatgggaaacaataaccatctggtgtccatgattggtgaagttgagcaggaaaataaatgtaacacacaacatgaggatttatgaggctgataagcctgagaagaataatcatcacaatttttgagtactatatatgccataaagttcaccaaattgagaatgataggacctttattctagtcttttctacaataaattaaaccagtgtgatattagacaagttatgtatctctggacttagtttcctcatctataaagttagtatattgtgttaatgtaaaaatgaaggaaagataatggaactacaagcgtcttcatattttttctctgctgtttactgcttgtatgaatttggacatattttatgccttggattccttgcctataaaatggaagtaatagtagtagcatcctcatagatttgttgagaagattaaataaatgtaaagcactcagaaaaatacctaattcaattggagatagttgttgttttttgctgtcattactgtcatgtgcaagtaacagaagctaactctgactggctaagtataaaagagtttattaaaagggtactggttcacagaaactttagatgtggagaatccaattcaagggtaagcttttaagaacaaaacccaaaaccacatcacataattgtcatgataaggaaatgttatctgccatcacagaatgctcaacattaaagtttgcaccatttgtggcttttgcatcagaactcaattttagtaagggaaaccatgattgtccatggtttagtaaaggaaaccatgattttccaataaccatgatggccccagctgcaaggaaggctagaaaaatcaagtatctgtcatttttaagttctataggagaaggcaatttttgcccagattccccaggtatataacaagttcaaacgctcagtggccaaaattaactcagttcattcaatcttcatgctaagacttactgcttagaatgatttattgaggaaggttttgtggcttttatccaaggtcaagaagatggtagacaaaatctcttgaagactcaatggcttcatcatgaaggacttgaaatatctgtgataggaggaaatttccaagtactcttgacatataaactgagtaactgggtaggctcagcatccaatatgtaaattaaagccactggatttatagttagaattgtgtcctcaattgttaatttacataggtgaagactttccacctatttgtatatgactctagagagacaacggtttgtaagtctttggaaaaataaaagtttccagagtttaataaacattctctcatgaaaaacaaaaatctatattcttttagtctgaactattaatacatttgtgctgctggggagaatgcttcccttgaggaagacatcagctaggagagaaaagagcagttataactgggctttatctattttaaactcctcaactatgaaaatagtacctgacatattagcaacccagagcccaactgtcctttctgagtaatggacagctattctaaccccatgactaatgcccattgcctgtcttaaattgatctgaacttccattactggtacattccaagaccagcgggtggctcacagagcaaatctcccctactgagtgaactacagggcatccctgaactggccagactctttacagtctcaaaaaatattctttggattttttttcaagtgtttataaaaaacaaagaaagacaattaatatgctttcttgcccagttatttcagattgtaagcaggtaaatcttcctatatgcatcatatgcataaatagttggatggcatttttagcaattatagcaatcaagaaagttgaagatatatttaaacaggtcaatctgctggttgcctatttattttcaaactatcaaagctattcaaagcagaatttctggaattaccattttactattatgagattaaagtttggtttcctcaacttgaagggtaaaaataccacccaatgtatagtaaacttataatctgttgaatgttacagacatcaaagatacataaaaatgggctcagaagcatcattatcaccgaaatggaaagagtttgcccagggagaaggatggtaatttggcaattcaggttgagtatcttttatccaaaatgcttaggaccagaagtattttggatttcagacgtttttaattttagaatttttgcatatacattataaagatatcttggagttgggacccaaagtataaacacagaatacacttataattcatatataccttatacacatagcttgaaggtaattttatacaatgcttttaacgatttcgtatacccatcacatgaggtcaggtgtggaattttctacttgtggcatcatgttggcactgaaaagttttgaattttggattttggggttagaaatatgagatatgttcttccaaatattttatgtaataaaatgatcggaaattgaaaggattttaaattgcagtagagaatttgctatttaatggcatgatacattttttcataaataaggagttttttttttttttttgagacagagtcttgctctatcacccaggtgggagtgcagtgacaacatctcagttcactgcaacctctacttcctgggttcaagtgattctcatgcctcagactcccaagtagctggaattacaggcatgtgccaccatgtccagctaatttttgtatttttagtagagatggggtttcaccatgttggccaggctggtctcgaactcctagactcaagccatccacccacctcagcctcccaaagtgctgggattacaggcataagccaccatgccagaccaataaggaatattttaatgtatgtatctgttataagtggcttccacgtatcaaaggagcaaaatgcaaaaattaagctgatgaactttgatgcctgactgcctgggttcaaattctggcttctccacttcccaaccatgtgaccttggcaaattaatttatctgggctttgataccttatgtaaatgggataataactgtccttaacccatgacattaagtaatgacagagcagtatctgacatatagtaaatgctatataggtatttgtttgaaaagaagtaaataaataaaactcattaatgtctctgaaaatgtcaattgcacatttttaaggtaattcttggttgagatataaaccactaaattaccaaggttttggggtttttttctataagcataagtatttcaatttctcagatttctcagtgatatcaaagttttactaatggacaagaatattagggtaagaaaaaagtacaggaactctctaggcaaaaatttaaatattcaattagattttaaaaatactcagttgtttgaaacaaaaaaagtaatccaggcaaagtagaagactcatatgatatctttttaagttattatttttaaaaaacgtggtatgaattattagaaataatgtgtgatcatgacccacagacaccacagatatgaattaaatactgtgatccaaagagcctttgtgctaacacttacaaaatataattgagaaagactcaagttggtgtatatgaagatttaacagggacactacaagctgctttacttcaattttaaacaacagtcatacaaagcagtgtatttaaacaactaacatatgtcttttaaaaatatacatagaaaaatatttgaaaaggcctatgaaatttttgacagtaactacttctaaggatggtacagtgatacattggagaatttttctttttactttacatgtcactgtgttttttccacaacttgtatcattttatagcatgaaacttcttaaaatattagttgtagaagttagtagtgaactcttgggctcaagggatccttctgcctcagtcagagtaagttctattgttctatagcactgcaggatgactacgtttaacaataatatattattaatatgtagttgtaaatagctagaagaaggctattccttgtgttcccaacacaaagaaatgataaatgtttgagatgatggatatactaattaccctgatctatttactctttaatgtggtaagaagatagatctcttaagtgttcttactcaatgaaattaaaaaagaaaaaaaaaatatttgcctagcagtttacaagttttcacaatgtttatctcaagcaagctgctgaagcacagagtgtggtactataatccacataaaaagctttaatttttctcctttaaccagtccactattattacttgtcaatgataaatacattcattaatgtgaaattattttgaaaaatactcagggaaattgaattaaagtcttgatcattttctcctctccttcacacctgccctggatttgcaggaaaatggacaaagaaaatatggtggccctccacctggttgggatgctgcaccccctgaaaggggctgtgaaatttttattggaaaacttccccgagacctttttgaggatgagcttataccattatgtgaaaaagtgagtccaaatttaacatttaatttttcttatcgttcaagggaaaaatactgttctcttcactttgctttcattctcagccttcttggtcagtggctgtttccattccaattaccattcctcaattatagacaaagtttctagtgattatctctttataatcactgccttgacctagctcttgtcctgttactgacagcttgaattgctacaatttctaatgactgtcaaatctatatcttgttccccaatctttccactgtcatgccatctgactacaaactatccatcaacaataaccctacaataacctgtctaaaattagatattgctccaacttgaaattttaatacagttttataaagtacaacattttcattttaaaagaatgtgtatgtttgacaaggctcaacatgtatctataatccagaatgaaatctccaggtctgaattttttgtctacctaaatgcatcaagaagattaagaacatggcttttcagttaaaggaagaatacaaaattaaattttatttttaataatttaccaagtagtttttagcaacaagcacattcctgaaaaatttagtaaatataagaatttagctctctgcctgaatgccaaaatcaattttgtgtgtgtgtgttaacagcctcagattcagaactgcacctaattttacacatacaatccctcttggcatgaggacaaatgatgaggacttaattctgtaagaatcttatatactgaatctgaaaatgagcatcaagaaacacctgaaacatagagatgtaacatgttcaaactatttcctaatgagcccagaagaaataggtgttcattactgaatacgtgagggtgggctagggtaaggctgagctgagaagtgaccaaccacaaatggcatgtgcttaatggcacttctctccagacatgcgccatcatatttatttgggcaacccttcttaaagcagccagtgatagtaaattgctcagtctagattgctgcaggacagttgtggagtagaagggagtattacatgggcaagtagagtcactatagccaggggaatagagtgttctcctgctctggaggccctagccctgagttagtagtatttaggctagcatttacattcagccagcagacagagaaaatgacaagcctcccagatcatcccctgaaacatatctgtgttcattttgatgtcatggctgaggaaaaagactgctaagaagttagtttggcgaatgagcattcttggattttattttaaacatcaatgatagaataggaccaactggaaattaaactatggagatttcagaggacaatttagaggaaatggacatatacatcaaaaaattgcactttttttgagacagtgtcttgctctgttttccaggctggagtgcagtggcacaattatggctcattacagcctctattgcctgggctcaagcaattctcccacctccgccttccaagtagctgggactacaagcacgtgccaccacgctcagctaatttttgtattttttgtagactcagggtgtcaccatcttgcccaaactggtttcaaattcccagggttaagcaatccacctgccttggcctcccaaaatgctggaattacaggtgtaagaaactgtacttatgataaaatgtgttttcatgtctctaagatgttccagataattatgtgataaaaggtcatttgccctaccaaaaacacattctgttaactcaggctgaaatgtcacttgtacacattttatttaacttaacttctctcatgaatcagataactgatctgaacccacatgaaaatatgcaaaccattccacatgggatgcaaatgccaaatagtactggcaggaggcaaacttcagaaagcattgtgtgtgtgtgtgtttgtgtgtgtatcagcacatgcacacatacattcagaagtacaaacgtataaatataaatgttctatttctattacttgcagatcggtaaaatttatgaaatgagaatgatgatggattttaatggcaacaatagaggatatgcatttgtaacattttcaaataaagtggaagccaagaatgcaatcaagcaacttaataattatgaaattaggtaagctccgcctcttctagattaaaagtgaaacaaacaatgcacctgtgtctgtttttctatcaagtttatctaatatggtgtatgccaaaaaaaaagccaagccagaaatgaaatagattagtatttttccttggcaaaaataaatttgattaaatatttattaatatcaatactatatgaataccaaactaagttctatgagtgttcaaagaaacaaaacttaataatttgcctgtttcataaatatatattgggcactgttcaaaatattgggaatatatcaaggtataatttcctacttgcagagcaaatatataagatcactcaaaatagtatgaaaaaatcaaaccagggatgggataaagttgtgtgagaaggtggctactctaatttggtgtatttaagaaaatactctctggcagagtgaaacttaatctgagacttgaatgaaaagagccagtcatgacagtcagaccttgggaaggttatttcaggaaaggagagaacatcaagtataaagttcccgaagtgaaaacaagcgtgatatgtttgaggggcagaaagcaagcccatgtggccggagagggtaaagagaggaggactgaaagcaatacagttggagagctgtgcactgtgtgaggaagtgtagatgaagtacagaagtctctgtggtgatgaatttgaattttcttctaatagaagggaggaaagagttttgattacatttatagttttttaaacattcctctgctgtttggttgagaatgtactatagcaggtgaggtttgaaagaggacaccagttagaaggctgctgcagttgtctagatttggacaagagatggtggtagttggatgagggggtccatggtggacaagataagaaagggtgagatctgggatatacacaaatctggctagagattggatttagactgagagagaattcagaattcagggaggaaacctaggattttggtccgagtatctgtgaacttgttagtgccattgcaatggaaaagactggaagaacagcagaggaaggaccttttagggcactttacatttgagatgcacattgaacatcccaggggaggtgttgagaaggtgactgtctgcattgtggtggagtcaggagacaggtcacagttggaatataaatttgggggtcagctaaatatagatagcaattaagaccatgggactaggggagagtcccatgtaattgactttgtgcaaccaattgcccgttttgataaactggaaataaaactgacatcatgaaattgtctgatttctaaaaccttcacttggagagagaaccgtcataaattctttcttaaaggaagccctgagccacgtgagaggaagattagtgcagcagttaaagagcaatagttttggagtcagccatgcttcatttgagtgccaccaagtaacttcaccattctaagcctcaatttcctcatctataaaatggggataccatctatttcataggtttattgctataacaactttacagtgcttaacccagtgtttggaacacagtgataagccgacaaatgataaaaaaaaaaaaattgtattttagcacagttcatcaattctagatgcagtttttttttttacatcttatccccttctgaaagagaactgcaccttaaaatgggtagatcttaaatttgatgaatgcagaaagagcagatttaccacaattatttttctctcactttctataggaccaaaagaagtcatacattatccttacagtctgtaaatcaattaactactggcttattttattaaaaattcctgggccggacacagtgactcacgcctgtaatcctagcactttgggaggccaaggcgggcggatcacctgaggttgggagtttgagaccagcctgaccaacctggagaaacctcatctctactaaaaatacaaaattagcagggcgtggtggcgcatgcctgtagtcccagctactcgggaggcaggagaattgcttgaacctggcagggtggagattgcagtgagccgagatcacaccactgctctccagcctgggcaagaagagcgaaactctgtctcaaaaaacaaacaaacaaacaacgccttagccacaggaagatcagttggattcggcaactacttgtagtctaaccattcaattccaaggctggattctagaaaagagtcttggagaaaacataaaggaggcttccctcccacaggtgcctccatggacccaaaagagctttgtgtagtatgtggaggattgtttgcagtaggaatcaggagatctggggtccagcccaggttcctttggacgaatgctttaacctctttgagcatcacttttatcattggcacctaaacacagagatgttctgagcattcaccatatgaaagaatatatactaaagtgctttgaaagggctacaaaacgctacattacagttttatgatttccagaattggaagtttcccccattccttggtctttcatggaaccttgacatcgtaacagtaagggttattcccaaaacggtatttgagttgagatagatatggaattggctatgtagggaatcaagtggatttactgtatctacttaacacattgttacccaatagggcctgtaaatacttttggacagcagataggatatgaataatgaataaaatcaatccactacggccactgataattaacagtatcctctgtgaattttagtgtctttgtctgtgaaatagagataaaaatatacctacctcatgaggtgttttgaaaaataaatgagataatatacatacatctcagtgctgacacatactaggtgctctatgaatgtttgcagaaggttatggtggtgatgatggaggaggagaagggaaaagaaaaggaaaaatatgacagaaattaggaagagaaagttactggccaaaattccagtcaaagcacaggttggatgccagaagcaaggtaaaggcagagtgttaccttaaaaattagggggtagaataaacggaataagacaagccagaataaacaccccatagacaacctcacctacttgcactctgccttgggtcagtcctgccagggaaagaacttttgttgcagagaagaaaccttcaatttgcttttatccaccatttctcacccacctatcattatatcagcttctacttcatcagatattcactgatcgtcatctaaatgtctggcttctagagacattaaagttgtggcctcagcttttgaaaggagatggctctttgtctccaaataattccgggaaaggtgcctgacaaaccacaaccatttaaaaataaaatatggaattctaggctcctcctgctggtaactgatatatgaccagccccctaactatcaaaaataatataatttctaaatacattaatactgtggaaaacaaggttttggtgttttcttttttaagtaaagtttaaaaaaaaacttggaagattattttttcaacccttccctcaccttgagaaccacactcctggcacaattcttactagactgagatggacctgtcacagatctgacacacggtccttggttcttcagcaaagcgtaggagacagctaggacagtggcctaaccctggtcagaaaacctgccacacaaccaagagccattcgctccatggatatcagaccaatcgcccactcacctggctgagagcttttattcatggcaaatgggtcgtttctgctaagcatacttcacccatttttaataacttagtgttattacaaaagtcatatagcctaatatgtaacacatggaaaacatcaaaaagcataaagtaataaaagttaaaaccatttctccgcaactccattgccccaaaataaccactatgttgatattttattgtctttccagatttttctaaacatttttaatcaaaatggccttcacatatacttattttatagccttttaaagcctagcagccaattgtgaactgtttttttaaaccaatatatattcttctacgttactctttttaacgactgcagagcgtgcaatggtatgaatgcctgtcttttgtttaccagtgattctcaatcaggagcagtactgtccacccaagggggcatttagaaaggtggggaggcacttttgaatgatcagattggtcactattggcatgtagtacgcaagaactagagatggtaaacgtactacagtatgcaatgagaaaatgtccaatccaaagccagtaacatctcagttgagagacattaaaccagttctttaccgtgaggtattttgctcatttccaatttgggggagattttaaagagcagtaataaatatccttaaacataaattctagggctcacttttattttccagggacatattcccagaagatactttatttggtcaaaggttgtgcacacttaagacttttgatacattttgccaaatgttctccagaatagtttaatccatgtgtactctgccagtgaaggtgtacatacctcaacttgctaagaagcaactctgtacagtggaagaaacaggaactgagatcccacagctaggtttcattccttaaaatctataacattttaagcaagtctttttatttcttggagtttcaagttcatctgtaaatggaaataacttctactctgccgatctcacagtctttttgtgtggggcagataaggtcatatgtgaaaatgtgttcaagtataaaagactgtttttaacagagatcacatcagaacagcttttctctttggctacaaaagaaaaggaatgtcaggtgttgcaaactcaagcgactgcagggccaggcaggtggcttcagtaacctgggttaggtgtagggacctcagtgttggggatgcttcagggagcggtgaggattgacaactcttgaatccacatctagcctaaagaaagcagatgctatgcagccatgaaaaaggatgagttcatgtcctttgtagggacatggatgaaactggaaaccatcattctcagcaaactatcgcaaggacaaaaaaccaaacactgcatgttctcactcataggtgggaattgaacaatgagaacacttggacacaggaaggggaacattacacaccagggcctgttgtggggtggggggaggggggagggatagcattaggagatatacctaatgcaaatgacgagttaatgggtgcagcacaccaacatggcacatgtatacatatgtaacaaacctgcatgttgtgcacatgtaccctagaacttaaagtaaaataaaataaaaaaagaaagcagatgctactcagcttcagataacttttttgtttgaaaatgtagagcacatgttgacacatctaataatcttgcaaaagaagccacaactctccaaaaatggtttcaacactatgaacccaaacatcccacatcttcaggcaacatttggcccacagccatacattttcaacctgaatcctacaaggattctcatcaatcaaaatccctgctctttttgcagaaatgggcgcctcttaggggtttgtgccagtgtggacaactgccgattatttgttgggggcatcccaaaaaccaaaaagagagaagaaatcttatcggagatgaaaaaggttactgaaggtgttgtcgatgtcatcgtctacccaagcgctgcagataaaaccaaaaaccgaggctttgccttcgtggagtatgagagtcatcgagcagctgccatggcgaggaggaaactgctaccaggttagcaatcccctcctcaaagatgagacttctctgcctatcctgcctgcctccgcaaagaaaataagcatttttaattttttttggctatctttcattacgctgtattttaaattttttatccttcttcactgtctcacagttgattccattccctgaagttttcagactcagttttgaaaaatattcattctgtgcattgaggctaatttacatgcactaaagaaacccagaactttaagtacagcaatcctttgatgaataaagagtcttcttaaaattaagtatatcaatcacagttacttttgtgtatagattttgttaccaggcttattagaattagggtatattctccattacagtgtagaaataaaaacctcaagtgataccttattccaatgacaactaggtgacatactttcattatgactccctgttgtctaataatttctgtctaatttgagagaagagagataaaagctctccttagaaagccacctttatttgttagttattacaaccacaggatagatcccatttggtgaataactatcaaattctctatccaccccaacactgcctcggtcagatcaacttaggaaaattttttacagttcttggctcattctaaaacattttctacaacttacacaggtttttaaatgaatactaaaataagaggatttcaaaaatgacagactggacacactggaatgaacttttctcatgaaaattatgggagagccaccagaattcaaaacaaaacaaccacaacaaagatgtctacatttatgttgcctttgtaaacactcttcaaaacaaaccaatactagatcagccccctagatatcttcaaaactaggagacagtttctggcttggggaagatctttcaataatatcttcatgaaggcaacttaaagggaaaaaaaatgagacagtcccaaaggttgctgaatcttttagagaagtagatatttttaatgttgaatctttcattcacaacttcttccctcttcactggccagcatttggtcaagtcatctaaatcacaggtccatagatagactcactaagactcctcatgggggcataccttttggtgacctggacgtaatattttgctatctgcttcaattcttctttcttcttcaacatcgacaactgtaccattgaaaagtcttttgtatccatcctgttcttaggccaccactgaagtctaaacacacatattctaaaccttatgtaatttttttcaagatctaattattctcccagctctgctttctcttccatgtgccccaccctccgacttctccatcctgaacattaccaccagattaatgtttccaaaatatcctattatcctttcaacaccttcttgcaaatagtaggaattcaatctctatctataggctgaatgatgtctgtcactaactggccagttcaaaaatattcataactccttgctgtgtgtaagaactaaatatgtgatttcattattcaataccttttattcatttcctggtcttttatgaccatatttgctaccttctatttcccaataaaaactcttccttctatcaggacagacacctcaatgacctagacacttccatgcttatgtctgtctcgtttattcctaatgctatatcctctactaggaatacctgcccctccgtcacttgtgacattcaccccagcccagccagcaccttcttgagaaacctacctccagtattccagcccgaattagtcactttcctccctcaatgcaggaagccattcattatctgtaaaaacagatatgtgaaataatttggggtgtgggggagtaggacagtgaaagaaggtccaaaacaagtgaaagacagtttccagggtcaagacaatccagtaatcccagagaagctccacctcctgaaagcttccctatctcttcagggagaatggcacattggcccaccgaaggaactcctttttctaagtcaagcagactagctagccaggtcctatcagataagcttcagaaattttcaagcacttcattaagcttccacccacagtcctgacttttccttgtggattctctgtccaggatatgccatagggaggctgcctcccctccccgtccacaactcatattcactatgatccaatgcaacccccttacctatggccctttgagccagtctcaggtggatttcactcagctggattttagtcagcaactaactcatcagcaaactaacaagatgaggcacagtggtgagtaagccagccagagcaaacttcttcacctctaatgagatctcagaacaaaacctatcacccatttggatcactctacctgttaccccattgcagactcacccacaacaaaggaattctttaattgccaaccctttgagaacctagtttaaaagaacaaggagactgttgagaaaaatgataagtgaagacaacaagaaacttttctttcttaattgacccagacttggagacagagagacaatagttgtctaaagggatgtaactgctcctcagtcacttacctcctctctaaacagtggcagttcccccttgagaaatctcacctttattgagctctttacagaacaaagttgctgcatcccactcagaaactagaaaggtgttctaagaatgctctgaagaaaagtcctggcagtgattctcaatgtcaggctgcatcagcatcacctggagggcttgttatagcacagattgctagatcccaccgccagagttcttgattcagtaggtctggtgtcaggccaggtaattcgcatttacaacaagctcccaggatgctactactcccaggactgcacatttgaaaacccatgatttgaatcaatgattttccatcctaggctgcacattggaattacctgatgttttcaaacaatgtgagtacccatgtcagcctctaatcaattgaatctgcatcactggaatataaagttagggaactggtgttttaagttttccagatgattctattcttcagtcaaattttgtgattcacagctaaatctatcagctaatgatactgggtaatcatcttcatggcatgtaaataggaatacctgggaactgctcagtcagtaaatatttattaagcatctagaacacatattgctcccttctgaatgacatgagagattctaaaaataaaaaaaaaaacatagtacctaaccattgcactcaaagagtgcatattctgagaaaactatacatacacaaaaacaggaaaaattattaagaggagagtgtattgttaaatcataatttaaaagttattaagtcttctctgcatcatcttttcctgacctcacaacaatagtaggttgtagataaggaaactgatgttagaaaggatatgttttctagccaggatgattgttctgacatttgaacttgtcttacttctagctcatgctctcaaatcactctgtaacactcactttcaccagaggccttcacaaggatgttggtggaaatcactgcttcccatatttactctcatttctgttcccttagccttatgcagctcttcgtggtcctaggctgagaagactaaagctagagcagtagtactcaactgtggctgcattttagaattaactaagctacttttaaaactcctgagatccagcccacttatatcagaattgggaagggtaggtagtccagaggtcagtaacgagctggtaaatctttaacagccagctcccagaggaaaaaacaaaagccctgatttgtagcatttgccagtttccatggtattaacactcccactgtggctgatttcaggctaccaatgcgactttaactggctcacaaaattctgatactttctttatctatttatctgtcaatgaacatttaggttgattccataccatggtaattgtgaataatgcttcaataaacatgggaatgcaggaatctctttaacataatgatttcatttggggtgaatacatacccagtatggtgattgcgggatcatatggtagctctatttttatttttttgaggaacctgcatactgttttccataatggctctaccaacttacattcccatcaacagtatgcaagtattctcatttctccaaatccttgccaacatcatctttgatctttttgataatggccattctaccaggtgtgaggtgataactcattttagttttgatttatatttgcctgatgattagagatgttaagcattttttcatatacctgttggcgatttatatttcttcttttgagatatgtctattcaaatccattgccctgtttttgttttttatttttgagacggagtttcactcttattgcccaggctagagtgcaatggcatgatcttggctcactgcaacctctgcctcccgggttcaagtgattctcctgcctcagcctcctgagtagctgggattacaggcatgtgccaccacgcctggctaactttgtatttttagtagagatggggtttctccatgttggtcaggctggtctcgaactactgacctcagatgatctgccagccttggcctcccaaagtgctgggattacaggtgtgagccaccacgcccggccttttgcccatttttaattgggttatctgttttcctactattgattgtttgagttctctatatatttgggatattaactccttatcaaatgtatgctttgtaaatatttttttcccattccttaggttatctcttcactccattgattgtttcctttgctgtgcggaaagtttagtttgatgcaatcccattcatctatttttgcttttgttgtctgtgctttgggggttatagccaaaaaataactgcccagaccaatgtcaagaaactttcccttatgtttctttctagtagttttactgtttccagtcttacatttaagtctttattccattttaacttggcttatgtgtatattgtaagataagggtcccatctcattcttttgcatatggatatccaattttccttacaccatttgttgaagaggctgttccttctccattgtgtgttcttggcacctttgtcaaagatcaattggccataaatgtgtggatttacttctggactctattttgtttcattggcctaaatgtctgtttttatgccagtatcatactattttgattactatagctttgcagtatattttgagatcaagtagtgtgatgaccccagctttgttcttttggttcagatttctttggctagggtcttttgtggccccatacaaattttagaattgtattttctatttctgtgaaaaacatcactggaatttcgatagagactgcattgaatctgtagattgctctgagtagcgtggactttataacaataataatgcctccaatccatgaacataggatatttttccatttatttgtttcttctttaattttttatcaatattttacagttttaagtatacagatctttcattttgttggttaaatttatttctaagtatttttggggggatgatactataaatgagattgttttcttgatttctgtttcagttttcttgatttcttgttgttagtgtatagaaaggctacttatttatgtatgttagttttgtattttacagctatactgagcttgtttattagttacaatggaatattagtcaatctttacaaagaaggaaattctgtcatttgcaacaacatggatgaaactggaggacattatattaagtgaaataagccagacacagaaagacaaatattgcataatctcacttatatgtggaatctaaaaagttgaattcatataagcagagtgtagaatggtggttaccagggctgggggcagaggtatggagagatattggtcaaacgatacaaagtttccattaaaatgaataatttctgcaaatctattgtataatatgactatagttaatgtatttgtatacttgaaaattggtaagagagtagatcttaaatgttatcaccaccaaaaaaaagtattgaggtgatgcatatgttaattagcttcatttaatcattttacatgtatacatgtatcaaaacatcatgttgtataccacaaatagatgcaattttgattgatcaattatacctttaaaaagatgggaaggaaaaatgcaaaaatttaatcatctatttttgcaagtagataagaactggctctagtacatcactgggtggaacccaggtttcattattttttaaacctcacccaatatggagccaaggctgagaaccactgagctaccaaagccagaattatgtgggagccttggggatcttggaataatacaaacaaaaaaagtctatgtaaagcatacaaggggaaaggaagagagtaatgaagaaaactatcccctgaaatgcaacacagaacaagatggtcacagctagggtaacaagagccagcttctccagggtcagttatctcttaagacatgcctattcttcatttgggttttagaatgccagggccacggatgcttttactgactgcttttcaaggaatataaagatgcattcttattgaaaataattgcttcctatgtgtagtaattaaacaaataaacccttaccaatactgagagttcctgattttgttctctcaagctttgtattgcttacgggataaagtttattcccaaataacgaataaaaaacaaactagatttccaatcaaatttagaacttgggttgactctcactctcctctcatcacttcaacaagatctgcactgcgtaggggtataggagcagagtcaccaaaaaacaaaacaaaacaaaacaacaacaaaaaagggggaggtggttaagtagaacaggcctgggaaagttatcctctctaaagctcatttcccattctgtaaaattgggagtaattcacctccccacagggttactgtgagaagtaactgagatggcacatgggaaacagatggtacagtacaagacactcaataaaatgtgttcatagtaatacaaaaatatatgtagccatggagaacaactaccctttacagaagaattaaaattctcattatagactcttccattgcttgtcatctgtcttcttaattaggactttttgaaaatgtctccagattcccaatttattcatgttgtgaaagaggattaagagggaacacagctgatctaagccttgaccaagtgtgagggacagagaacaaattaaggatgcctgagtcccacccacctttgcccaaacaccattttttgaacatctcaattgtggtacctagcctaattaacaacacagattccagcagcagtaaatgctcttcctagtaaccttcttaatgttctgtggagtcagattctatatctgggccctaaatccataattttcctatctcccttgtgctatcttaccttaagtgactaccttcacccaatgagtgttgttctaagagccaaatgtggcctctgctgcctcatttctgttcaacctcaaaccacgtcctggttccctttataatcgatagttataacaagccaccggtcacacagaactcccttctaatcagctactccacttggaatgtctcttaagatcaacactcaccagttttaatggtcttcttgctcattcaagacctcaagggtcaggtcaatttaaaagaccattggtataaattgagatgatgttgtcctgattcctacataattaatcataatggtgatcattttcaacaggaagaattcagttatggggacatggtattgcagtagactgggcagagccagaagtagaagttgatgaagatacaatgtcttcagtgaaaatcctatatgtaagaaatcttatgctgtctacctctgaagagatgattgaaaaggaattcaacaatatcaaaccaggtaggacatatatacaagattagtttttcaaaacattctttgtcctggtttagtcttgggagggtgtatgtgtcgaggaatttgtccatttcttctagatttctagtttatttgcatagaggtgtttatagtattctctgacggtagtttgtatttctgtgggatcggtggcgatatcccctttatcattttttattgtgcttatttgattcttctctcttttcttctttattagtcttgctagtggtctatcaattttgttgatcttttaaaaaaaacagctcctggattcactgatttttttgaaggatttttgtgcctctatctcattcagttctgctctgatcttagttatttcttgccttctgctagcttttgaatgtgtttgctcttgcttctctagttcttttaattgtgatgttagggtgtcaattttagatctttcctgctttctcttgtgggcatttagtgctataaatttccctctacacattgctttaaatgtgttccagagattctggtatgttatgtatgtctttgttctcatcggtttcaaagaacatctttatttccaccttcatttcgttgtgtactcagtagtcattcaggagcaggctgttcagtttccttgtagttgagtggtttggggtgagtttcttaatcctgagttctagtttgattgcactgtggtctgagagacagtttgttataatttctgttcttttacatttgctgaggagtgctttacttccaactatgtggtcaattttggaataagtgtgatgtggagctgagaagaatgtatattctgttgatttggggtggagaattctgtagatgtctattaggtccgcttggtgcagagctgagttcaattcctgaatatccttgttaactttctgtctcgttgatctgtctaatgttgacagtggggtgttaaagtctcccattattattgtgtgggagtctaagtctctttgtaggtctctaaggacttgctttatgactctgggtactcctgtattgggtgcatatatatttaggatagttagctcgtcttgttgaattgattcctttaccattatgtaatggccttctttgtctcttttgatctttgttggtttaaagtctcttttatcagagactaggattgcaacccctgcctttttttgttttccatttgcttggtagatcttcctccatccatttactttgagcctatgtgtgtctctgcatgtgagatgggtttcctgaatacagcgcactgatgagtcttgactctttatccaatttgccagtctgtgtcttttaattggagcatttagcccacttaccttttaaggttaatattgttatgtgtaaatttgatcctgtcattatgatgttagctggttattttgctcattagttgatgcagtttcttcctagcctggatggtctttacaatttggcatgtttttgcagtcgctggtactggttattcctttccatgtttagcgcttccttcaggagttcttgtagggcaggcctggtagtgacaaaatctctcagaatttgcttgtctgtaaagtattttatttctcctttgcttatgaagcttagtttggctggatatgaaattctgggttgaaaattattttctttaagaatgttgaatattggcccccactctctcctggcttgtcgagtttctgccgagagatcaaaacattctttaaaagcacctatgcttgagatgacttcccataactttaaatagaaatgcttttatttagttcatctcataattccatgcagacctctcaaactatgttcctaactttggattagaaaatcaagccatgtggtcctacaacatttatcaatattataattgcatacttatctatgtgattatttaatgaatatctattttcttcactaaactataaatttcatgagtttttcccctcttattgtttcctccatcttcagacatttaatctctgggcctggggtacaatgattgctcaataaatatttactgtaatgaagaatgcatgccataaccataggtctgatgcagggtttctcagcctcaccactattgatattttggaacagatcattcttggctgtgggggtctgtccagtggattgtaggatgtttagcagcatcccaggcctgtctctgttagataccagtagcaacctccaagatgtgacaacgaaaaatgccttcagacattgcaaaatatactctacgggtgggcaaaattgcccccagttgagaaccactggcctaatggaatacacttgtgacataagtaaaaaggtgacaatcctaggaaactgatttgagtgaagaggaagggaaaggaatagagggaaggtggaaggggatagttagttgctactcatcttgtcaatacttttcagtatcaattctaagccatcagattgactccccatctctttcttctccatataggagctacaacactgagagaggtagagcatttcaggaaacaatatccaaattaccatttcccaaaaacagttcagaacattaattctacaatcttttggtggatgttgctgataaaagggctccatggtcaaataagcttgtaaacaccagattctgcaaaattaaatgaatttcttcattatggaacttatcaaagtcttttgccttctaacatgctttgaaattctccaagaagcgatgcagaaatcttcatttttcaagtttctgaaacatgactgctcttttttgccatatcattttgtgggattactgtgtctttaaacacactctgggcagtagtggcttagggttatcatagtagtaatatcctttcataactgagaatttcccagtctcctggcaaattatctaggttgttaataagggtgggccatggtgctgtcatgttaaagctgcctaagaatattcacttgcacatactcacatcgtctgtttccaactctgggtgctacttcagatagaacagaatgataagctgatgatttgctctgaaggacattcaggaaggatgtcactgctccattttgaaagattcaccaaagatctttctccagcctcagggactctgccttccctgaaatattagtgtgagggtgtggctccacaccaacagctgtgaatccatgactaagctagaatctgcaaatgatggaccaccttactgtgtgccaagcattgcagtgggcactttcacagcatgtgtcatttattcatcacaaccctataatacaggttgctttattcattccattactttctagataagaaaaacaggacccagagtagttaagtagtttgcccaggttcacacagctagcaggtcgcagatcctggatttgaactcaggtctggtaaagggcatgttcttaaaaactttaatactctcatgccgcctccttattccattcactcactcattcattcaactgtctttccttcagtagctcctacatgccaggcactgtggaaggaacaaacaagtatgatgtgtgcatggaaaaagtttaagaaattccagaaaaatacagctttgacagactactcttggagtgcagagaagacttgtgttttgaagcgacatctaagctgagatctgaatgttgatgcagttgtaggcataggaacattatgtgtgtataaatattgcccactattctcccctcattccatgttgactttctaccttcccagagtgaataatacttcttatttttatctaattaaaacagcacctttttttgccaagggctagaatgagaaactactaaaaggctgcttcctttcctagtccctgattatcagctttcccagtctgcgtattggcatatattaaagagacatgtgtgcccggatcctactaattatcatgaaaataatgaacatcacatatctctctcttgctcactctctcactttctctttcttcttgggactaaagtgtgtccagcgatttcagggcacagtctgcagctggtggcacaactctcagggctatataatgatgtatggcttgttcttcgtggccctctgcaaaaaaaaatatgaatttcagaacgtgaacaactagcagacatctgctgcattaagagggaaaagtcagagctaactagtttatcttggaaagtatgtactgtgccaaggctatacttatctagaaaaatttctggaaacaaacagaaaaatgactctaaaaattccatttaaagtttaggtccctcagaggaacctacatattacctcaaaatatttgaccacgtatcagtttaaccatgatgaacttgaataatattatattgccactgagagacacaaaagataattagaacaaaaattgagacctgaagatggtttgttcttccccactgtagcctaagggtatctgctgaatttccaattatagtcattctacaaaatctgatcttcctacaagagtttagcagtattagaatcacctgaagggcatgttaaatcactgattgcttggcccatcatgggtgggttcaagcatttccatttctattaagtttccaggcaaagtggattctgctggtcagggcaccacacttcgggaaccatgaccctctgataaccttccctttggcatgcaggtgtgtttctcctcaggtttatgtgttgctgacaagttgataagaaacacagcaataattttccaattccttgcatcatgatttcagaggatctttttcttctttgctaatggatgattgagtaataatgatcactcatattctatggactcaccctctgccaaatgaggatcaattattaaacaaactcctatgcactaaagaagaaacataataaaataagccatgtggtgaatactattgtagagaaaaccaacttttatgacacagactctaactttttaacttgtctgttttatgaggctaagtttttaaatatcaaattttccaaaaccagatgcatctggaagttatcgtccaacagtgtaagataatttcagatatctgcaaacagaatttcagaaaatctaaattcattatcatctcaaatgccactaactggtgtaaatgacagaagttgggatgtgaattaactgataatattcccttattccatgtgtatttatagagtagctcctgtgtccaaggcagtaggcaggaaccaggtgaagatgataccaagaagtctctgaagagggtcctgttctcagggagataacagaccagtgagcctaggtggagaatgacattgaaatatgaaccaagcaaagactggaaaggtgaaggtcatcattggccaacgtcttccttctcagttactaaaacaagtcatgggattaagtcatgatcatcaccccatgtgacactgaaaggaatgaagagactatattggatattcagttaattatatgtctcatgcttcatggtctcagagagctttatttatccttagcctggccagataattttgctctgtataaccattgccataagaagtcaagggtcgactgttgaagggagtgaaaagagaagtatcacaatgtctttaaattgtccttatgttacaggccgactatcattccaaaggaagataattcttagtcattgaaccacgtgggagagtaaaaactctaattacctttgttaccttgaatctaagaagataatgaaactttgataaggacagaaaggacttccccctcttcttttccctggcataatgtctcatcctatgttgtctcccggcactctcaaggtacacccaagtgagtgtagggattaaagaagataattggcatgctaaactaatagtggttaaacaaatttccaccttaccttcactctaagcaaaaggtctatttttaaaattgagtaaggaaaaacattttaaaaatataacatccaactatctcggtacaactatctttttcatttttatatgttgccatcatgttcagcagttcccttacataaaaatagatagttggtttgtttgggttttctacacaaataatataaataaactttgcaaatatttgtaaaataccaaatatatcaattaaaatatgaaaacctccttcattcttcccaacttttctccccattcctgaagtaacctctgttaagagtttggtctctatcttttcagttcactttctgtatgagtgtatttatatttgtgtgcacatatatatggttttggattattaaaaacacaaatgctgtaatattgtacttactattttataactttttaaaaattaacaataggtcttgggccaggcacggtggctcatgcctgtaatctcaacattttggcaggccgaggtaggcagatcacctgaggtcgggagttcgagaccagcctgaccaacatggtgaaactccttctctactaaaaatacaaaattagccaggcacatggtgatgcatgcctgtaatcccagctactcgggaggctgaggcagaagaatcgcttgaaccagggaggggtgggttgcggtgagctgagatcacgccattgcactctagcctgggcaacaagagcaaaactccgtctgaaaaaaaaaaataggtctctaatctttccatgtaacaacatacaggtctattttctttatagactccttcgtgttggtataaatgcagcggatttaatcactcatgaaaatagacattaaattgttttatttttgctctttcaacagtagtgtaattgatatccttatgcatgatccttgtacatgtgtgtgagtgtttctgtaagagacattactcaaagtagaatagtagatatttacattgtttccaatctttagctatcatgacagcaaggcaggcaacttatctttgttcccagatgttctttcggaaacaactttctttttcttctttttgttttttatttaaagattattggataaggatatagagaatccagttgtagttcctctctgtgtgcactctaaatctcagttcccttgtcagaactgtagttacctaatatttaaatttttaaaagtaatttaaagttaattacataagacaaaagagataaagacattttgctggggtgaaaagcaaaagtaatcacctaaatatatgtttgtaaaatgatcaataattgagttcaactcaattcaacaagtattttaccatgcaaaatgtactatcttttacattacataaaatgcaaaagaagatggaattcccacccttagacaccttgtaatctaggaagtggaagacacaaatccataacaaattataataagtcagaatataaattttattttaaaaactgcaaaaaaaatcttctgttgaatgttcttgatgagatccttacttaaatatgaggtatccataaaaaaaatcaaatactctttgcagctagatgctaaaatatatcactttcaaggctctcttaattttgttaatggggcaaccttcactctattttacaggtgctgtggagagggtgaagaaaattcgagactatgcttttgtgcacttcagtaaccgagaagatgcagttgaggctatgaaagctttaaatggcaaggtaaggtagaagaaagaaaaaaatatgcagattacatccaagtttggtgtggatattacatccaaaagcacagtcctgcaagcctgtctcactccagccttctctgacatggctgcctcagtccatttaagatgtactaaagagaaatgatggaaaatacaatggaagttggagatgtacctaatatatccaactttacctctatttgttttttataatttggacaagtcactggccctcaatttccatggaaagaggagatttaagtagattatttcaagatgtttttcacaattccagttttctctcattacttcaaagagattatcatcattttagtgcagtattttagaagctgatgaattaaaaacatgtcaagatagctgttattctgccttcatagtttgatcttccacttggaaagcttagagtctctcaccttgccaagagtaggggctggggaagcttctatatcctcactactgagttgtctacagaaagcaatataatatttatatatcaagccaataaacatttaaaaccttctgtagaccacttatcatgctaggatacaaagagaatcaaagatgtttgacaaagagttaaaagttggttggaggaataagacaactacacaaactcgtgcaaagtataggcaagtaaatatcataaagagagataaacgtggtgagcaagttcaaaggaagaagtgggctataaagaataaaacatcttcatggatatgagaagataatatttaagagaagccacgaaaattgggtataatttcaaaaatcaaaatatggaaagacaggaagtcttagaggcacagaatttgagaagagcaagacaagattggagaacaggaaaatgtggagtaacttggctggaacataatgcacgtgggactgtgttacctatcggatctggcatcggtcagggtcccaaaagaaaacaaatagcaaaggaattaattacaaaagtgcgagtggggactagggaaatcaaaaaagagtgtcagaatttggggctcacagcattctggagtcaaaggtacaaggggctggagaattaatagaaatcctgaaaggggagagaattgtgtagagcagatctctttgcaagaagttgctgggtgcagtggctcgcacctgtaatctcagcactttgggaggctgaggtagaaggattgcttgagcccaggagtgcaagaccagcctggacaagatggcaagacctcatctctacaaaaaattagccgagcatggtagcatggactactacagtagtcccagctactccgggggctgaggtgggaggatctcttgatcccaggaggctgaggctgcagtgatctatgattgtgcctttgcactccagcctgggcaacagagtgagaccccaccattaaggaaagaaagaaaagagaaaagaaagaagcagtgattttggtcaaaggacacagtcagcccaaggtgacctctcaaagacgggtccagcagaataaatgccccgaattcactgttgtctcttctccaacctcctaccagtgttccccattggctaaatgcaatcacaatctagaaggctaaagaggaccccatgtagaacagcttcccagagcagagagcaggctggagctggtaggtggtgaattccataggcagtggatccagatggcaaagggaggatctcttagcctaggcccttcagacactgtggagcctcttgcatattagctcctcaggggcccactcaaactcaaaaagtttgaatactggagggtggggtggagaaagtattcactctgaaatacaaaaaagaaaactgcaaagaaaaactaatgcataaatacatgtctataaagaaaagcattatttcatcttcattgatgatcacatttagtatcataaaagtgttattacttggaaaacaatttgtaagttagattttctctatatggaaacattcctgagtatacatgatgattgctgggaaggaacagccatcacaaattaaatgccaaaaattacgttggaataattacaattgaaacatattcaaattcccaatttttgcagctagatatttttagagtaattatttacacatattatttagttaaatatatatttaatattatatttgactataatgtggtatggaaaaatcaaaagtaagttttcctaggaactatgaaggtttttgagcatatatagagatatttatatttaatttgttagatgaagtgagatcttgaaattttttctacgataattatcacatttacaatttaggaaaattagcctagtaagaactgactttttaatacaggtgagagaaacatgtcatagaaactagttataaagctattatagtcaaccaaatgggacaaaataaagtcttgaacttaggtaggaatggaatgtaggagacagccatatgcagaacagtaagggataaattcaaaggacgcaggaactgattggagatggggtgaaaaagaaggacaagtcattataagcttccaatatggtaggttgttatgaaagtcaggaagggaagcctattcagagagaaaaatgatgaattgagcttcagaatgattattcatttattctttttgtaagtctatgaagtgaaagaaattttactaagcttgggctatacagattaataagatattgtcctagctctggaaatatctaaaccaaataactaaaatacaatattgaatttaaaatgcttttggatgggacaaaggaaggcagaacaaaatttgttacaagatatctgaatttgccgcaaagaatcattccatgcaaaacatctcttgatatggaagtgcctataagcagagacctatttgggtctctcatcttcctcaagactggactgaagatataaagaatcttatacccaagttcctcccctattttcagtatgccaggtctactttttctaattacatcaacatcaatataagattgttgaatatcagctggattctgtctgtctctcagagtattccatctaacttatttgacactggctcctgctactaaaaagtaaggtaaatacataatactggggacaaattgaccaagaggctgaacaaaatggtcaggatgaccatgaagcacaagctttgtccagcagacttcaataatccaggaaccactgagtcactgttgaaatcagagggtaagggtgcacactcagctgctgtgaatgggaatttctgtagaaacactttacataaaagtgttctttatataaaacagaggatcttcacattcttattcaaaaacaaagccacaaatgctttcagacaatactttgttcctttgataataaatacatcaatctatcaagaatttcttgagagccatcattgtttattgtgtaggcaagcaatacatagaagttagtagcacacgtagatctacatacatccattatctttgacatctggagctgtttgcagtctcagaatttgtgtcagaattcttaaggacaggttttaagcagtgcatgatctgagaacctcaatactactctcactcccaactactcctgacccctgtcatccctgtttattagctcccaactgttcagcagatcaaaaggtggcttcacaaggaagaacctgtggcaggcaatgcaacagcctcccagattcctcttcctttggtagagccacagtatgtctctcttctccagtgaaaacttacttgtgtggctgctctaaggagcaagacagttagcgggctatcagctggaagggcctgatttggctgcccatgctaaatgctaataattgataagatttctttattggtttcctttcaccttcatcttattgtgcaaggtaatggagattttataccatccataacaaacctaaattgtcttgtagttatataattatataaatatgtaatttaaaacacatatatgacctaataaaaatattacataactttctgtctcagtgactgtaaccagattgtaaatttataatgaatatgtcaatggacactggccaatatgtcactgtcaaacctgttggcatcttatgcaacttaccaacaaaatggctcagaaaaagttcaactggcatacaaaacaaacctataaaatgacaagatacaatcaataaacctacagcaaatagtctaacacttagaaggagtcatgttattagggctcagccacacttggttatcttcatatcatctcgcgttgatatttctttgctctctacaacaggtgctggatggttcccccattgaagtcaccctagcaaaaccagtggacaaggacagttatgttaggtatacccgaggcacaggtggaaggggcaccatgctgcaaggagagtatacctactctttgggccaagtttatgatcccaccacaacctaccttggagctcctgtcttctatgccccccagacctatgcagcaattcccagtcttcatttcccagccaccaaaggacatctcagcaacagagccattatccgagccccttctgttagaggtaacaccagtcagatcttgctttagagtaatcccaagatttcaaatgactcaaattgcagtagccttagatacattggatgggtccacttggagaaaagcactgaaaaattgtttattaaaaatcaactattatatcaatagttttcctttaataggaatctttttcacattacaactggttattgaaaaaacgtcatcagaacattgtgcaaatgagcctagtgcacagattcaaactttgcatgggcccataaaatttgcacaaactaaaacctagttctataattgttagcttcttctatatcacttgtccaccactgtgtagtcatctgtggctcattacaacacttctggaatagactagtatagtccagtggaaaccaattacctcaaatagcaaaaccctttcaaggcatgtgtgtatttgatggtgactcagtggcattgtcttaatatgtaaatcacaaattattataaatataatctaacagacatatgagatgttctcatctgacctcctccaggaaatatgttatactttcttagaagccaaataattaaggacattactatatttctttaatacatggagaactgaacaacaaatagaaaaaaaaccctcaatcagactgctaataaaacaataaatatttcacatttgaatcctgtaagaattctaaatgtttgagcagttttccaagctccatttcttcaagaaagctagaagataaagaaagcctttattctatttccaagaaactagcttgtccctgtctttttggctccttcagatgagtttttctaggatgtggctaatgccaactgaatcccagttctatcctccaaatacgacatgaatctgggcaattcgataaactgtgcatttaagtctattcttgggtttgacttagaagcaaaaaggcacatctagattactgtggaaacaattatcttactatgttttactacttttcagtataactaaattgatcatattaggagctctagtcttcaacagccttaaaagtttcatactcataattacttgccccaaaattgtaatgcaaatgaaataatcaagatttcctttaaggtaacttgtctatgtgataataaattatatcattgcaacattatgcatttagaatataaaatcacctcattaaccaatccatacattaaatacaaattgtcaaccagttatgatgtcgaaaaaaaacaaactccactataagggaaaaaatgcctatcttataacaagaaaggaatcaatgaatgatattcatggatgaagggtaatcaatttaattttttatctctatgccaccaatataaaatcaaagtagtaacatggcaaaacaaaaatcaaaaggaatctatgcatgaaactcaatggaaatttaagcctcacattgaccgaacatcagagagcatggtgaacctaaaagcatgctttctaaatgtttgttttacaataagtcattggaagtgggataattagggaagccagaatttatttctgatatactgatcagtgacagtctctatgcaagactgatttcaaaataagtggtcgcattatgttggaatgttctaataaatacattcccagtctttattagtctgtataaaatatcaaggttacctaaagacaaaaattgcaaattttctatcccaaaatttttaagttgtttgtgtacttatcaatagtattgtatttatcaatggcattgttttcttctgaaggtagtttttcaaaaaagagagacacctatgttaaaccttaccttatgttgagtttcattacattagaatcctagagtctcccacccatcttcagggcaataatcaacgtgaattgggctaacttttccattacagtaagattcagggtgattttctggtggtttgattcagtttaatgccttcttacgttcctagaaatttacatgaatgtacctgtaggggctgcgggagtgagaggactgggcggccgtggctatttggcatacacaggcctgggtcgaggataccaggtcaaaggagacaaaagagaagacaaactctatgacattttacctgggatggagctcaccccaatgaatcctgtcacattaaaaccccaaggaattaaactcgctccccaggtaggtaatgttattccagaaatagtttctttaagttgtgccaatgagcatcattcacttttatcaaatgatttgacttgatccctactcaagctatgggtttttttcttttaatatataaagcatccaatgaatgtcacagtctttgaaggaatgctgggcatctggtgccattattctattataggtcctttctcttttttaaaaaatcataaagtctaacaccttgaacaatattccactgaaatgcaaagaatctgagagctattaagaattatcaacccatacccgaaatgaggcaaagaccccatctcagaataaatgcctattgtatgtgagccaggttggctggcaaatgaagagtattatggcagtgccctgaatagaccatttaggacatcttttcttggaaatactgtatctaagagaaaactccaccatgatatctgggtgaattattaactatgagatgtcatcagtcataccaaattaactcttcctccatagttatattttggcagtggcattacagagagtttttactgtgttcatttaacagttctaagtttccacacttcaacattaacctgtggtttttattattggaaaattaaaagctataaaagtttcaatatggaaactgactcccggggttaaaaataaaacaaaacagagtctatgctaaccctgagactgttccctgtgggagtgtgataggtgctgatctctctgaaatacattttggctgaataatcagagttacagtttgtgtatcttgaaggaaacttccctattcccatgacaaaggtgggcttatagcctcacatttatggaagtagcccttataatttcaatccagaagaaaactggttttctaaaagctcatcttgggtaattttttaatgggatttctggctttcttttatgcacaaattagcttatctaaggtttctgctagccccacccagggaattttaaaaaaaatgcctatcagactgctaaacagcaatcatttgttcacataagatttagtaaacttctcttatgcaccatgtagtgcgctaggtgctggagatgtagaagtgaatataacaaaatccttatcatgaaaaattagatggcaatccagtgggaaaaaactgacacgtaaacatataatgaaatctggaagtgatatgatgaagtttgttcagaaaatataaaagccactcatccagtttctcttaggttaaaacccaaaacaaaaaacctgattaaagtactggaatacttagaaatattttaagaaaataaaaaataatagtcgcaaattctgtataataatagttccgagagctgcaatagtatgaaaagagatctcttcattttacattaaactcaagttagaaattcatcatgtcttttattagtatgtgagtaacaatctctatcaattaataaaagttctttaatttgtgtctgaccttctacaactatggcttagaaatgaagaccatgccaccaccaaccaacacagatggggcctaaacaatcccaaagtagagttgtgaacttccagccagaagcagagagacaagccctttcctgcaaagtcagcagtgagagctggtgttccttccgcccaggtttgctcacctggcataaacaagcaggcataatatctaccagcaaaagctcctttattattgcccaagaactgtagagaatgctctgaggattacaagagatcctacacaacaagagtattaaaaagaaaatatcaatagaaaaaacagtaacaatctacaaattaataaactggaaaatatcatgctattgcagctgggttagttagcataaatgaggtaagaaacctcagagacacatcctgagacattgttctgtcttacagagttattttctcaggcttatgccctgctttccacagtctactgaatctgctgactaacgagagcatcaggacctctggacaaccaaaaatggcttcagaataaagaaactatgaatctttagaaaatattcagtttggagtaattacagaagaaaaaacatgcaggaggatgctaaaaagcatattgtcattaagcaaaaaaacaaacaaacaaacaaaaaaggcagaaatagtgtcttaccaaacaaataaaaacattgcaactgtcaacacccatctaggaacactcgataaataccaagcattaaactttttaattctatttttatgaaattgtgagattaaaaccctatgacaaatgtcacgaaataaaaatatattcttaggctatcatctctaaaccattataaacacagagattgagagtaataatgagtaaatctatacaaatctatacacacagtgttggagcaacaatttttacaaaaacaaatattccaaacaaatcataaaattaagcttttggtaaaaagttacagctaatagactaaactaaaaacatattacagtaaatggtgtgaaagtgattttatgaactaatagacctaacattttaaatggagttcaaattgagttcatcttaaattttatgagtcattaaatcatgtggcattttatgtcttcagatactagcttgaactctgaaaattagagtttaaaaacctgaaaacttgggaaataatgtgaatgtgtcatttgagggggaaataactttttttattcttgtagatattagaagagatttgtcagaaaaataactggggacagccagtgtaccagctgcactctgctattggacaagaccaaagacagctattcttgtacaaaataactattcctgctctagccagccagaatcctgcaatgtgcgtaacttctccaaattccttaccattttagagcaggatacacttataaattaaatgcatttagtcaccatctaaacaagatactgaggtctactacctactcatttgtcattcaatgcaaatattgagatgtgtagttgggatgtgccagccatgaaaccagcatataaaggcccccaaatttcatatacacaatgaaggttgtgtagtatcaccagccagtggataacagtcagtagtgtaaaatgtaatagaaataaaaactatagcccattcttggctggatcacttgaggtcgggagtttgagaccaacctggccaacatggtgaaaccccgtctctactaaaaatacaaaaattagccggatgtagtagccggtacaggcaggcgcctgtagtcatagttactcagcaggcgcctgtagtcatagttactcagcaggctgaggcaggagaatcacttgaacctgagaggtggagtttgcttagattgtaccactgcactccaacctgggcaatagagtgagactccatttcaaacaaacaaagctatagcccattctttcatctgtgcagtgtttaggttgaagcatatgaaactaccattttatacataataagacaatggcccatcatttaattttggaccaaagatatgacctctctgttagtggatatcacctcctgaattttaccttgagcctgcatttctatatattttaggaacaatttgtttcacttgtgctttagaaaagccatgtagtgaattacttgtatgtcccaggaatgtcatcaaccactgatgttctagatcaatttgtaaatatttctacatgcaacctatatttagaagctttaatagcaaacagaatgaaaaacacccactcaaaataccaccatccagtcatcttacaaagctgatagtgccttaagttttcacctgactcagttgtaccagtttaaaaatgcctaccctgactgacttgctttccagccaccctttcacacctccaaagctgagtgcctttgtggatgaagcaaagacgtatgcagccgaatacaccctgcagaccctgggcatccccactgatggaggcgatggcaccatggctactgctgctgctgctgctactgctttcccaggtatgggaaaattgtgccagaaatggcgccctgcagagagtatttgggaaacccttttttggtaccattgaatcacagaaatgtttgtgtaccctacttacagcaatctgacttgcacaaccttgggaccaaaaagagtttcccaaatgagtgactcattaaaacacgaggcaagaaaatcaagctgggcagcagagtgggttctggtctcggctcagctttaaactgctgtgtgatcttgaatgagtcagtctctctgagtctggtttgttttggtttttacttttagtacgagagtttgaaactacctatagatatatgatgtttattggagatcttactgtgtgctaggcactcacttaaatggtcaggaagcgttataatatcttagtaatactcatgataccaccaagagttaggttccatcagaaagtctggtatacaaatgaagagcccatatacagaaagattaagtaatttggccactggcaattagcttttcagcaatcttttctccctctccagtcttcaatctacttttattaatttgatttcaaaaaagattttttaaagtcaaaaattttgtgagagtgagagacagacagagatcctttcaatatgtgaataatcaggactcaactcaatttatttgttctataattttggtctggggcatatgctgattgcttaaagcaaagcctatccgtggatcaacaatgccttcagaggtcacattttaaaagatttgtccccatttgttatgtacccacaacaaatggtaataattaaaactgaatcctttagagattgaaggggaccaggcaagaaagttgtttaggaaattttttctcagctgaaaattttttatcctttttttttttagtaaaagattatttttattaaagaaatctgtcattttttacttctcattgtgtcagcgtgtgccacataagtccaaattagagctctaagtagacctagaaacatgatattcttattgattaattaattcatatattggccatgcgtaggtgtgaaaaattttatattcctcacacccactgcacctggggctccttctcagtagtgttttttggttttggggttttttttctcaaaagttttgaatatatcctccattctggccagtggggctaacattaatgatgtttcacatctgaaagtgacctcaattctggctttgtttctctgtaagaacatggagatgctctgtggtgagtccctcggaggttaccaaggtaacagctgacattgcagagggcaaggtccttcctgggcagtgtggggccagcagccagtgcttgctttccacataacagggtgtttacatgtccatttactcaggatgcctgccagggcttctcagttcctagagaaagttgagcccctgtcttacagaaagctgcaccccaaagacacctaacaaatgtactattaaactaatgagccactgtcagaattttaaagtttgctttcacattggaaaggatttgcttttacccaagaatgttttatcttattctcacttccactggcttctgtgagaagttaaaaatatttagggcatgagtgttgtcttgggaatgcctaagaatctgagagcctctcttataactttgctgtggagtcaagcaaagaataataggctccaagggaagaatcagtttgaaacccaaacaccctggcacttaacaaattgaccaagttgaaaaagaaaattcaaaatccctaaaggtaaaatctgtgccacaaacacatgcatgcatgtgtgcacacactcacacagttacattactcacttagtttagaaatactgtttccaaaaccatgaaagtaactgttaacacatgtctcctatccttggaaaatggaccaaacttcactagtgcattaatcagcattactgaccaaaatgaatgcaccaagagtggattcaatttttgttcaaaataatccaaccagcttcctgccaccactttctgagaagccactagaaaaaaatcaatgtgtctggggttgggcaggcttctactgcacataaactaaatggggtttaaaacaacaatgaaaaataggtgcccatttgtacttaagtatacttctctctttttcttgctatcttttacaatttctggataatctcagaaatactcaggttttaaactaaaacaatacagagaaataatgctttagatagtagctaatatgctctcttcttcaaaagtgaatgctcatccactagacacaatgctaacatgaaagcgcatagattatttttttaattctcagatactttggttctctgaggcggagaaccagcatcaaggcctctgaatacaacaagcacaggcttgatgaggggcttgggaggtaagaaggtgcttttgccattcatagttacatgtaaatatggacaggttaggcatttgcttttaaggtattatggaaaagcacacttaacctttacagtatttctcctactgatctcccagtctttacacatcttcttgggtaaaggcaaatgttttaaatgtttcatttaggcaggtgtggggttacaggagaaccagtcccacagatccccacctccccacataccatgcccagccagcccctcagtcaccttttctcatttataaatttggagaccctcaaaacgctaaaaatcacaagctttaatcaactcagtatcctgttaagtttctctttcttggaccctatcccaagcatctttaattctcttaagtataaagtgattctgacacaggtggttgaccccactttagggaacattgtcctaggactgtttaaatatcattgaaaatcactgagtccacatattgtgtccttaaggacactttttaaaacatatatattaacttttagctttaagcaatatgttaaatgttcgtatttctaaaagaagacaaataagccaaaagggagcaaatgtgaattcctttcatcaagttttctctgcctcttcctccaggatatgctgtccctaatgcaactgcacccgtgtctgcagcccagctcaagcaagcggtaacccttggacaagacttagcagcatatacaacctatgaggtctacccaacttttgcagtgactgcccgaggggatggatatggcaccttctgaagatgcttttttaaatttaagaataagacacacaaaactctattaaaaaaaaaaaagaaataaacctctaactcggtccccaatgatcataaataatatgtttcctaaagaaatgcctttccagagactgtatagcttataccaattatagaatcatgaagtaagaa

SEQ ID NO: 667 - DNA, 14238 bp, Homo sapiens
aaaacaactgccctctcttccacgatctagatgttgcggcccgcggacaggaggttcaagaaatagtacactccgagcggcaggcagcgaggcggaaacggtcgccggtttcagtggtggccccactggaagccgagttcaggagcggctaagcggtcgccggggaaagcaccggggcttcccagggtcccctccgagttcccactccgcacctccgagggcgtgaaaaccacgggagccgccccaccccgcgcgcccagccccgccccagcccagacaccgccccccgccagtcttccctgcggcgcccagggaggacgcgctccgcccccttccaatccggccaatgggcgcccgggcagcgcgcggtttgcctccgcctccgccagggaaacttggaggaggagaaaagtttgtacagagggtggaaaggcgagagcggagctccaagcccggcagcccgagaggaagatgaacagccccaggccagagcctctggcagagtggaccccgagccgcccccaggtagccaggagcggcctcagcggcagccgcaaactccagtagccgcccgtgctgcccgtggctggggcggagggcagccagagctggggaccaaggctccgcgccacctgcgcgcacagcctcacacctgaacgctgtcctcccgcagacgagaccggcgggcactgcaaagctgggactcgtctttgaaggaaaaaaaatagcgagtaagaaatccagcaccattcttcactgacccatcccgctgcacctcttgtttcccaagtttttgaaagctggcaactctgacctcggtgtccaaaaatcgacagccactgagaccggctttgagaagccgaagatttggcagtttccagactgagcaggacaaggtgaaagcaggttggaggcgggtccaggacatctgagggctgaccctgggggctcgtgaggctgccaccgctgctgccgctacaggtgagatggcgttgggctgacgttggggtcaacgggtagagaacgcagggatgcggccctcgccgaagagagccaagaagggaagagcgcgctctccaaattgcttttgtaacttgttttcagtgagcattttattgattcagaatctatcgagaatagcactagcgagctacttttcccttgagatgggtcttattcatcttggcaatggagtgagttggattgtggggaggaagaggaatgggaaaatcagtttataaatattaatgtcagcaagagtgtgctgttggcaggacgtatcgcgagcctggagattttggtggccgcagttggtaagtggctacaatccagaaagtaggatcgagttgctccccttgtcttatcagtgtatcgtttctcgggcgcgggtctaacaccttacaagtggtaatttccgctcacggcagctttgtctctcttctaccatccccagacccagccttgcactccaaggctgcgcaccgccagccactatcatgtccactcccggggtcaattcgtccgcctccttgagccccgaccggctgaacagcccagtgaccatcccggcggtgatgttcatcttcggggtggtgggcaacctggtggccatcgtggtgctgtgcaagtcgcgcaaggagcagaaggagacgaccttctacacgctggtatgtgggctggctgtcaccgacctgttgggcactttgttggtgagcccggtgaccatcgccacgtacatgaagggccaatggcccgggggccagccgctgtgcgagtacagcaccttcattctgctcttcttcagcctgtccggcctcagcatcatctgcgccatgagtgtcgagcgctacctggccatcaaccatgcctatttctacagccactacgtggacaagcgattggcgggcctcacgctctttgcagtctatgcgtccaacgtgctcttttgcgcgctgcccaacatgggtctcggtagctcgcggctgcagtacccagacacctggtgcttcatcgactggaccaccaacgtgacggcgcacgccgcctactcctacatgtacgcgggcttcagctccttcctcattctcgccaccgtcctctgcaacgtgcttgtgtgcggcgcgctgctccgcatgcaccgccagttcatgcgccgcacctcgctgggcaccgagcagcaccacgcggccgcggccgcctcggttgcctcccggggccaccccgctgcctccccagccttgccgcgcctcagcgactttcggcgccgccggagcttccgccgcatcgcgggcgccgagatccagatggtcatcttactcattgccacctccctggtggtgctcatctgctccatcccgctcgtggtgagtgaccggggctggggccctactcggcctttttctcgcatccacctcccgcgtccattccccgctccctgctttccctctgagtccttggcagtgaacgtgtcgcctttaggtcggggctgggattcccacactgtttctcagagcaggcccaaccctctttgaagtcccaaccctaacgagatttagcaggtgctttgcccctacatcccccagtttatgttcccggaagcctgggtttctttctccaccgagacagcccttaccccttgctgcctgacactggccgagtcttccaagaaaaccccccgccccctctgttagacgtggaggggagcctgctgtagtgtgacttagcccattcctccgtactgtgaactgtgaactgcaaaacctgaaatgtcagggatggtgatctgttcgttgtaaaccatttttaaggaaagtggggtttttggtgttttgatgtatgcaaggtttcttgaatttcttcccccgtggattgcgtagaattttaaagctagaagagatatcaagaggtgttttagtctaactccctcacttcactgagggagtgaatgatacgcttaaaataatccagccgaacctacacagtcaagctaggctccctgctctttaccatggtgtgccctgggagggcagcttaaagcacacaaattctaattcatatacagggcagggtccagactcagtttctttcattctgtctagaccaggaaagcaaagtttctcagggtgactaattatggacaggctgatatacatagggtatgggatttgaattctcgacaactgtgcgaggtacagtaccattttagagaaaccgaggtttagagatggctgtctttgtttcttcaagccaaagctctacagcttgtaatggaccttaggccgtctgaggccagacccagctcatgtgttattacatcacgtctccctcgtagaacatttctcattttggcgtttgtaaagcgtgggttggagttttggtacacttcatttttagttcatcttttaagaattgcctttggattaacttttaaaatatgataaacagaaaggctcaaaccctacctagttttctactttgcctgtggctaaaatggaatgcaccagaagcagatgggcagaataatgcaatactttatctagagtttctcttgaaagcaactagttatgagttcttccatcttccaaaacactgcattcctggaaattctaaactaccaactcaaaaagagataactgctttttcttatgcttgttgggaacaagagaatataaaatgtaatgggctattattccttccttttccttattgatactgtccagggatctttggtgtaaaaatatatctttgataaaagtgactgtaaatggaaggaacttagagggggctcagagccagaatacagtaggttcttaccaatttgtataaacagaagtaaatataataggccataagagcctttaagccattccaggacccaatataatttacagagttaagtcacacttgagccacataaatatattttactgtctgtaatggcaacctagaataaagtgagattttggaagaaacaacactgctcctgatggggcccctgttcctgggcctctgccttgtgttttacagaacagtaaatgacaaagtgaatggttgttattttcagaacatccacttaaagggacagaggaattagagctagaaggttagcaacatgcacatactttataaatgtgttttggttggaagtaagcatgtaaagctatggatttctgcacagccacggatgaattattttcttccaacatctagagagacatacaaggcttaattcacctcataggctgaagtggtagacctggacctaagattcagggcccttacacaaagccttgaaattatttgaggacctagaggcaagaaattataggagctgtatttgtggtttgcagattaaccacattttaactaacaagaaatactgtccacctgtataatgttagtaacgtgtagtaaattttaagtaatcttgacctgaaaattgaaactagctcaattaagaagtaatcccattagtcaagtatttatatagctttgtgagaaataaggaatcctaaaatagcagtggcatcagtttgtcgcctttagttttggctactaaagtctaatttcagaatcagtttaattataaattagtgataaatgatgggttcattatgccacccacccacccccccccccacaattcagcaattactgaaataatcaaaaacccttccgcaaatacagtcttccttggcttccttttacaactttcttttttcatgttttcatattcatgttgtaaattaagattaaagctcagaactctctgacattgaaagcagttgagcttatcttcagttccaaagaaactaatgaagcatctaattttatcaaatcaagtggttgctaatcccatttaaggaaaatcaaagcgttggaatcattttaaatgctttggaaaggctaacaaagcaaatgtagtttacttggaatttcagaaagcttgatataatacctaaggaaaacaagcagccactgaaaagcagccaaggttttgcctcctggacaccagggaagaaagagctacagctcttagaggggggttggtattgagtttagtataaaaaataaattttaatttgctatccaaaatatacatatttcataaatagagttaagattggagtggaaatttgagaaaggttgggaaattagttgtggatataaggaactgtgctgaacctgcagcattctttgaactgggtcataattaatgatcagagaaggtgtaagtatgatctacaaggaacatcacatgacaagatttagtgggtaggtggttcttgtcattttgtccattcttctatttataaccagtctcatagtttttttaaatataggagaattttggaagtgagaacttctaaaattttgtgagaacaagaagtgagagtctacatttaagataaacgaaaaggattgaattctttagaaatatgcaagcaagacagcctcctaaggtcctggttttaaatgctgtagcttgatgaattactagtgcctaattttgcagttactaatgaatattaagatgattattataatcaaatattttgccttagggctaaacagttactatagggtttcgaaggtcattttcccccatacacaagcaacccaagactgtatttattgcttacttgtttcttttattttttaactctgaagtaacaaatactcatctcagctaggggcagaacagctaatttgattaatcttctgccttggtgaggtaaaacttaggtccttaggaaaatacttcctgtgactgtttatttggttccttactataaactagttgtctctataaagctttcaccagcatttgatcagcaaaagtttataaggacagataaaaactttgtaaatagatatgcttttgtttactgtaggcaaactggaagtggagtcataaaacaactgatgggatgtcagatgagtgtgaagcacatctatacatacaagagaaatgccacaaatttgggtatgactatgacagaatctaaaagactggatttgttcaaataaatttggctaagtttaaaaaattgcaatgcctagaaggaagttttaaatcataacatgcaattgcagacccagtagtagtaacctgaagactattgagtaacataaaagtaagttatttccacatctggcatttcatttgaatcttgaaaagctctaaggagaaagtagggctgaccagtattttcactctctctacacctcagtttcccaagctgcaaatgaagaatttatatcattctgcaacttacagggtagctataggtgagtcctcgtctaatgctcatttcaccatgctttcttgacctgtcaatttgtttgtattgaatatctcctaacaagattttttttctcagccctgacgtgattcttgtagtctcctatcagaatattcaatgtgagagctttaaaaacaaacaaataaaaaaaaacagaaactttcagtgtagaggttgacctataaagcctgtagagatttaacttgccttctacaaatggccagaagaagaaccaagctctcctacacaccacccagtcaataattatttccactattctttacttgaaaaaaagaaagtgataagaacttctagtaacagctgtgtcaattttggactcttaacaaggcagtgggataactgagcccatacagataattccttttatgtgcttggaacagaacaagtagcacacacattcaaatccagctacagatcttgtcacttattggaaagcgttactgttttgacagtccattactaaatctaatcaagagttcaacattctttcttcaacattccctgcaaacaaattattaagtaggaagtacatgtttttgataccatattattaactatatcccaaagctacctctaagctacagttttcaaattattgataccttccacactgggcaagcttccacatatgggttgaaagaaaaagtaatgagagccaacatatctgttatacgataggcactgtactaagcactttaataatttgtacatacgttataagggcagagccaggatttgaacagaggcttgtttgcttccaaagcttgggcatttatctctacagcatatagcctccttacagctttcttgtcaccacatcttcttctgaacttattgcatttcctcaaagttatgttccactgctcctgagccctaatctctaatcatcctaaaaaaaagtgtgaataacataatttaaaaaaaattaggtgggtgtggtaacatgtgcctgtggtcccagcaacttggaaggttgaggctggaggattgcttgagcccaggaggttgaggctgcaatgagccatgtttgtatcacagcactccagcctgggtgacagagtgagaccctttctaaaagaaaataaaataatttagaatactgtaatatgccaatattaacaacaaaccacatgtacacagcaggagctactagaaaaagacttaaaattggaagaaaggagatacgttgtttgtattcagtgagtttttttgtttttgtttttgtttttgtttttgttttgagacggagtttcactttgtggcccaggctggagtgcaatggcgcaatctcagctcaccgcaacctccacctcccgggttcaagtgattctcctgcctcagccttccaagtagctgggattataggcatgcaccaccacgcccggctaattttgtatttttggtagagactgggtttctccatgttagtcaggctggtctcaaactcctgacctcaggtgatccgcctgcctcagcctcccaaagtgctgggattacaggcatgagccaccatgcccggccatattccctcctgactcggaggttcagttttatcagcaacacactcttccaacactgaaaactgcctgaacttgtttaattatgtaaaatatagggcctgttggacaagaattccgaaaagtgctttcaccccctcacgagacattgaagcactactccggatgtccccatctcaactggggttgtccctgccctcttggaaacagcaaatcaagtagcctacttaaagtgaagcagaggttgctctatgttttcaaacattgcaagatgcgtggagtttttgtttgttttgtcttttttctttccctacttgaagtaagtctcaattgaaatacgctgcaaagtaaaactcatattgattcttttcaatctaaccaacttttgaggatgtttttacctgaatttggacttttgctttttaaactcatacttttactaccctgtgaactcccctttattgaaaagacattgaatgaccaggttcagtggcttgtactaattgtaaacttttcctcccccatggaaaactttaaaatagagcatacttttaatatagcctcctttcattccctcctatactagtcgaaatccattgctgctgtggatgagatgaggcacagaaatgattctttccttgcctctcatcacctttgattatgaaaacctattattaattgttttacaacattccaacctttctaaaaggccacagaaattttaaaatgctaactcctaatgtacttctttgaatggctataaattccattttaactattcaaaaattttcttcctttcagtagtagccatgtttcctttgaggttgtggtaggagaagcaaccagcaataaaacattttcagtgtcaaaaatctcagaaacgtcaggttcagacttaaccaaaattctgttctgcgagtctcggagatggctttacacagtgcttgttagggaggtagtatcagaaactctcaagtggagcaacactgccacctggaggcttgaaggctcaagttcgcataaacccggccgtaggtcttttccagagaccacacacaggacttgatactaacagatttaacgccatcatttcttctacccttaggaacgtagtatgtgatgtgaataaaatatagacctcatgctttttaccaacaattccattgtcaggaaataataattaaacagaaagccagactggtagaacagaaaaggcaacatggaggtccagaccagactctgccaccaacagggtgggggacatcctaagttcctcaaaacctctgggtctcagtaacaaatacctcatctgagaaaaggcctgtagagttgagggaactgctgagtttccaggcatagctgaagacctcaaagcttatggaaggaagaaaccaagatgctttattttactttctgtaaagatttttttttaaatcaagtatgctttgccttgatactatcatttatcccagcgtagtttctaaaagtatttcaagaggcgatattacacactgctgttcattctagttcattcttgatttagctgtcttccatataggaagatattaatttcatcttggttagaggcatgtcactattttattctctgagatttacaggcccataatcccatatccaaaatatttacgggcagatgagtttcagaattcagaatttcttggcttttagaaaagtaatcaataatatattgcaaaatatgtaatatccccatcagaactggaacagtaatcctggaccagaacataggaatattcactctaagtggaataaattgaactaaatggcttcacagtctgttcagttcagttttgctgccaaaataagtttaggtcagattttgcaatgagtgtaagttctcaaaacaaaacaagtgaataacaacaaaacaataacaaaggaaatgaacaaaaatcttttgagagaggatcagagacctatagctaattaagatctaaattccagttaaggaagaaaaagaaatgcagttctaccttactgatccagtatcatccaggagtaagtttaatataagcttgattttgcagattaatgaaatgtatttcttcgaatattttaaagattcaaagaatctttaaaggaagaaaaaaataattcttccttcttttacccaaattttacccaaattgttgaaaatctttctataatatcctgacccaaatattgttacatctagtaagtgccaaaggaacacatgcaaatggtcaatgaatcgccttttccgttgtgaactgactcagcctcaactaaactgtccctgttccaggtgattcatacaccatgagtcattcattgttacgctgtatatagtaaggcagcaacatcctcaagtcttgttagagatatttgcccctagttaaatggctccagctatgcttttgttagttctttctcctttttgtggtttttatgtatcttccttgactgtgagactcaacctcttctccctaacctaaaataattactaaaggcaagaaataattactaaataattacttaagatatatggcaattatttttatttctatactactatttctatttctatttctatgtgaattaccactactactatttctatattaattacagatgagatttttatataaatgatcccagtggaattagaagtaatatctaggcaaaaaaaaatcataatactttaagagtaaatttgaggctgaacatggtggctcactcctgtaattttagcactttgggagactgcagcgggcagatcacttgagctcaagagttagagaccagcctgggcaacatagaaagacctcatctctacaaaaataataacagttagccaggcatgatggcacacacctgtagtcccagctactcaggaggctacagcaggaggattgctggagcctagggggtcaaggctgcagtgagcaatgattacaccactgcactccagcctgggcgacagagtgagaccctgtctcaaaaatatatatacatgtacatttaacaaatgcattttcccctaaggattaaaatgatcatgtaagtttacacaaattcatgctccattcgctgaatcatttgaagttcccagatgttgacatatcatttcattcttccatgactttgcacatggagctacctctatttgaaatgtgatgtctttccttctaaatttagcaaattctcattcatccgttgtgattactataactggggaacagagtcatagagaaaataaaaactattctctggtcattctgggtaacaggagatcctgctgttggtgtaaaacttttcagcatattctttctagactagaataaaagaatcttggccttattctggtgattagatggttaattgacttataaaatgagtttcctttaaattatgtaaaatgacagctggaataagaaatcagtagcttttgggggaaaaaagttacttcattagaattacaaaaacttaaaagcactcacagaaatgaagttaataaagtgcttctcaagaacactttatacatatgtgacctgcactcacattgcatttttgtatactgtctttgctctagggaagataatcataagatagttacaaaaatattaaagctatacgaactcagaacatgtaattgcatttttgcagtgactggtttttatttttttattttttatttttaaacagattcttgctctgttgccctggctggagtgcagtggcatcatctcagctcactgcaacctccacccgccgcattcaagccattctcctgcctcaccctcctgagtagctgggattataggcgtgtgccgccacacctggctaatttttgtttttttgagacggagtctcgctctgtcgccaggctggagtgcagtggtgggatctcagctcactgcaacctccgcctcccaggttcaaatgattctcctgcctcagcctcccgagtagctgggactacaggcgcatgccaccacacccagctaatttttgtatttttagtagagatggggtttcaccatgttggccaggaggttctcaatctcttgacctagtgatccgcctacctcggcctaccaaaatgctgggattacaggcgtgagccaccgcacccagcctaatgtttgtatttttagtagagatggggtttcgccatgttggacaagttggtctcggactcctgacctcaagtgatcctcccacctcggcctcccaaagtgctgggattacaggcgtgagccaccgtgcccagcccatgactggtttttctgaggcttattatgtagcttcctcttttcctggaacttgttaccagaaatgaaggcagcttcctaatattgataaggtagacatagcatttatatgttttcccaattgattaatgatgaaatctaaatgtgcgatctcacttatgcaggtgcgagtattcgtcaaccagttatatcagccaagtttggagcgagaagtcagtaaaaatccagatttgcaggccatccgaattgcttctgtgaaccccatcctagacccctggatatatatcctcctgagaaagacagtgctcagtaaagcaatagagaagatcaaatgcctcttctgccgcattggcgggtcccgcagggagcgctccggacagcactgctcagacagtcaaaggacatcttctgccatgtcaggccactctcgctccttcatctcccgggagctgaaggagatcagcagtacatctcagaccctcctgccagacctctcactgccagacctcagtgaaaatggccttggaggcaggaatttgcttccaggtgtgcctggcatgggcctggcccaggaagacaccacctcactgaggactttgcgaatatcagagacctcagactcttcacagggtcaggactcagagagtgtcttactggtggatgaggctggtgggagcggcagggctgggcctgcccctaaggggagctccctgcaagtcacatttcccagtgaaacactgaacttatcagaaaaatgtatataataggcaaggaaagaaatacagtactgtttctggacccttataaaatcctgtgcaatagacacatacatgtcacatttagctgtgctcagaagggctatcatcatcctacaactcacattagagaacatcctggcttttgagcacttttcaaacaatcaagttgactcacgtgggtcctgaggcctgcagcacgtcggatgctaccccactatgacagaggattgtggtcacaacttgatggctgcgaagacctaccctccgtttttctactagataggaggatggtagaagtttggctgctgtcataacatccagagctttgtcgtatttggcacacagcagaggcccagatattagaaaggctctattccaataaactatgaggactgccttatggatgatttaagtgtctcactaaagcatgaaatgtgaatttttattgttgtacatacgatttaaggtatttaaagtattttcttctctgtgagaaggtttattgttaatacaaggtataataaaattatcgcaacccctctccttccagtataaccagctgaagttgcagatgttagatatttttcataaacaagttcgagtcaaagttgaaaattcatagtaagattgatatctataaaatagatataaatttttaagagaaagaatttagtattatcaaagggataaagaaaaaaatactatttaagatgtgaaaattacagtccaaaatactgttctttccaggctatgtataaaatacatagtgaaaattgtttagtgatattacatttatttatccagaaaactgtgatttcaggagaacctaacatgctggtgaatattttcaactttttccctcactaattggtacttttaaaaacataacataaattttttgaagtctttaataaataacccataattgaagtgtataatataaaaaattttaaaaatctaagcagcttattgtttctctgaaagtgtgtgtagttttactttcctaaggaattaccaagaatatcctttaaaatttaaaaggatggcaagttgcatcagaaagctttattttgagatgtaaaaagattcccaaacgtggttacattagccattcatgtatgtcagaagtgcagaattggggcacttaatggtcaccttgtaacagttttgtgtaactcccagtgatgctgtacacatatttgaagggtctttctcaaagaaatattaagcatgttttgttgctcagtgtttttgtgaattgcttggttgtaattaaattctgagcctgatattgatatggttttaagaagcagttgtaccaagtgaaattattttggagattataataaatatatacattcaa

SEQ ID NO: 668 - DNA, 86342 bp, Homo sapiens
aaacgtttgcggaaggaatacaggacacactcgcgcggcagaatcgcgaaaagtccccggtgttctccgcgcagggagttccccgcgcagggagttcctagcgggccacgcgctctcgcctgaccacccgcgccgagctgcgggctgtcggggtacagacgcccgcgcgcgcaggtgcattcgctccaggtgcggccggctcggggcgggaacagctgcagccgaggcgggggcggggagggggtacagaggagaggcagaaaggagggaagaggaggaggaggaggagaagggaggagaaaggggaaaggaagaaagaaggagagcaggagggcgaggagcggggggagcggggaggagggcgcggggaggaggcagcggggaggagcgtgcagggaggaggcagccgcgctgggaggagtctgcacactttcagtgccagggcattgtgggaagcagccatggtctaagccgggcgcctcacctgtcagccgcaccggctccagcgctcgcctctcgccctcgcttctccagcgctccttgctcgcaaggcgggggaggcggcggcccagccacgatggtgagtgcgggggaaccgccggcccgggtaggcggtgggggcgctcgcgctccggggaggcacctggggcgtccgggccgggcgcgcggccgggtgggggtgcgggccgagtcccgcctggccacccgaaccgtgcgtccctgtggccccgctgccccagacggtgcggacgcgccaggatcgcttgcccgggattcctgcggcaacgcggcgccgcggcgccgcggctccattcattcattcgatccgccttagccgagtgcttagtctgtgccgggctcggtgctgggcgctggggatgtcgcgggggaccaggaggagcccctgttctccaggaagcttaccttccaggagggggatgcggagggagggacacgtccaatatacaagtaaaatgaagagaacttctaaagtaagaagcgctgtaaagtctcaaatacaaccgggtggagtggcaacttttgatttggcaaagcctcttcaaggacatgacattctagctgctggaggtcctggaggggcgctacaggtggattagagagagcaaagcggaggggagaaggccttgtttgtggcaggagaggtgggcttctgccaggtgaggcgggtttttataggccaaaataaggagtttggttttggttccaactgagtaggggaaacctcggggacgttttagcaagaaaactgaccttacccgttgtgcacttttgtttttttgagactgatctcgctctgtcgcccaggctgaagtgcagtggtgtggtctcggctctgcctcccgggttcaagcgattctcctgcctcagcctcccgagtaacggggattacaggcgtgtgccaccacacccagctaatttttgtatttttagtagagacggggtttcaccatgttggccaggctggtctcgaactcctgacctcaggtgatccgcctgcctcggcctcccaaagtgtagggattacaggggtgagccactgcacccggcatggtgtgcagtttggctgtggttggagaatggactggggtgtgtaagggcaggggatagggggtcaggttggaagctgaggccggccgcagccctgctgatgagagatctggtgacctgcacttgggtggaagcgatagctcaggctcctcttgctcttgcctgctgtttaggggcagccttttaagagtgtggtggtctgaacgtcactagtcccacttccccaagtgtgttaccacttcccaaatccgcagaagggaagtgacctgcaccctgtgggcccaccggaggcaggagtgggtgggccacgtgggctaagaaagttgatcaacaaagagagccggggagtgctgagcacctggccagcaagaccgcagttgctggtttctgttaaaggtttggctgcacacactagcggcatcatttttgtctgttgagggttccttgtaaatacagcgtgatgcaaaaacaatgctgtaaataatggagcaggtttcttggcttgctcaagtttcccaaggaacaaggtgacagatgcccagtccaccagtgtaatttgcctaacagaggctggaataaggccctgcgtttctgagtcatcaaaggctgcttttgtgctgaggaatgggccaaggtttggtctataaggaaaagctgctcctctggacaatacctgtggtggagttttattttttcttgctggtgtcatatgtgtgatgagttgatcagaaatgtgggaagtttctccagcttttctaccagtttttgctaaatgggaaacattattattatttttttttcttcgagacggaatcttgctctgtcacccaggctgaagtgcagtggcatgatcttggctcactgcaacctccatctcccgagttcaagcaattctcctgcctcagcctcctaagtagctgggattacaggcgcccgccaccacgcctagctaatttttgtatttttagtagagacggggttttgccatgttggccaggctggtctcaaactcctgacctcgtgatccacctgcatcggcctcccaaagtgctggcattacaggcatgagccaccgcacctggcggggaaacattaatgttattgggcatttgtgataagacaagcaggatgtcctgctctttatattcacgatctcattcaatccttgcaacaaacaattgaggttaaatctgttatgctcattgcattttagctactctgagctattctagcagtatggccttggacaattccttgacctctctgtctcagtttgcccatttgaaaaatggagataatatctcctaactcataaggcagaggttctgaaagtgtgacctgggtacccccagcagtccccaagacttttactggaggtctgcaaggtcaaaactattttcataataatactaagatattaattttcccatttcattctcattctcacaagactacagtgaagttttcttgtgtctacataagctgagatagtacaacagattgaacacagatgcagataggaaagtccaactgtctttgataagcccagacattaaggagatttgcaaaattgtaaaacagtgccatgcttttcactaattttttttttgctttggaaaaatattgttattggtcataaaaatgttatttatgtttaatgtgtaataggtttactattgttttttctttttatttatttatttttgagacagggtctctgtgtcgcccaagctgagtgcagtggtgtgatcacagctcacagcagcctcaacctcctaggctccagcaaccctcctacctcagcttcttgagtagctgggactgtaggcatgtcccaccatgcccagctatttatttatttatttattttgagacaaggcttgttctatcacccagagtagagtgcagtagcatgaacatggcttactgcagcctcaacccagtggactcaaggcatcctcctacctcagccttccatgtagctgggaccacaggtgtgtgccatcatgcccaggtaattttttgatttttgtataaatgaggtcttactttgttgcctaggctggtcttgaactcctgaactcatgtaatattcccaccttgtcctcccaaagtgctgagattataggcatgaacaattgggcccagtggaattttttactttttgtagaaatgaagcctacctatgttgcccaagtcgtattattttaaaatatgttaatatctattttttcattttaatttcaaatacaataaatatcagtggatataacccacataaacaaaaaggtctttgggattggcaggcggatcacctgaagtcaggaatttgagaccagcctgatcaacatggagaaacactgtctctactaaaaatacaaaattagctgggtgtggtggcgcatgcctataatcccagctacttgggaggctgaggcaggagaatcgcttgaacccgtgaggtggaggttgtggtgagccaagatcgtgccattgcactccagcctgggcaacaagaacaaaactccatctcaaataaataaataaataaataaataaataaataaataaataaaaagagtgtaaaggcatccaaaaagtttcataatcactgtcccggagtttaacaggtaccataagtgaatgcgtgtgaaggcgcttcaaacagctttgccattgtaaatgctcagtaaccatcacctctcctctgttattaccttcaagttgtaagaaagaattggcggccctcgctagtgcccagctgctctgagacctttgttgaggctcactgtgtaactccctgtctttcctgctgcttcattcctgacttttgctgacttttatgctaggaaactggtagatgcttactggcagatctaggcacctagtactttacacacagaaaatggttcttgattccatggtgccagtgaccctggtttctggcacagagatttcatatctggtgcatgttgggactgtgtttgtatctggatcacactgtttgaagcaactgtgtactccatctcaccttttagaaatctctaccttggaaaacagtgttagggctattgcacttcaggaatcccacgagctgagcccagtgtgtttaaaaaggcttatggggcagaatgtactgttgaatggttggcaatgaaggaggattatgttgtttatgtatgtatgtatgtatgtatgtatgtatgtatgtatgtattttgcctttaacaagatagctgtggggatgtatacagtgacatttgaaatgctttgggggtacttttaataaaagcacaagtggactttgatgtatgtagtccatgtgcttctgaaaagttgaggtgacacaaaaccacattgtgaacaaaacagtagagccacccattgaaagaaactcaaatgttgatccctttggaaacatgaataaccgtctttttgtgttgcaaattccgttctcataatgtatgttatttatgtaaagtaggatagatttatgctaaaaaaaaatcaaggattttttttgggtgtacgatttaaaatctgacttgagagaatttaccaaacagaactggaaagccatttcttattcagaagatatttaagtttgaaatagtaggagtacacccttctcctaaaaaaaaaaaaaaaaaagaaaaaagaaaaaaaattcctttgttcattttaatctcagggagttgttgagggtgagggtggaaaaaccgaactatgaacctgtaggtcctgccacgcccccttccccttctgtatcaattttatgttctgaagcttgaatgaattgtaataagcatgtaatgattttggcaatttaagttccagtttgagggtgaagcggtctattacactaatgagtgctttcctcctcggagacttggtctaggctgctggccagcagttagtgtaagatcgagggctttgggatcaggggagaaatgaccctttgtggtgttcagttgtcccaagagggctctcctccactggcccttcccacaggtctcccaaaaacaccagtgagacttgtatttactcctcaccaggattgttactaccgagtttctatcactcgttttgtttgtttgtttgtttgtggtgagtattgtcagctgctgataacttttgtgtggcattttgccaacaacagctgtaaggaagcagcacactgtgtatttgctgaacggtgttgtcaatgtctgcccttttgggtcccgtgaattatttcattttaagacataatgataaaattactcccctttccaacacacacacacacacacacacacacacacacacacacacacacacacagagagaaaactcctttaataatccccagaataagtcctttttttgatttttttttttttgagacggagtcttactctgtctcccaggctggagtgcagtggcacgatctctgctcactgcaagcgctgcctcccgggttcacgccattctcctgcctcagcctcctgagtagctgggactacaggctcccgccaccatgcccagctaatttttttgtatttttaatggagatggggtttcaccgtgttagccaggatggtcttgatctcctgacctcgtgatctgcccgcctcagcctcccaaagtgctgggattacaggcatgagccaccgtgcccggccaacagaacaagtacttcttgatgtcttcatgaattgtccttttgatattgttttgttgttacgatagccagtgtttctcccagagacctgaaacttcactgtggttctgtggttcatttcttccctggggcctgtctttttctctctcagagtctccctttctggtatacctagttttccccgatactttctctgtttaacctgaagtatccaggaaaactccctttaaaccatttgaagctcccccataatctatgacatgaaagaatgtacacaaatgtcagaggcaaatgctcctaaattctctcagtggcatatgaaactatccagccagcaccctgactaaggaaatgtatttcttgaccgggcacggtggctcacgcctgtaatcttaacactttgggaggccaaggtgtgtggattgcttgagtctggaagttcgagaccagcccaggcaacatggcgaaaccccatctctagaaaaaatacagaaagtattagctgggcgtggtagtgcacccatgtagtcccagctatttgagaggctgagatgagaggatcacctgagcccaggaagtcaaggctgcagtgagccatgattgtgccactgcactccagccttggtgacagagtgagatcctatctccaaaagagaaaggggccagggttggaggctcatgccagcactttgggaggctgaggagggaggattgcttgagcccaggagtttgagaccagtgagactcagtctctattaaaaagaaaaaaaaatgtatttcttgtatcgctgctagcaataaggtaaattaaaaatcttaacaatgaaaaggggatactgaaaatcattcaagttagaaatagaatgttatcgacaatcatgaggaaactggcctctgccaacatccctcttctaaaaactttcctacaggcatctctgggctctgaaattcctggctctcagtagcttctgaaactttagtctttcagtgcgatggggcatggacctagtacagtcagttaagaataagtgcacaagagattctgtatttaatgtccttgttggatcttctctaacaggattttctgggctggtaagaaatgattggtgtgggttgaagctcagtggacactgaaatgctacaggagacttccttccacactgggtatatcaaagatgaggaatgaaggcatggtttgcaaactggggtgcccataccttctgcgtactcatccttgtagacaggggttgtcaagggataaatttgactcatccctggagtattgttcagaatgataatttttttttttttttttttgagagagagtctcactctgtcacccaggctggagtgcagtggcgtaatctcggctcactgcaacctctgcctcccaggttcaagcaattctcctgcctcagtctcctgagtagctgggactacaggtgcatgccaacacgcccggctaatttttgtatttttggtagagatagggtttcactatgttggccaggctggtcttgaactcctgacctcaagtgatctgcctgcctcggcctcccaaagtgctaggattataggtgtgatccacagcgcccagccgagaaaatatttttgtattaacacactaatatatttggctcccggatgcaaaattcatacatacaaaccctaagacatatattgtttatggcttgcagcttaggctaccctcctggtctcatgaggccacctgcctttcctgctgttacagttatttggatagaaaatttggagagacaatttactaaagcaggggacagtgaactttctccgtaaaaggccagatagtaaatattttaggctttgtggaccctacagtctttcagtattcctcaactcttctgttgtagagtgaaagtgccacggacaagacacaaatggatggagctgtgtttttttgttttttttttgtttttttttgagatggagtctcactctgttgcccaggctggagcacagtggtgtgatctcagctcactgcaacctctgcctcctgggttcaagtgatactcctgcctcagtctcccaagtagctgggattacaggtgcccaccaccttacccagctaatttttaacttttttttgagatggagtttcattcttgttgcccaggctggagtgcaatggtgtgatcttggcttatcacaacctctgcttcctgggttcaagtgattctcctgcctcagcctcctgagagacaaggtttctccatgttggtcagactggtctcgaactcccgacctcaagtgatctcccccgccttggcctcccaagctaatttttgtatttttagtagagatagggttttgccacgttggccaggctagtcttgaactcctgacctcaggtgatcctcccgccttggtctcccaaagtgttgggattatagacatgagccactgtgcctggctggagctgtgttttaataaaactttatttacaacaacaggcagaaggccagatttggcctgtaagtcatggcttattgacccattttctagggcagcttccactaactcatcataggtatattggacaaataatttggatgcctgccccatgacaggcaggactggctacctaatttgcagtgcccagtgcaaaatgaaaatgcagggtcctggctgggtgcagtggctcatgcctgtaatcccagcactttgggaggccaaggctggtggatcaccacgtcaggagttcaagaccagcttggccaagatggtgaagccccatctgtactaaaaatacaaaaactagctgggtgcagtggcaggcgcctgtaatcccagctagtcgggaggctgagaatcgcttgaacccggagggtggaggttgcagtgagccgagatcgcgccactgcactccagcctgggtgacagagtgagactcagtctcaaaaaaataaaataaaaataaaatgtaggatccctttttcaaagtttaccaggaatttcaagatagtgacagcagagcattaaaccaagttttgggtccttctgaatgcagggcttctccatgtaatgaccctgtgtccacagaaaccagccatgggtctgggcctcagagagtgtgttgaacaagccagaagccacctgcttgcacggagctcacattcttggtgaggagttctctcaactctgtaaatattttggatcaatcacacaggagaagaatttgatattaagcattcttgagtcatctcagttttatttcctgggaagttgcaggtgggccatgtggggacccagatgtggcacatggggtagggggcagtgttggccttgacaaaaaattagctgggcatggtggtgcacgcctataaccccggttactcgggaggctgaggcaagagaatcgcttgagcctgggaggcagaggttgcagtgagccgagattgtgccactgcactccagcctgggcaacagagtgagagtctgtctcaaaaaaaaaaaaaaaaaaagagagagaggagaatgtggtgaggggaatgaccccagggccctgtgtgagcgctttgatcttagatacttggttcatcccatttcatgagatcacctgagcgtggaataagactgcttggttcaatcagcacagggcctggcacctggaacatatttcataaatgctagccagggctatttctttttcttttcttcttcttctttttttttttttttttttttttttttttttttttagatgaagtcttgctcttgtaccccaggctggagtgcaatgacacgatcttggctcactgcaacctctacctcctgggttcaagcaattctcctgcctcagcctcctgagtagctgagattataggcacctgctaccacacccagctaatttttgtattttaagtaggacgtgatttcaccatgttggccaggctggtcctgaactcctgacctcaggtgatcagcccgccttggcctcccaaagtgatgggattacagtgcccagcctagccagggctatttctaagagaaatgggaaaagctaatgaaaatactttagatttttttttttcctctgagaaatttatttaaactgatgaaataaacaaaatcggccgggcatagtggctcatgcctataatctcagcactttgggagggtgaggtgggtagatcacttgagatcaggagttcgagaccagccaggccaacatggtaaagccccgtttctactgaaaataaaaaaaaatgtagctgggtgtggtggcaaacccctgtaatcccagttacttcggaggttgaggcaggagaatagcttgaacctaggaggtggaggttgcagtgaactgagatcgtgccactgcactccaacctgggcgacaaagtgagactctatctcaaaacaaaacaaaattatggactgcagatattggggaggtaggggaaggtaagggttacagtaatatcacatttttttttaaagtatgattcagaagtctgtatagaactttttaattttgttgtataaacaagtacttaccttcagtttcattactaagaagtcatgtcttcagttctaagtccactacataagagagtcccgcctttcaaagtccattccgtctcacgataatctagtctacatcaaccatctttgcaaaaactatgggggaagggcaagacttgaatatacaataaggcagattggtctctcagatgaatgcttgaagtttgttagtggtaaactttgaaagggtatgatggatataccattgcccgcctcttacaaaattttgcttgtaactgaagtcatctttgtcaaggtataaaaggccctggggatagatttttaatgagtgttgagtaggaagaaaatgaaagttcttaataaccattaagtggtcattaccatgcagggtgttgagtttagcatagtaagcatagcctcttgagcaaagttcaaaaaaagcatctcaaaattagctgggcgtggtggtgctcgcctgtattcccagctacttgggagactgaggtggaaagattgcttgaatctggaaggcagaggttgcagtgagccgagattgtgcccctgaactccagcctggatgacagagtgagaccctgtcttaaaaaaacaaaaacaaaaaagcatctctatgaaatatgaatagagtcctaagttattaattttgttttgttttgtttctgagacggagtctctctctgtcacccaagctgaagtgcagtggtgcaatctctgctcactgcgacccctgcctcccgggttcaagcgattctcatgcctcagcctctcaattagctgggattacgggcgcacaccactatgctcagctaatttttgtatttttagtagagatggggtttcaccatgttggccaggctggtctcgaactcctgacctcaagtgatctgcccgccttggcctcccaaattgttgggattacaggcataagccaccatacctgccgcaagttattaatgttttattcaacttcagagtcgtactgaaatttcctggaatttctgccccctatttccagtctttttctccttggatgacttgaaacacaacacaggactagtctgattctcaaaggactccaggagaaattcaatcagcatatttactataggaaaaaattaaacaactgacaggtgttgtggatatattcaaagttgattactctgtcagggaaaaatgatgaatggaaaaataatactgtttcagggtatttctcacctgttcatctgtgtgttctttttgagacagagtcttgctctgccatccaggctggagtgcagtggcacaatctcggctcactgcaacctctggtcccaggttcaagtgatccccccaccttagcctcccaagtagctggggttacaggtgcccgccaccacacctgactaatttttgtcttttgagtagagatggggtttccccatgttggccaggctggtctcaaactcctgacctcaggtgatccacccacctcggcctcccaaagtgctgggatgacaggcctgagccaccatggccggcaatctttgtgttcttaactgcagtggttattattaataggaaaaaaaaccccacaaatataagatctgtttcttgattacaagatacttgtcatgtttttgggcaaaattttttacatgcatagcaaatctagagtggaaaattaagctctgaagtatgttgttaaattatataattgccacaggaattcagtggggaggagatgggagagacaggcctggggctgagcctggaagggtgggatgaccccgccttcagctcttcagaaaacagtgtgtgtatgagtgactggatgtgtgtgtgagagggaaggggtcagtgagtagaataaagaaagggaataattattaaggaaatagaagtgctggaggagaactgggtgaaggtcgaccatgaggaactgttttcttttcttttttttttgagacggagtctccctctgtcacccaggctggagtgcagtggcgcgatctcagctcactgcaagctccgcctcccgggttcacgccattctcctatctcagcctcaggagtagctgggactacaggcgcccgccaccacgcccggctaattttttgtatttttttttagtagagatggggtttcaccgtgttagccaggatggtctagatctcctgacctcgtgctccgcccgcctcagcctcccaaagtgctgtgattacaggcgtgagccaccgagcccggccgaggaactgttttcttattgacacttccatctccaccctttcttcccagctctgcccctccgggtaatcccactaacgaattatgtatccagtattattggagtgacatttctcacgtgtgaatttttcacataactaaaaaacaaacctaaaaaaaagttagagttaaaaaaatagtaataccttccttttaggccagttgcggtggcttacgcctgcaatcccagcactttgggaggccgtgacgggtggatcatttgatgtcaggagttgagaccagcctggccaaatggtgaaaccctatctctcctgaaaatatagaaattagctgcgcatgtggcaggcgcctgtaatcccagccactccggaggctgaggcaggagaatcacttggacctgggagggggaggttacaatgagccgagatagcgccactgcacttcagcctgggcgacagagcaagattctcaaaaaaaaaccccacctgccttttgcatttggagaaatgagtcaaaagtagcttgtggcttatccaaagtcaggcggtgcctcagccactcaaccgcatggcttaggggatgaccttaccttaccttccacacaaggtgtaatgctgttgaaattgcaggtgtatttagaagtctctgtgtatgtcttttgtctctgagtggattatctcatgtatcatttttggatatttttgtgtatctttaaaaaaccatctatagctgggcccagtagctcacatctataatccccgcactttgggaggctgaggcaggctgattgcatgagcccaaaagttcgaggccagcctgggcaatatggcaaaaccccatctttactaaaaaaaatacaaaagttagctgggtgtctgggtgtggtgatgcatgcctgtagtcccagctactcaggaggctcaggtgggaagatcaattgagccctggaaattgaggctgcagtgagccatgatcacaccactgcgctctagtgcaagatcccatttcaaaaaacaaacaaaaacaacgacaaaccgtctactatttccctctacacccctatatgtctgcccccaggctttcttcctctgccactttaatgtgtgctttgagaagggaagtttattttttaaatctgtttttaaaaactgacacataaaaattgtataaatttacaccgtacaacaagctgttttgatatgtatacacattgcaaaatggttaaatcaagctaattagaatatgtgttacctcacatatttgtaattgtgtgtgtgtgtgatgagaacacataaaatatactcttagtaattttcaagtatataatacattgtttttaactatagtcaccatgttgtaccatagagctcttgaatttactgctgttgtctaactgaaagtttgtatccttcaaccaatatctcctcaatttcttctctgtccccccagctcctggtaaccactattctactctctctctgcttctatgacttcatctttctttgatttcacatttaagtgtgatcatatggtactttttctgtgcttggcttgtctcacttaatataatgtctttcaggttcatccatgttctcacaaatgacagggttttctgctttctaaaggccaaatagtattccattgtgtatatataccacaatttctgtaaccatccactgacggacatttaggttgattctatagcttgggccattgtgaagagtgaggcaatgaacctgggattgcaggtatctcctccaaatgctgatttcatatcccttgggtatatactcagtagtgggattgctggatcatatgtgagttctatttttaatatttttggggggccttgatactgttttctataatagctgtactaatttacattcccaccaacagtgtaccaaggtctcttttctccaaccttgctaacacttattatctttcatctttttgatagtagcctttctaacaggtgtgaggtggtatttcactgtggctcttaatttgcatttccagatgattagtgatgctgagcatttttttccccatatactggttggccatctgtatatctttttttcaagaaatgtctatgtaggttctttgcccattttttttcagttgggttgtttttttgctattgagttgtttgagttccttatgtattttgtacattaaccccttactggatttatggattgtaaatattttctcccatttcataggttgtgtcttcactctgttggttgttttctctgctgtgcagaagctttttagtttgatgtaatagaggagtttattttattttattgtacttttatttttactttatttatttttttgagatggagttttgctcttattgcccaggctggagtgcaatggcgcgatctcggctcactgcaacctccgcctcccaggttaaagcgattctcctgcctcagcctcctgagtagctgggattacaggaatgcaccaccatgcccggctaattttgtatttttagtagagatgaggtttctccatgttggtaaggttggtctcaaactcctgacctcaggtgatccacccacctcagcctcccaaagtgctgggattacaggcattagccatcgtgcctggcctatttttaatttttttttttaagacaggatcttactgtgtcactcaggctggagtgcagtggagtgatcatggctcaccacagcctgcgctcaagcaatcctcttgtctcagcctcccgagtagctgggactacaggtcgtgacaccatgcccagctcattttttctattttttttgtagagacaaggtctcactatattgcccaggctggtcttgaactcctaggctcaagcagtcctccaatctcagcctcccaaagtgctgggattataggcgtgaaccactgtgcctggccaggagttgattttaatagcagcttgagacaatcaccattagaaaggcagaagagcatattgcttggaaggattgctggactggacgatgaggggacttcgtttctatactcagctgtgccgataactgcgacctcccgacaatatctagcttctctggggcttgtctttggttgtcaaatgagaacttgggcttgagatacaatcttgaaaactctttctggctctcagtctgttattggctacaagaaaataataatatgtctctatgaacataacgtacgttattttccaagtatgtcagaatcaaaagcaaggctggcctgatgctcagttgttaagcatatgtccttgtgttgctgttgcccaggagccaggctcatccaggtgtggctggaagatgggggttttcgtgtccatagctggctggaggggccaacagccatgcacatagggggcacgtggctgcattgctcacgaatcttgcattgctcacgaaatctctgtgtgtctagctgctatagtaagtgcagttttggcttcaatgagatcaagtggagaagcagcacagcactactattttgctttaggcatatatttattgaatacctaccagaattgggacattattaagagataaaaagttaacaaaactggctgggtgtggtggcttaagcctgtgatcccagcactttgggaggccgaggcaggtggatcatgaggtcaggagttcaagaccagcctggccaacatagtgaaactccatctctactaaaaatacaaaaaattagctgggtgtggtggcgggtgcctgtaatcccagctattcaggaggctaaggcaggaaaatcgcttgaatctgggaggtggaggttgcagtgagctgagatggtgctactgcacactccagcctgggcgacagtgtgagactctgccatagatagatagatagataaatagatagataaataaagttaacaaaactgattatgcttctgctccagggagggaaggcatccatacctagagcagcttggatgtcattctaaatagagggtttctctcaagagcatggaagatgaatgtatggttgggaggctcacggtgtatagggaagtatgtgttttgagagggccctgaaagtatgttagagacttgggttagtgagaagtgtatttcaggcatgatggggaaggaggagctggggcagtgagactggttccagcaaggtgtgtttcagggtttgcaaagcagattggtttggctgcccatgagaatgagtttgggaaacagacatatactcccaaaacgtcagcaatctagttcccgagaaaaagtggagtcatatggtggaggatgttgatttgcaaaggaaattttctccttatcatttgtctggagggcagtccaggaaggtctggcttgttttttttttttttttctcctagtttggaatcactgaatcatcatttcctaggtatatagaatatgaataaagtaataggtgctgcttgggacaaacattgaaacttaaattctcctttctgtgattttttttttggatgatagggatagtatgtacacatatagatgttactgatttagagtattaaagtgaagtttaaagttttatgttcattttcttatatataagatgagttaaacaggcacaccccgtgcctcagaaaaacttgaactcatctttgccttcgacattttgaaaaaaaatattctggcaataaatatttattgaacagctatatgtcagtcgatgcatattacattccaagccattaagtatatttaagaataaaacattttaaaacgtaatggacctaaatgcgaaaacttcaactctggtcccttatgtaaatcactgggaaaaagacctttatcttacatcaattgcaagataaatgtctttcagtctgagaaaaaaaaccttttaaaagtgagcttccttgaaataatagacttgtctgatttattagtaaaattgatatcaaagtgcctttaaatcacaatagaaaggaattctggagcaattagtttagcaaacattatgccaataaaatttgcattgttgcaaactcttttacacataaatcattttcagggtcaaaatattttaaaggccacacgaaatctagcaagtgttacattaagatttttttttttaacataactagcttttaaatcccatttatcctgaactcattttttataaccagtgaatataatagtattttatcagtaaaagttcaaaaagcagaaaatataaggtaactaactttgcaataatcactgtgtttatagcaaatgtttgtaacatgagtgcttctataatatactactaatttagaattatattctgtactataatcttgactatggaaactaagaatttaggaccttgagcaaaaatggccaaaaaggatgcaaaattctttttttggttaactgtgaaattagataatcacaaagataggactttaatttttttttttttttacacaaggcatcttgaagcagtatttttgtaacacccttgaaagatatataattaaatgtcaattttattgccaactgccagttatttatggactttatagtttatttctgtagctacacattgctaaaattgggttagatttctgcattttaaaagaacgaattaaaatatttggcaagtggaagaagtgagcaaacagagtgtgctttttctccaatgagtgatgtaaagaaaggttatttccagcaaaaggacctgaaagtatctgttgcattctccctcaaaaaagctttatgcagttcagctacttggcaggtatgattaaaaataaacaaaaagcgagtgtttgaaatcaaagatgttaaatctctctgcacatagctgattgctatgacaccaaaacagtccagggctgggcgtggttttggcactcactgtactactttcatgtagggagatggaagtcaccatgtagagaacaaatgccatatttatttcacatgcaccctcagtcacatcacattataagtgtagaaaaaggccctgaaaaaatatgtagtgggatttgagcatgaagactggctattaggtaattagccctacaattactttattggcaattaaaatagtatcaaattatttccccatgcctgaagcttgaatctataatcattaagtgatgtcatctttaaagcagccagtggtccttcaggatttctggtgtaagaacaactttgaaaatttggcctggtgcagtggctcatgcctgtaatcccagcactttgggaggccaaggtgggcggatcacttgaggtcaggagtttgagaccagcctggccaacatggtgagaccccgtctctactaagaaatacaaaaattatctgggtgtggtggcgcatgcctgtaatcccagctagtcaggaggctgaggcaggagaatagcttgaacccaggaggcggaggttgcaatgagttgagattgcaccactgcattcctgcctgggtgacagagcaagatgccatctcaaaaaaaaaagaaaatttgctaacgtttctgggtcttttcccaagaacattgcttataactgcaaaatttttcatatgcttccaggatgcctacagacactccttttccttccacattatcttggaaccttggacattttttttttttgagatggagtctcactctccctctgttgcccaggctggagtgcagtggctcgatctcggctcactgcaacctctgcctcctggactcaagcgattctcctgcctcagcctcccaagtagctgggactacaggtgcataccatgatgcccagcttatttttatatttttagtagagactgggttttgccatattgcccagcctgggctcaaactcttaagctcaagagatccacctactttggcctccaaaagtgctgtgattacaagagtgaatgaatgtgcccagctggacattttttatagaagtatagaatccaagctgcatttgatacctaccctgccacctatattttgataattctgggaaagtctttcaactgccaacaacttaatcttttttgtcttcaatatgacacattgcctagatttgtggattaaacaatataatgtatataaaagtgcccagcatcacacctgccatgcagtgggtcatttttattgatgaatgtaattgtcgtgtagaataccatgttcttattatttggtcatcatatttgtctttttttggaaaaaggtctcctgggaagttagatgatgatcagaaaatttcttgggagagcttagaatcagagtagtaagagttagtgggccaaatagtctctgatgttcttcagctcatagctgttgtgtctatctccattccagttaaataaatcaacagcggatactcagagaagccaaacagggcatctttccccagagatgtggtcccaaactcttccaaatagttttcttttctttttttttttttttttgagacggagtctgtctctgtcacctaggctggagtgcaatggtgcgatctcggctcactgcaacctccacctcccgggttcaagcaattctcctgcctcagcctcccgagtagttgggattacaggcatgtgccaccatgcctggctaattttgtatttttagtagagacggggtttctccatgttggtcaggcttgtctcgaactcccgacctcaggtgatccgcccaccttggcctcccaaagttctgggattataggcatgagctaccacacccagcccccaaattgttttctttttccaggactctaagcagaccattgctgttaacacatctttcttcaggcagaccctggagccaggttgacttttggttgtcatccagccatgtcttactaacattacgttgtggtgatgttgactggaccacctctcatacggaggcctaattttattgcctacaggctattgtattttattgagacagagttgtctcgctttgttgtcgaggctggagtgcagtggcactagctcggctcactgcaacctccgtctcccaggttcaagtgattctcctgcctcagcctcctgcgtagctgggattacaggtatgcatcaccacacctagctaatgtttgtatttttagtaaagacagggtttcaatatggctaggctggtttcgaactcctgacctcaggtgatccactcgccttggcctcccaaagtgctgggattacaggaatgagccactgcacctagactgggctattttattttaattggcaagttatgggggattgtctgtcatctttataagcagtctgtagtatgttgactctggtgttatggatctatttaacatagagtcaaaagcctcatattggtaaacagcagtcccactgacactgcacatatgtgaaaacggcatttgattgcagggaggatggaggcatggatgctgggacaacctcaggctttagtgtcagactgatcttattagaatctctccctgccacttactagcctttgggctcagtcattgacataggtattatgggaccctatccacggtctcctgtgaatacttgctatctgttccttgctgttggttctcgtgattgttaaggtttgtggctactcacatttcatgcttctcttagcaaagctacgtgttcatggcccggaaacctggctttgcttaaaaagaccgtttgatctcttcgtttgtttttggcaagtgaccagttgaagtagttttttttttttcagaagcatgggggaggaaggaaggaataattgcccactatctgtcatagcggtttatcatcaaataaattatattgcattcctcttttaaccaattaacccaactggtgataaagtagtacggtaagtcctcacttaacactgttgatatgttcttagaaactgtgtctttaagcaaaatgacacgctgtatgcccgtggaacttgaagaaaggaacttgactttctatttttaagaggtcttcctttagtgtccaggctggagcgcagtggcatgatcacggctcactgcagcctcagcctcccaggctcaaatgatcctcccacttcagcctcctgagtagctgggaccacaggcatatgccaccatacccagataatttttgtattttttgtacagatgtggtttcactgtgttgcccaggctggtctcgaactcctgggctcaagctgtcttcctcccttagcctcccgtagtgctagtattagagacctgagccactgcctgtccctgactcttgtttctatcaattagcctgtggcaaaattagttttgttacatagtatgttgttttgcttaaagttgcagttttcaagaatctattgctgaagttaagtgagggcttaaaaactgtattatattctgtggaatacagagtactgtatgcataagaacagtttatatgcttggattatttgctgtggaattaaaacacttttatatttattaggaaactaagactgattaccttagtttttcagggttcacaagtttggttggctttacaaatctatgcatgcattcattttaggttggttagtaccgcagtcctcaggaatttgaaggtggctcgtaaacttgggagggaaagtgatttttgttttgagagttgggtcagaccctaaagaatcattacttagggctgactggaattaattaacctgatctttctgctttccttggattgcatccaaaatcaaccctggttggtttctgccagcattagctccttcaaagtctgcctctcaaagatgtgtcatagactacagcccatgactaaaatttaccaagcaaggagaactgatgactgtgttcttggtttgatgccaaaaagtactcaaagatttttccaacatggtttatggcacattgacatttattttcagaatcagtggtattgttttgctaactctgtcaccctattggtaaaatcaatcgaaagtctaagtcaaatactaaatcacatttatttaaaataaagattggggccaggtgcactggctcatgcctataatcccagcactttgggaggccaaggcaggaaaattgcttgagcccaggagttcaagaccagcctggcaacatagtgagacacccctttctacagataaaagaattagcccggagtgatagtgtgtacctgtggtcccagctacttgggaggctaaggcaggaggatctcctgagcccaggaggttgaggctgcagtgagctgtgatcgtgccattgtacaccagcctgggtgacagagtaagaccctgtttcaaattaaagaaaaataaataaacattgagtcttagttcttattgtcagcctgaaatctcctgtatagtcttagaacgcctgtcatattttttagtttaatgtgcaaacctcattttgattgaagtgtaactaagtagtttctatatttgaaatgagaatgttttgtaaatagtggatgttcatgtgaccagtgagaatttcgtttgtgaagtttgttagggtctttggaaaactagccccatgttcaaatccctgattactttgtcctggagggccaggaatggtctaaatgttacctttcaagtacatttgatttcagaattaggtgatgcctgagaagcagaaaggccaaccccttgtcatttttgccgctttatttaacttcttgtagtggacatggtctttgctgaggctgccggctatgaactagatggggcagaacagaacgtgaaaggcagagaacagccacgtcccattgttaacacagaaaacaaagaacagagtgtgagatacctagtgatgccagccgtatccactgaggcctcttcccactgttttttctcttacttgcttcttgaagtctttctcccagagtcacagaaggttagggccactcagggttggaaagctcctgccacttccattttcggaagccactggtatgttaaaaaatgaaggtagtgtggaaacaaggttataaatattggggcacatctgacgctagttggtggcacattttaaaggcttgtgcttaacaagttaatgaatgtgtcatttataaaatactgggtactttcattttgccttctgcagaatgttttaaggatttgtaaagatgcatgggtccactcactgtgcatgccaggagcttaagcttggaataggacatgtgcttattgatgtataaaggacgtctctgtcttttggcctcattggggtttctctgtgacagcctaaataaggccatgattctaagcatgggaccctttgtggatgtgagggctgcccctcccttcttacctctttcactcaaggaactaccttctattctgaggatgatttgtttgtctttgctatcccatacactggtgttcaacttttagaaaatgtcttatgaagggatagaggggctgtgtcagagtgtatttagctcagctatgttctccaaacagggctatagttggtaaaaatattcagagttggggatctgctgccagcctgcctggcttctaagcccagttctaccacttatagctgtgtgaccttgggcaaattacttaatctctctgatcctcagttaccacattttaaaagatggaaaataattgttatcctcctcatgtgtttgttgtggggattaaatgaggtaaaatacttagcataagacgtgacatgtagtaaatgatattccaaataatgtacaaaagcagtaaattaatattatttgtcacggagaggctgaacaccatctccaggcgtaaatttcaaaaggcacgttttgaaagtcataggaaaattgctcactaaggtttcaaaatggcatatgtgggccaggcatggtggctcactcctgtactcccagcactttgggaggctgagtggggtagatcacttgaggttaggagtttgagaccagcctggccaacatggcaaaaacttttctctactgaaaatacaaaaatttttattgtaaaatacaaaagctgggcgtggtggcacacggctataatcctagctacttgggaggctgaggcaggagaatcactggagtctgggaggtggaagctgtagtgagctgagatcatgccacctcactccagcctgggcgacagaacaggactctatctcaaattaaaaaaaaaacaaaaaaccccacacaaaatggcaacatgaaacaataatagaagaaaagtgatttttgattgtttttattgacaattttgagttccttactcatttttgtaacttcactgcacattcctgatttactccttctctctccctctactactgaacaggaagatgtggcactcaaaggcagtggtttttcaggccaggctttatggaatccctgaataccttccaaattctcttaaatcagagtagctcaaattttacattttattcttcataattaagttttatttttcagaactaaagtttccgtgtttagaaaaaaatccccaaaacaaaaaagccacttctctaagagcaaggagttggaaagggaaccaaaatttactgctctgacgttttataaaggctcacatgctggctgggcacggtggctcacacctgtaatcccagcactttgggaggccaatgcgggctgatcacctgaagtcaggagttcaagaccagcctggctaacatggcaaaaccccatctctactaaaaatacaaaaattagccaggcgtggtggcgcgtgcctataatcccagctactcgggaggctgagacaggaaaatcacttgaaccgaggaggtggaggttgcagtgagctgagattgcaccactgcactccagcctggaccatggagtaagactccatctcaaaacaaaacaaaaacaaaaaacaaacaaacaaaaaggcttacatgcctgcatgcataaatggaagaagatctgggtcaataaatgtgatatttgtgttattctataatatttggcttctgagaagtatgtaaaacaaatgctttgtgactactgacctgagaatccctctctggattccaatattttgaagaatatatggttatcattgccttgtggataaaggcatagcgtcagatagttaaagttgaaccttgggaatcatctcacgttaatctccctagagatgctggtcaacttacataaacatgtagaactgattcttggcaaaatctgggcttctgaccacagtttatgccactgtgccagattgtttcctatggccattattttatcagctcaatagcaaacaggcagagaataagcaggccttaagacaattataggatacctaaaacctaccaaatcacatattctgttttctacagtgtgtgtccaagagtccccaagacataaatacaactcccaagtctcaaatagctgttgaatcagaatgcccccagcatcaatagttgtattagatggaaatgttaaaaatggggcccaaaacaacctgatgaaaaaatgggcaaagggcttaatagatatttctttttttctttttttttttttgaaatggagtctcactgtgtcacccaggctggagtgcagtggcatgatctctgctcacttcaacctccacccaccgggttcaagcgattctcctgcctcagcctcctgagtagctgggatgacaggtgctcaccaccacacccaactaattttttgtatttttagtagagaaggggttttgccatgttggccaggctggtcttgaactcctgaactcaggtgatctgcccacctcagcctccaaaagtgttgggattacaggcatgagccaccgtgcctggccagatatttcactaaaaatacaaaaaattagccaggtgtagtggtgggcgcctgtaatctcaggtacttgggaggctgaggcaggagaatcgcttgaacccagcgggcagaggttgcagtgagccaagataatgccactgcactccagcctgggcaacagagcaagactctgtctcaagaaaaaaaaaaaggtgaagatggtaaatttctcagacttcaccactctacagttcattcatgtaaccaaaaccacttgtaattcaaaagctattgaaataaaaaaaatgggaaatttcatgttatgtatattttatcacaaaaaatttttaaaaatttgaaaattaaaaaaaggagccaaaatttaaaccataataaaaagatgatgcacttcttaaaagaatgttacagtaaatgagtctgtaagagaggaatcttttaataccataatgatttattataatataaataataactacctactttattaggagttttccattcatcacaacgtatttgttgaacattttctgcatagtattttttttttgaagtgggacagcacatctttgcatttaggtatgtagactttttttgtgttgtttctagaaaggaaatagtactgcttccctgggccaggtgcaaactgaagagtaatatatttagaaaattagattacaaggctgggcactgaggctcacgcctgtaatctcagcactttgggaggacaaggtgggtggattgcttgagttcaggagtttgagaccagcctgggcaacatggcaaaaccctgtctctacaaaaaatataaacattagcttggtgtggtggcgcatgcctgtagtcccagctacttgggaggctgaggtgggaggctcgagcccaggaggttgaggctatagtgagtggtgattgtgccactgcactccagcctaggtgatagatggagaccctgtctcaaaaaaagaaaaagaaaattacaaaagagagaggggtgggtgtgggatcaggtgtctttttattttcccctgtcatatattaagccacttagtctaaattttcactgggtcagccgtgttttgcttttgtcagaagacaactgtgtttgaggtcaggatccccagattcttgtcctgaacagtttaataagccacttaactttgagtagaggcttctccccataactgtgagggacaaacatcattgccccatggagctcatattgtagagtgtagaataatggcaatacataaaaagtaaaataggccgggcacggtggctcaacctggaatcccagcactttgggaggccgaggcgggtggatcacgaggtcaggagtttgagaccagcctcaccaatatggtgaaaccctgtctctgctaaaaatacaaaaattagctgggcgtggtggcgtgtgtctgtattcccagctgctcaggaggctgaggcaggagaatcgcttgaacctgggaggcagaggttacagtgaactgagatcgcgccactgcattccagcctgggcgacagagcaagactctatctcaaaaaaaaaaaaaataaataaaggtgaaacggtgcattttatatagggtggtcagggtaggccttactaagtaagaaggagtttttgtttttgtttttgttttgaaacggagtctcactctgtcccccaggctggagtgcagtggcgcgatctcgactcactgcaacctccacttcccgggttcaagcaattctctgcctcagcctcccgagtagctgggattacaggcacctgccaccatgcccggctaacttttgtatttttagtagagacggggtttcaccatattggtcaggctggtcgcgaactcctgacctcaagtgatctgcccgccttggcctcccgaagtgctgggattataggtgtgagccaccatgcccagccagaagtggggttttgaacagattcaatgggggtaagggaggggcccatgagatatctgggggaagtgttctgagcagaaggcatagctggtgcaaagaccctgtggtccagtgagcgaagggaagagtagatgatttcagaggtcgtgagggggcatgttgagtatggccttgcaggccatggtgaggatttggctctttcctggagagaagttttgtgcaggggagtgacctgctctgaccaaagacaaatctaactattatattaataacagattgtaagggagcaattgttgaagaaattgttataatgttcttaatgcggtctcctcaaacttccccagccagtccatttttatttattttttttagacggggtctccctgtgtcatccaggctgtagtggcgtggtacaaacacagctcactgcagcctcaacctcctgggttcaagtgatcctcctgcctcagcctcccagtagctgggaccacaggcatgttcctccacacccagctaattctgtggagatggggtttcgccatgttgcccaggctggtcttgaactcctgggctcaagcgatccacctgcctcagcttctcaaattgctggaattacaggcgtgagcttctgtgcccagccaagcctattaaattttattgaaaaacaaagtattgagtactctgaaggaaactgagtatttataaggaaatttagttgccagattgttttctagtgcattagtctagtgtgttctagtcaatatgctacagagaatcaaaaattagaggtctgtttaggtctgcctaatgcaaagatgggtcatttaaaattaggaatgatacattctgcaactttctaacataaaagtgattggaaagagtcctttcttctgcagtgtttcaggtaatttatggattgaccaaaaaaataccatccccaccctaacatgtagcattggattcaatccccattacttagcctagagttctaagcctgtcagaagggaggggccctcgcagaggagtggggcagttctctgcagcgcagcttctctgggcctgccgagttaatgttgcctcatgtctgccaatgatgttgttgagcaggatagggttctcgttgaaccttgaagctcagtgctgaccatatcacctccttctgctctggggccttacttcaccatttaggaagaacttataccagctctgttcactgtttgtataaatccatttttgtactgctataaagaaatacctgacagcctggccaacatggtgaaatcttgtctctacaaaaaatacaaaaattagctgggcgtggtgatctgtgcctggagtcccagctactgaggaggctgaggtgggaggatcacttgaatccgggaggtggaggttgcagtgagccaagatcgcaccactgcatgatcacacctctgtcactgcctgggtgacagagtgagaccttgtctccaaaaaaaaaaaaaaaaaaaaaaaaagaaaagaaatgcctgagactaggtaattcataaaaaaaaaaagaggctcaattggctcatagttctgcaggctatacaggaagcatgctcgacttctagggaggtctcaggaaacttaaaatcatgataaggtgaatggagagccagacatcttatgtgggggagcaggaacaagaggggagaggttccacacacttttaaaacaaccagatctcgtgataacttcctcacttactatcgcaagaacagcaccagaaggatgatgctaactcatttatgagaattcagcccccatgattcagtcacctcctaccaggccacctctgacactggggatttcagttgaacatgagatttgggtggggacacagatccaaaccttatcactctgattaaaagaatgcttgcaaatactgggctctttctcaacccaaacccagtatcaacaaagccctattttattgagtggagtgtgttgaggtgatgtccctgaataatatctatttctagctgtccagaattccagaaagcccagttcttcccttcctgtattggagtagctactgtattttgtatttttctctctgtctctctcttttttgagacagggtcttactctgtcacccaggctggagtgcagtagcatgatcatggctgactgcaacctctatctcccaggctcaagcgatcttcctgcctcagcctcctgagtagctgggactacaggtgtgcaccaccatgcctgtctaaatttttgtatttttaatagagatggggtttcgccatgttgcccaggttgatctcaaactcctaggctcaagcaatcctcccaccttggcctcccaaagggtggaattacagaggtgagccattgtgcccagcctattttgtatttctctagcaatctttaattaaattttaaaaaattatgacagtaatgcataattattgtagaaaatttagaaaaaaaacagaaatgtagaaaaaaccacctgaaattatgctctgggagagccattgcaatgttgtttattctattaattttcttcttaagatgttataaagataaacatgaacaaggctgaaataattaggacctcaaaaagaaagtttatgatctcactttctcacacacacacacacaggtatatgtttttatctataagaatgtatacatattctaaatattgaaagtataaaggtaacttctgactgtaagaaaataaaaggacaatctaaattatgtcatatacagctaaaatgacataaaaataatcctttgttggccaggtgcggtggctcatgcctgtaatcccagcactttgggaggctgaggtgggcagatcacgaggtcaggagatcgagaccatcctggctaacatggtgaaaccctgtctctactaaaaatatgaaaaaattagccgggcgtggtggcgagcgcctgtagtcccacctactcgagaggttgaggcaggagaatggtgtgaacccgggaggcggagcttgcagtgagctgagatcccaccactgcactccagcctgggtgacagagtgggactccatctcaaaaaaaaaaaaaaaaaaaaaaaattcctttgtttatataaaaaagtgaaatgtgaccattcctttcacatggcatgcatttgcatttcctgacgtgattaccaggaggtgttatttgggcttggtgctttcaacagtgaaaacgtggtcatctactgcactggaacttgtctagtttctttttgacttgacaaggctgcctgccagagaggtatgcagtttttcttgtgtttgacccaagtttggcgttatatttatttttctagaagttgagagtctgatgttctttttagttctctttctctttgtaatttggtaaaacgttttcttagtggagtgccaactcctgtgacatttttgcttctgcagttggccaattagtgttaggaatggaggtttctggtatactcagcctagtgaaggcacagaacatattcaaatttaacctcagaataataattatttgtaaaagttctgagaaaattataattatgtataatacatgggtaaaaaagaataaagcaaaaggaaaaaataaccaaactcactgaaacttcaaagcaaagcagtttgaggatcaacctttaagaaatgccagctatttcaaaacacgttaagacgtataagaagttagacatagttctgaactataataaggctttagcacttatttgttaaagtaaattagaatggtgttggataaatatataaagtacctggtggatgatttagcagaataaattttgaggctaaattttatcttgacatcagaagtgtagcattgcatgttataattgaaaggcaggaaacataatcttcagaagtattttgggaaattgtacataacaattttttttttgagatggagtttcgcttctgtcaccaggctggagtgtaatggtgcgatcttggctcactgcaacccctgcctccctgtttcaagcgattctcctgcctctggctcccgagtagccaggattacaggtgcccgctaccatgcccagctaatttttgtttctttttttagtagagatggagtttcatcatgttggccaggctgctctcaaactcctgacctcaggtgatccacccacttcagcccctcaaagtgctcggattagaggcgtgagcctcggcatctggcccataacatgctaaagctgcagtggtcactatttcattcttcctaagcccgctgatgagttttttaaggcttctgcctaatgctgtctttttctttgctgtgctattctgaggcaacttcatttctgctgttgtttctctaataaatattttcttacaggttattttcatttgactcacggttgtatgtgtgtaagttttaagcctaaatcatttttattgttagtttaaggtgtttttcaaccaactagaaccagatctgccaattccctgtaacactgctgcaaaattcagtcttttcctaaatgtagatatttgaactggacgcccaaacataatttgcagattttaccattaatatccttactaaaaacactctcctgcctttcatttgatctagaagattctagtaatttctagaaacctcttttttttttttttgaaacagtctctgtcactcaggctggagtgcagtggcatgaacatggctcactgcaacctccacgccaccataacctctgcctcctaaaatcaagccatcctcctgccttagactcctgagtagctgagactataggcatgtgccaccatgcctggcctaatttatttaaaaaagtttttttgtagatatagagtctcactatattgcccaggttggtcttgaactcctgggttaaaatgatcctcccacctcagcctcccaaggtgctgggattacaggcatgagccaccatactgggctgatcctcatcttttctatcttcctgtcattataatcaatgacctggaaaactagaagaaaggaaattctggcattggcaaagcaagtgtgcttacttgagggtgcattgtgaaattaattagtgggtacatccccaggttggcagcaaagatctgtagctgctactttggagggtgtgggatctgtgctcagccactgcctggctggtggcttctgtcttgctggagccaggggtaggacctaaatttaagagcacgaaactagccatcaattgggaggttcacatgtctagctttacctgactctcattcacactcatttttttctttggaaaaggagcattgttcagcctgtgaaattagagatgcagggtagggtggattgtataattcaacattctacttaagtttgaataaagtcatccttgcactttacatttgtgctgtccacttcacctttcaaaggtcaggaaaattgcactcattattaagtaccttttggaattgatactctcatctattttttttttttttttttgagacggagtctcgctctgtcacccaggctggagtgcagtggcgcgatctcggctcactgcaagctctgcctcccaggttcacaccattctcctgcctcagcctcccgagtagctgggaccacaggctcccgccaccactcccggctaattttttctattttttagtagagactgggtttcatggtgttagtcaggatggtctagatctcctgacttcatgattcgcccacctcagcctcccaagatacttccatctttatagttcctctgccttgttttagtgacttcaaatttcctacattattttctaaactcaggtgtacaattttcatcacaaaggcattacatgaccagccatcctgggacttttaagaacaattttcgttgagtacatcacctttaccaccatcctaagtgccatgctgttaggaaaaaaccaatgagttgttgcaagaagcaaaaagcaattacatatggaattttgagcagtaacatttagtaacactaaaattgtgccatgaaattgatagcattttgcataccattttagctcctcttgactcatcttgcatataagttaaaaaattaattggctgtatttaagtttgaataaagctttaactttctgaaagagtgaatttataagaaaatttatgacctgcttgaatatggaagatcttggagctggggtggattgccttcatgaagtagaagtaatttacaagaagaaaaacaacacttcttactcagttgttggcagatatatttatgtttgtttacatctgataacatcataaaaatttaaacttggctttcaacagggttcaagcagtcataggaaaaggttggtctgtactatcaaccatactgaaattttcattgctagaaatgttcagattttaacacaattaagttaattgtagtaatggaaaaacaatcttactttggttctaccatatattgatttatgtagcccaggatatagatttattgcagtttcactacagaaaatggttggttgttcaaaaaatattcccagattatttagtttccagaaagttacattttttttgagaactgtgaaccatggggtagatcaaaactccagagaaaatgccccttcctgaaaccactgatgagactggtaacaatttatttcacactgtgatccaacatgtttcagagtaaatgaaagtgaagtacactattaagagttgggctttggtgcgtttgggatttgtgcggtgatttgttaaagttgtttaagagctcttggccaggagtggtggctcacacctgtaatcacagcactttgggaggctgaggtggccggatcacctgaggtcaggagttcgagaccagcctggccaacatggtgaaaccctgcctctactaaaaatacaaaaaaattagctgggtatgctggcaggtgcctataatcccagctactcgggaggttgaggcaggagaattgcttgaaccagggaggtggatgctgcagtgagccaagatcacaccactgcactccagcctgggcaaaacagtgagactctgtctccaaaaaaaaaaaataaaataaaactggatgctttcttaataaggaagaaagcccagcagatagtgactgtaccttcctcccctccttccttaccatcctcccatctcatttctcttagaaacagggatttccctgccaatacaaggtctgtttagttatcttaaaatctcaaaggaagtaatggctcctcctctcaataacgttccagaccctcagtagagatatacaaacaatcttttctaagttcctcatcactctctaggaagagataagagcccacgtttgatcaagctaaactagttagatggcctcagatatcttttgcaaaatgttgacagttcaaaaactttacttagagctttttctacctattttattgtcacttctgtgataaatgtaatactagtgacacagaatgactcagtactagtgtcattattgtcgtcagttgaatttttatttcttcttagtctctgtaagcctaggccttttggcctctctgcttgtttttatggtggtcacagaaaccgttagtattagatggggcagagggagctttaagtgttactctctcatgggccgggtgcagtggctcacgcctgtaatcccagcactttgggaggccgaggcgggcagaccacttggagtcaggagttcgagaccagcctggccaacatggtgaaaccccactctactgaaaatacaaaaattagccaggcttgttggtgggtgcctgtaatcccagctacacgggaggctgaggcacgagaattgcttgatcccagcaggtggagattgcagcgccactgcactccagcctggacaatagagtgaggcactgtctcaaaaaaagaaaaaagagagctaccttctcattatatgggtggttcaatatcatagtgactttaaaagtgggcaaggccagtctaactggtgccagcgtatatctctttgctttctgctcaaggaggcaatgttgcattgctgttaagagaatgggctctggaatcaaagcccagctctgaaaccttctagctcgtcgatctggaacaaggtacttaacttttttaagccctagagtccttatcaagtgggaataataatagtatctacttctcatggttatgaggaagattaaatgaagtactgtgtgtaatgtgcttcttccatggtgtctgacgcatgccctacatatgtcaaccatcgactgttatacataggtctctggtattagcaaaagacttctctggttataattatttgcataactggaaaaaatgaacagtaggggttttagctttggtggatgagaaaaagtgtcagatgctaagtgcaaatagccttgggctgggaatgtggagatcatcttaattctgcctcaaactgtaccactgaaggtataatcaccaggtctctgggccttgatttcttcagttttctttcttccctatttgtatacttttatttccctttcttgtcctattgcattagctaggactagtatgatattgaaaagcagtaatgagagagttcatccctgccttgttcctgacctgaaagggaaagcttctagtatatcatcattaagtataatgttaattgtagttttttgtaaatgttctttatcaagttgggggcattcctctctcttcctagtttgctaagaagttttatcatgaattgatgttcagttttctcaaatgctttttctgtatctgttgatataatcatgtgatttttcttttttagcctgttggtgtgataaattatattaattgattttttttttaaagagacagggtcttgctctgtcaccagactgaagtgcagtggcctgatcatagctcattgcagccttgaactcaggcttaagtgaccctcccacctcagcctcctgagtatgtagtactacaagtgtgcgtcaccatgcctggctatttatttattttctgtaaggatgggttctcgatatgttgctcaggctggtctcaaactcctgacctcaagtgatccttttgcctcagcctcctgaagctctgggattacagatatgagccatcatacttggactacattgattgattttttttcttttttttttttttttagacgcaatctcgctttgttgcccaggctggagtgcagtggtacgatctcagctcactgcagcctccgcctcctgggttgaagcaattcatttgtctcagcatcccgagtagctgggattagaggtgtgtgccaccatgcctggctaattttcgtatttatagtagagatggggttttgccacattgatcaggctggtctcgaactcctgacctcaagtgatccgccctccttgccccacttcgggaagtgctgggattacaggtgtgagccaccacacctggccatacattaattgatttttgaatgctgatctggctttgcattctgggataaatcccacttgcttgtagtgtgtaattctatttatatattattggatttgaattgctaatattttgttgaagatttttttcacctaggttcatgagaagatttcttcagttttaggatgagaagtgttgtacctaatcagctttattgtcctttctaatgctagaattttgtgagtctaggaatgagttattatttcattttaaatacctcactgtggtagctactaaataaatatttgctaagttgaatggaatctgctgactttatctttggaatgtagatgatctggttttataatatggaattgtaatgagatagaaaacaacagtgatgatttttgagattaaaaataaaaggcataaaattcaaagccagagatatatggtggattgctttgctaagctgccataaggaagtaccatgagctgggtggcctaaacactgacatttatcatctcatagttctggaggctagaagcctggcaagaatggtttcttctaggaactctcaagagagaatgggttgcttgcctttctcctggcttgcggtggtttaagggcagtctttggtgcacctttgcttcagttgcattaccccaatctctgccttcaccttcatgtggtgtttgtgtgtgtgtgtgtgtgtgtgtgtgtgtgtgtgtgtgtgtgtctaggcccgaatttcccttttatatgagtccaccagtgacaatgaactaggggcccaccctactctagtatgacctcatcttaacaagttacatctgcaatgtctatttcttatctccctctctctctttttattttgaaatggagtttcactcttgttgcccaggctggagtgcagtggcgcaatctcgctccatgcaacctccgcctcctgggttcaagtgattctcctgtctcagcctcctgagtaggtgagattacaggtaccagctaccacacccagctaatttttgtatttttagtagagatggggctgcaccacgttggccaggctggtctcaaactccggacctcaggtgatctgcccaccttggcctcccaaagtgctaggattataggcatgagccactgcacccagctgcaacatctatgtccaaataaagttgaattctgaagtactggggggttaggactgtaacatatgaatttaggggacacaattcaattcatagcaagtggattattctgtcctttcagtgtaactacctgtctatccttccttccttcttttcttccattaaattttactgtgccatacaggtggatggataacagacagacaattttatgaggaattgtctttatagagagaatgttcacatttcacgtaagtggctacttaataattcatagcagttaaccttttattctgcaggttacttgtagctggcatggacttaatacatgtcaacagtttgtttctgtgttattccatttttttccccttattgttgttcctcttatcctgttcttcctagctctgttctgccccctcagatccacttaatttgcctttccctgaacatttcacagtagctagttctgccaccagatggtgtgcaaggattaggaaaataattgaaatatgttggccagtgtcttttcaacattttatttcaggaaaaaggctgacatgacaggcctacctgagattctgagattgacagcaggccaaaaatgacattctgagattgtggagatttaaattttttatgtaaattttcctctcatttatcatggaaacctgagctggcaatcttgaggggaaaaaaaacctatgacatttgatgtatatatgtaaatgagagactttgacctcagaatagatttgacagtaatattcggctgagatatagaagcgaggttcttgggtcagaggaccacttcctcaaataggtagtctcagaagccacagaaaggagaaatctcttgagccaagcaaagctgtagagtgttagtgcgatgagggactccagctatcatctgattcagcagcctcaaatgaggcctgcagccaaacagagcttgcagaccacatccacacacagtgtgctttgtttagcttgaacaaggttttattttattttattttatttatttttttgagacggagttttgctctttggcccaggctggagtgaagaggtacgatctcagctcactgcaacccctgccccccgggttcaagtgattcttctgcctcagcctcccaggtagttgagattgtaggcacctgcctataaccatggccggctaatttttgtatttttagtagaaacggggttgtgccatgttggccaggctggtctcgaactcctgatctcaggtgacccacctgcctcagcctcccaaagtgctgggattacaggcgtgagctgtgtcagcctgaacaaggttttattattattaattgacaacgttaagacaactccaatatttcacctaatcatccagatttcaggcttttgggaaaaaaatctgaagacttagcaacagtgattgacatgtttttcttggccacacttgactatggcagagctgtggctgcggctttcgttggagcttgtgattcatagttgctgctctctcctccaccccctattgtatgatgctgatctttacccttatttaatatgttacctgcctctgccaagcctgtgaaaggcatttggatatgaagacatgaggtctggagagagagacgagggaagttggttcaggccacacctgccttccgatccccactaactggtgctatgactgtgcgtagaaactggtgggaaaagagtgaaagtgattcaccttagaggagtaatgcagtacaattaaggaatcagcagggaaggtgaaaactcaaaattcaaaattctgctgctgccactcaatgatagaaaaagtcgttagagggccaggcgccgtggctcatgcctgtaatcccagcactttgggaggccgaggtcggtggatcacctgaggtcaggagttcaagatcagcctggccaacgtggtgaagcccagtttctactaaaactacaaaaattagctgggcgcagtggcgggcacctgtaatcccagctgcttgggaggctgaggcgggagaatcgcttgaacctaggacgtggaggatgcagtgagctgagattgcgccactgcactctagcctaggtgacaagaatgaaactccatctcgagaaaagaaaaaggatgctagaagaatacacacccataagtgaaaaaatggggaaccctgaagtaaacaccttacagggaacttgaataaatacatgatcagaagaccattggtcagtggtcaagagaaaaagaaaggaactccagattactcatctctaagtatatccctgctgtttctgggataaacttattatttaaataataataatggaaaggtgactgatgagaccaggcgattaaggagacaaggtaagtaagtcagctagacagcaaatagtttgttgtttcccaagaatgtccttctggggtacctgtgaaatggctgtcagaggctcttcccatcagaacatggaaactgttagtgaaataaataatggggtagtaatgggatgattctgaatggggaagcagagattgtttttgcctgccttgatgaagataaatgggagtataaatgtgaggggctggcccctggataatttattttatattaattaatttttttgagatggagtctctctgtgttgcccaggctggagtgcaatgatgcgatcttggctcactgcatcctccacctcctgggttcaagcgattctcctgcctcagcctcccgagtagctgggattacagatgcctgccaccgcgtctggctaatttttgtatttttagtagagaagggctttcgccatgttggccaggctgatctcgatctcttgacctcaggtgatctgcccacctcggccacccaaagtgctgggattacaggcgtgagccaccgtgactggcctgggtaatttattaatgattacagacatttactgaatgctcattctttgctggactctacactatagaggttgacatatgtaatatcattttgttctcccagcatcactgaggtccttatcattgtttttcctattttgttgataaggagactacaaagatcaggtaactttttcacatcgacttagctcataaatgacagagccgggatttaaatacaagctctcaagctactgattaccaaagttttcccacttaacaatcaagctattccactgcctcctggcgcctcctggccccttctgcctggcctagtgataaatgcccagcaggccctggatgaaatccggaacagtgattgagttacaccattttggctggatggcatgcagcaagcttgaaaaagctaacatttaaatttgtggaatgtaacatttgtttcaaagggtcgctaaattagaagactggcagatgtcagtgaatcttcatcctaagaacatgtgtaaaaagtgtctgggaaacttccgtctggcaaatcttatttctacccagagcatgctggtaaaatctatactaaggatacattacaaaaggcttcagcagatggcctttataaatttttaaaatttttttttaatttttgagatggagtttctctcttgttgcccaggctggagtgcagtgcctcaatctcggctcatcgcaacctctacctcctgggttcaagcaattctcctgcctcagcctcctgagtagctgggattacaggcatgtgccaccacgcccggctaattttgtatttgtagtagagatggggtttctccatattggtcagcctggtctccaactcctgacctcaggttatccgcccaccttggaagtgttgggattatgggcgtgagccactgcgcctggcctgcagatggcctttttagggagaaggcagcttggcttctggaagagggaactggatttggctggagtcctttgagaaggtgaatatgccatgctgctgaagaaacagtgaacgtccctcctttccacttttcagaaagcccctcggatgggggttcagacgcaagggagaggggttgagagggagtagccttggaaagatagtcttgtggctttcagatgcgcttagaggaaggacgtcaggataattgttttaagggctcatcctgacattcaaaggtaaaccatggagccctggaggaatgagtgctccgacaagtcgtgtgtaacatttttataattgatctagcagaaagaagagggcagctgggtctctcggtttgcagatgctattagatacttcttaccagagaactgttaaacctgtcaggataagctgccagaagatgtggcaaatacaagtgctagttgagtttattgtatctggagaaaagtaacacaagttgtaagtttctgatacccaataaaaccctgggctttttaaaggaaggctttctcaagaaaaccataggagggtctgactcctggataatttattttgttttatattttattgttttttttgacacagagtctctctgtgtcgcccagactggagtgcagtggcgcaatagtgttagtgttataggggttagttataggcgttagtgttctctaacccctatagaaaagccaaagcaattctccacccagaatattaatagagggctagttgctatttctcaaaatttaacagttccaccaatatgtgagtccccattctgagcaagaaatggagttagacatgattcaggaagaaaaatgcaaaatgataagggaattaagaaacctattgtaggaaaaaaaacccaagaggtgaaacctctttaatccaaaggtgatagctgaggagcatatgtagtaacttactaaaacacaaaggataaacacagaatcagcaaaaactatcaatcctttctctttaaaaattgtaggctgggcacagtggctcacacctgtaatcccagcactttgggaggccaaggcaggaggatcacctgaggtcaggagttcgagacgagcctggccagcatggtgaaccgtctcaaaacaaaaacaaacaaaaaaaaaacgtattaggtggtggtgggaaaaggggagatgttggtcaaagggtacgaagttttagattgaataggttctggggatttaatagacatcttggtgactatattaataataatgtattatatacttgagcatgctgcacagatcatcccatcacctaggtattaagcccagcatcccttagctattcttcctgatgctcttcctccttagctattcttcctgatgctctccctcctcctaccctccactccccactgttccccccaatgtgtccatgtgttctcatcattcagctcccacttctaagtgagaacatgcagtacttggttttttgtttctgcgttcgtttgctgaggataatggcttccagctccatctatgtccctgcaaaggacataatctcattcctttttatggctgcatagtattccatgttgtgtatgtaccacatcttcttagtgcagtctatcattgataggcatttaggttgattccatgtctttgctattgtgaatggtgctgcaatgaatgtacacaggcatgtgtctttataatagaatgatttatattcctttgggtatatacccagtaatggagttgctcagtcaattggcgtttctgcctgtaggtctttgagggattgcgacactgtcttccacaatgtttgaactaatttacacttccaccaacagtgtaaaagcgttcctttttcttcacaacctcatcagcatctgttggttttttacttttaataatggccattctgactggtgtgagatggtatcttcttgtggttttgatttgcttttctctaatgattagtgatgctgagcttttttttcatgtttgttggctacatgtatgtcttcttttgacaagtatctgttcttgtcctttgcctactttaatgggtttgtttgtttgtttgttttcttgtaaatttgtttaagttccttgtagatgctggatattagacctttgtcagatgactagattgcagaaattttctctcattctgtaggatgtctgtctactctgatgacagtttcgtttgctctgcagaaactttagtttaagtagatcccatttgtcaatttttgcttttattgcaattgcttttggcatttttgtcatgaaatctgctcgtgactatgtcctgaatggtattgcctagcttttcttctatggtttctatagttttggttttacatttaagtatttaatccatcttgagttgattttttatatggtataaggaaggagcccagtttcaatcttctgcgtgtggctagtcagttctcccagcaccatttattaaatagggaatccttttaataaatgattatttttatttatttaataaaataagcaaaaaattgcttatttttgtcaggtttgttgaagatcagatggttgtaggtgtgaggtcttatttctgagttttctattctgttccatggtcaacgtgtctgttcttgtaccagtaccatgctgttttggttattatagccttgtagcatagtttgaagcagtatagtagcctcaaagtagtagccttgtagtatagtttgggtagcataatgcctccagcattgttctttttgcttaggattgtcttggctattcaggctcttttctggttccatatgaattttaaaatagttttttctaattctgtgaataatgtcaatggtagtttaatgggaatggcattgaatctgtacattgctttgtgcaatatggtcattttcagatattgattctttctgtccatgagaatggaatgtttttccatttgtttgtgtcatctctgatttctttgagcagtggtttttgttagctgtattcctaggtattttattccttttgtggcaattgtgaatgggaatttgttcatgatttggcccttggcttgcctgttgttcaccaacaacaggctagtgatttttgcacattcattttgtatcctgagactttgctgaagttgcttattagcttaatatgcttttgggctgagatgataagattttctagatataggatcatgtcatttgcaaacaaagatagtttgacttcctctcttcctatctgaatacttttatttctttctcttgcttgattgccctggccagaacttccaatactatgtggaataagagtagtgaaagagggcatccttatcttgtgctggttttcaagaggaatgcttccagcttttgcccattcagcatgatattggctgtggttttgtcacaaatggccttattattttgagctatgttccttcaatatctagtttattgagagtttttaacatgaagggatgttgaattttatcaaagggcttttctgcatctattgagataatcatgtggtttttgtcttcatttctgtttatgtgatgaatcacatttattgatctgtgtatgttgaaccaaccttgcatcctggggatgaagccaacttgatcatggtggataagctttttgatgtgctgctggatttggttcaccagtattttgttaaggatttttgcatcgatgttcatcgaggatattgtcctgatgtgtttttgttgttgttgttgttgtgtctctgccaggttttggtatcaggatgatgctggcctcatgaatgagttagggagaagtccctccttttcaatgttttggaatattttcagtaggaatggtcccagctcttctttgtacctctggtagaattcagctgtgaatccatctgatcctgggcttttcttggttggtaggttgtttgttactgtctcaacttcacaacaagttattggtctattggtctattcagggatccaatttctttcttgttcagtcttgggagggtgtatgtgtccaggaatttatccatctcttctagattttctagtttatgtgcatagaggtgtttttgtattctctgatggttagttgtatttctgtggggtcagtgatgatatccctcttatcatttctggttgtgattatttgaatcttgaaagtagatcttaaatgttgtcacaacacacacacacagatttttaactatgtgaggtgatggatatgctaattagcttgattgtggtaatcactttataacatatgtgtgtaaaaatcacattttataccataaatatatactatctttcaggacatatattaaagtgtattactctacctacaggccagtagactaatgacatccttattctatgaacctgtacaggttgaaaaaaaactacattaggtaaaatcaaacgattactgggcgcagtggctcacgcctgtaatctcagcactttgggaggccgaggcacgtgaatcactgaggtcaggagtttgagaccagcctggctaacatggcgaaaccccatctctgctaaaaatacaaaaaaaattagccaggcatggtgacaggtgcctgtaatcccagctactcaggaggctgaggtaggagaattgcttgaacccaggaaacaaaggttgcagtgagctgagatcatgccactgcactccagcctgggcaacagagcaagactctttctcaaaaaaaaaaaaaaaagactggaggcaatttcttttctttgtatttttagtctttgcatgtgtcaaaatgtcatgtctcttgatggataatttggctggatgtagacatcttgtctttcatcatctgcaggttctggtttctgatccattgcatgtaaactgtcttcctggaatctcaggctgctctctttgtcctggttgttctgaagtttcgtgttgatgggcttctaaaattcattgtgctgcacacttgatgggcttttcaaaatctgaagtctcatctacttagttcttgaaaaaatttcgaattctttctttgatattttcttcctctccattatctctgcttcatctttcttgatatcattacaccttcttgtttgattgcatttgattgcctttttttttttttttgatagagtcttgtactatcaccgaggctggagtggagtggcatgatctcggctcacggcaacctctgcctcccgggcttaagcgatcctcctacctcagcctcctgagtagctgggaccataggcatgtgccaccacgcctggctttttttttttttttttgagacagggttttgtcatgttgacccaggctggccttgaactcctggtcttgagtgatccacccaccttggcctcccaaagtgccaggattgtaggcatgagtcaccacacccagcactccctctatagttttatattttccattaattttccatctattaaaaattatttttgaaggatgggatcttgctataaggctggccttgaactcctgggctcaagtgatcctcctgcttcagcctctggagtagctgggactacaagcattccactgcgcccagcttacatctatttttttggggggggtccagtttattggagattcctttgattttattttggttatcatagtttttaacttttaagaactttttcttatctcttttttaaaaaggaaactctgttatttgttttattgacataggaacttcatcttttaaccatctctgagtatactctgtgtgtgtgtatgtgtgtatgtgtgtgtagcaatttgttcagctctgtgatttgttactgtatccagtgttttttttttcctatttgttcttttctgtctctttcttggcacaggctattttcaaatgcctgggactcttgtcctctactcatagttagaagcagggtgcttaaaatgctgacaggcagttctgagggcatagacaggttgactggaggcttcattgttagtacctaaaggtcttttctctgtcatttagtgtcttcagggaagaatcattcagtctcttgaattaagagatgggtttttctgtatgacaaagctagagatggaagttcagaaaccttacatacatagcttttcaggctctgaattaggtttaggatccaggagggtggcaggcatctgcaaatatctcttcttcttcttcttctttttttttttttttttttagacagagtcttgctctgtcacccaggctggagtgcagtggcacaatcttggctcactgcaacctctgcctcccaggttcaagcagttctcctgcctcagcctcccaagtagctgggattacaggcatgtgccaccacgcccagctaatttttttttttttttttgtatttttagtagagacagggtttcaccatgttagccaggatggtctcgatctcctgaacttgtgatccacccacctcagcctcccaaagtgctgggattacaggcgtgagccaccgcgcccagccccagctaatttttgtagttttagtagagtcagggtgtcaccatgttggccagactggtcttgaattcctgacctcaggtgatgtgcccgcctcggtctcccagagtgctgggattacaggcgtgagccaccacgcccggccaaatatctcttcttaagggcgaaaatgatgtaagtcctctgagtggtgatgtaagccttaagtatataagaactgtggcagtccagcctggcgcagtggctcatgcctgtaatcccagcactttgggaagcccaggtgggtggatcacttgaggtcaggagtttgggaccagcctggccaacatggtgaaactctatctctactaaaaatacaaaaatgagccaggcatggtggcacatgtctataatcccagctactcaggaggctgaggcacagcatgaggatcacttgaacctgggcgagccgagatcacaccactgcgctccagcctggatgacagagtgagaccccatcccaaaaaaaagaactgtggcatttacattggagcttctcagattaggtaataccctgctttgtgtggacagtgtcagcagcccctgcttgggaggttactgactctgggggccggagcaagctgtgctaagaggttctccaactgcatggagttcctaaatttctgtacccttggatgaagcaattggaaacttatcgtatggtgtagtttgtgtgtgtgtgtgtgttgcatatgcatgtgcgttttcacttagctgtagtctctagaaatctgcatgtggcacatgtcagttactcgatagggagactttcaaccactctccctgctttcagaactctgccttatcccttgtcttctagggacatggtgcccccaagtattgctctcaggcattctatggggagacctatctggtttctcttgggaattcaccctttcagtgacaaattcccctattttgctaaatctttcatctcatttctgtctctgtcttccaaagtttgtttgaagatttctgtcaaccttcttaactcaagaacacctttctctcttaaatgaagacatatggctttgcacactctgaagggttgagacccaggagtgttgcagatgtctataaatatttcttcttgtattcatccattcttgcattgctgtaaagaaatacccgagactgggtaatttataaagaaaacaggtttaattggcccatggttctgaaggctgtatagaaagcatagtggcttctgcttctggggaggcctcaggaaacttacaatcatggttgaaggcgaaggggaagcagtacctcacatggctgaagcaggaagaagagagagggggcagctgccacacagttttaaacaaccagatctcacaataactcactcactgactctcatgagaacagcatcaaggagatggcgctaactcattcatgagaactccagaccctgatgatccagtcacctcctactaggccccatctccaacactggggattacaatttgacacgagtttagtggggacacagatccaaaccatatcacttcttttttttttgtttttttgagacagggtctcactttgtcacccaggctggagggcagtggcatgatctcagctcactgcagcctccacctcctgggttcaagtgatcctcctgccttagtcccccaagtagttgggactgcaattgtgtgccaccatgcctggctaatttttgtatcttttttagagattatggggtttcaccatgttgcccagactggttttgaactcttgagctcaagcgatctgctcaccttggcctcccaaagtgtgagccaccacacctgaccttctccttcttcttttttttttaatttaataactttttttttgtagagacacacggtctcactatgttgcccaggctagtcttgaattcctggcctcaagcaatcttcctgtctcagcttcccaaagtgctggggttacatgcaggagtcaccatccctggattgttttattatgttgattacgatctactaagtttgttttataacccactggatcgcacctgctgtaaaaacaatgctctagttaatgtgaatgaaacctaaactgtaggttcgcactttcttgccctttcactttcttcagtttattgccagaatgaaatgacattgctttgaaattaaagaaaaatagttattagggctcctccatcttaacaaggcaacgatgatcattttgtaatgatccttacctatgattgttttcgctatgcatatgtaattgtcatcttagttgtgtagctaggagatacttcggttacacagttcttacatttcttaagacttaatttttttagagcagtgttaagttcacaacaaaattgagtggaaggtatgagatctctcatatacctcctgccccaacacatgtagagtctctcccattatcaacgtcccctaccagagtagtacacctgctgcaactgatgagcctatactgactcctctctgtaattaatttattttttgttttgtaatttcaactatattttagattcagggagtacaggtgtgagtttgttacatgtagaattcattgttggtgttggacattctatcagtttggacaaatttataatgacacggatccaccattatagtatcatactgactatttgcactcccctaaaatcctctgtcctccacctattcatccctccccaacacactgccacagccactggcagccacacagtctgccattctttttgccattactgcagggtcacctgagtaatgtgccatctctttgagctaaagttttatttgttgaaagaactttggcatttacttagtattagaccttcagatagaatgttgatggatttttattgaactcactgatattctttttattaagcatttttttctaattatagaatcatacatatgaattttggaaaatccagacaagtacaaagaagaaaataacatttataattccactgttgtaagataaccactataacaatttagtgtatttctttcatgtaatctttttttgcaagaatagttttacatttttcttatactacacacacaatataatctttttatttttgtttttattttttgagatggagtttcggtcttattgcccaggctggagtgcaatggtgtgatcttggctcactgcagcctccacctcctgggttcaagcaattctcctgtctcagcctcccgagtggctgggattacaggcgtccaccaccacgcccggctaattttttgtatttttagtagagatggagatttgccatgttggccaggctgatcttgaactcctgacctcaggtgatctgcccgcctcggcctcccaaagtgctggcattacaggtctaagcgcacctggccatcttttttaaacaacattgtatcataagcattcttactttgttgaaactatttagtaaatatcatttaaactctattattggatctttaggcattgttagttttattgtttttgtatgctaatataaagaactgtagtaaacatctaatgcctcaatatttgtctgcattttagggcacattcttaagaaatattttatttattttttaattattattattttttggtagagatgcagtctccctatgttgcccaagctggtcttgaactcctgggctcaagtgatcttcccacctcggactcacaaagtgttgtgattacaagcatgagccactatacctggtcaaagacagattttaaaagcagaattactgaaaccaaagatatgggcacttataggactcttgacacttactgctgagtcacttttcaggagagttggaggtctgggggtgggtggttgttttttaaagatgagagagacttgggttattcagcatttgcaggtgaggagccccagaagagggggcacagcctggtagtgtgggagtgacgatgccgtgctctcaaagaggtaggtgagggttgaaagccagcacatgagaagtgttgtgctctctgatgcaggaagaaaatacatcgtgttggggggtgggtgtgacaagtctgtgcacacaggtatgcaggttgggaggagccaagggagtccccagcatggcttttatcctctcctcagagtcagggagtgaggatggagactgggaatatgggggcatggtggtgatatgaaatgacccacgtgggggatcaaagggaaaggtgcttggaaatcctttgtattgagaggtacgtggagggtctccgagtactactggagattcagctgagcttggtcatcagaccttaacggtggcaccaatttgcaaagccctctttgatttttctcaggggtgcctggagaccttcatataaaagcaaagatgagagtggatgggtgctgatcgggtttgggaatttgcagagtggctgtagaggtgggaaaaagggctgaggaagtaaggatcagagcagtggcgttaagggatgggtcatcatctgggccaccggaggagggcctgtcgggttggttgaacctgtgttagagcacagattgctgtaaataaggtggtaatagcccctaaacatactgtaacaggcttcagaaccatgggccaatcacagcctgagtatttgtctgagcagctcaggtcctgagatacgagctagtccggaaaggctggtgtttggaatgtgacaatactggggacaggtaagggtcctggatgtctctcttcttggaagctggctgtgggtccatttcatggatccaggtcaagagcagggagatgtgaaccaaagctgctactggaagccttcagggttcctcttcacctagaaggaagatgcggacaccggccagggcgcagactcagcagactggtgctgctgcgcttcgtgcttccctcggaggactaacagtgtccccagaacatgcttcagaaagagattagaaaacgcccatagaagtttgcgttctgagtctaaataagaatttgggactgtgcccaattagaccaaggattgctctagtaggcactctgaggacaaagaaagctggaatcacctgatgtctttgggtttgaaggataatctgttaacaagtgagacctctcaaaatggcggctggcagaagttgcccctttggaggtggggatggaggtcttggtggaaccaggtgcccacctggttccaagcatttgggccaagtgtaagaagtcaccacgcctccctggatgttacagctgttgctgaagttggtgtctcctgggagagtccctccattgttccttttgtcccaacaatattattgaaagggaatgctagagtgttgttttctgaagtcagatgaacttgtttatgacatcaacttgcatttaagttggctcttggcaaatattgaaaaagtcttcccatgccttttttttcctactctcaagcgaatattaatcaaaaatggtattttttattaaccttttgaagagtattattcaaatgtgccctgaatgactaaactgataaattgtataaaattaattgctggaggtgatgaactcttgtgaatcattacaattcattctgccagtttgttccagctacctcattaaatctggagaggtgacagacacgacaacacaagctcagttctcaagcagagcagaacgtgagggggctaaatcttccaacactgcctcatgcaatgcaattattggataagcttgaatctatttgttgctgtttttgagtttggaatgcatatttgcatttcatatgggcttaatggatgtattcttttcctgatcatcctttctccttgaatttgttgttagaatgaaacattgctctttgttcgttgttctgcattgttgattcttgtttaagaaggcagacacctgatcctgagataagtttgacctgcagaccaactagaaaagcatccactattaatcccagcaatagttacacctctcaataaaacttccaacgttgatctaggtgccctcgattaaaagtaacgtttagcctatggagaattcccagaggatactcaacaatgatgattatgagatctgaaaatagaaccaataaacagaagacataaaactgggtttattttgtctggaaggaaaaggctaaaagaagacttaaaggcggccaggcacagtggcttacacctgtaatcccagcactttgggaggctgaggtgggccaatcacgtgaggtcaggagttcaagaccagcctggccaacatggtgaaaccccatctctactaaaaatacaaaaattagctgggcttggtgatggacgcctgtaatcccagctactccagggggctgaggcaggagaatcacttgagcctaggaagtagaggttgcagtaagccaagatggcgccactgccctccagcctgggtggcagagtgagactctgtctaaaaaaaaaaaaaaaaaaagacttaaagcctatctccaaatcagtgaagttagttattcttccaaagatacttgatacattctctttttatataatctatggataaaatcagggaaaactggtttaaattataacaagagatttaggttaggtggaggaagaaaaatttctagcaggaaatgcaagagaataccaggcaaatgtgtggacttcattttcccagtaaaaatggaactgttcactaggcattggattgaataatcttacgcaccgtgatgatgcaatgctgagccctattctttgtgttcctataaccattctattttatgctcgtagagtgtcagtcacttttatgatctcttcttggaagcaaaaatacccttctgaatagaattctcagaaggtagtgtttgattattgaatttgattattattattattatttattgttattttaaatagatatggggtcttgctatgtttcccaggctactctcaaactcctgggctcaagcaatcctccttcctcagccttccaaagtgccaggattacaagcgtgagccaccacacctggccaagattattgaattgtttatacctgtgttatagtgaaacagatactaaaaaaaaaaatgctgtgttaaaattccagactgaaggtgattttttttaaagctgctgatgaggagggtttttaaattggtttctcatcacctgtgatgtcttgggcctcatatcattattataacggatgtttcttttctaagaagattacctattcactattcacaatagaaagtgaatagaaagacatggaatcaacctccgtgcccatcaatggtggaatggataaagaaaacatggtaatatacatatataccatggaatactacacagcataaaaaagaacaaaatcatgtcctctgcagcaacacggatgcagctggaggccgttatcctaagggaattaacacaggaacagaaaaccaaatattgcatgttctcacaagcgggagctaaacactggatacttacaaacataaagatggcagcaatacacactggggactactagatggggaagaaagggagtggggcaagggctgagaaactaacttaagtactatactcagtgcctgattgacaggttcagttgtacctgaaacctcagcatcatgcaatatacccatgtaagaaaagcacacatatactcctgaatctaacacagaaattgaaattatgaaaaaagtaatttgtagttaccagaaaaaaaaaaaagatgaactattaagaacctcaagctgggcatggtggttcatgcctgtaatcacaacactctgggagacggaggtgggaggatcgcttgagcctaggagttcgagaccagtctgggcaacatagggagacctcgtttctacaacaaaatttaaaaagtattagctgggcatggtggcacacacctgtaatcccagaactttgggaggccaaggtggggggaatcacttgagcctgggaggctgaagctgcagtgagctatgatcatgccactgccctccaaaagaagacctcatgttctgtaggcttgagtttgagaccagtctgggcagcatagggagacctcgtctctacaaaacacacacacacacacacacacacacacacacacacacactctctctctctctctctctctctctctctctctctctctctctctctctatatatatatatatatatatatatatatatattagccaggcatggtggtgcacacctgtggttccagctaccagggaggctgaggtgggaggatcgcctaagtctgggaggttgaagccgcagtgagccactgcactccaaaagaagacctcaaattctgtaggctggggccagggggtggtggtgaggcagccgggggaggtggttagtggaagatctgagtaaaaagcatggtttcattggaccctcagatatcgccacctagtgggttgtaatgatttatgtcgtggcattttaggcctcagccttttcaatagagttgaatctttttgtttttttttgagacggagtttcgctcttgttgcccaggctggagtgcagtggcacaatcttggctcactgcaacctctgcctcctggattcaagtgattctcctgcctcagcctcctgagtagctgggactacaagcatgcaccaccacacgtggctaattttgtatttttattagagacggggtttctccatgttggtcaggctggtcttgaactcctgacctcaggtgatccacccacctcggcctcccaaagtgctgggattacaggcgtgagccaccacacctggccgaaagttgaatcttttatctgtaaaacgttttcttaaaatctaataattttttgttcctggtatatataatttccttcatgacacaactgaaacaatgcactttattttttaaaaacaaaacaaaactgaacaaaataaattatgattctaaacctgatcttctgataccgtggattgagaaaacttaattctcataaaataaagattaggccatctgacaattcccaaaaattaaatataccataacttcaaggtttttaaaaatttcttttttaaaaaacattctaacagagcctttaaaaatttagagatggggtctcactatgttgccgaggcttgtctcaaacccttgggctcaagtgattatcccgccttggcctcccaaagtgctgggattacaggtgtgagccaccaaatactgtaccttccaaggttttcaagtaaatttccagatgttctaatgtcttctgcttatttaaatcttttaaaattcattaccattatttcaaatacacatttcagaacttatttgaaaataaaatcaggttgcttcctagtgtagccaatatactgtctaaattgttaagagtctatggtgatgccaaagacaattgtaacttgagatggttgattctaaagctctcagccaagtagcgtgcaaaatggagaaaagagcttacatttaaggctggatgttgtggcttatgccagcaatcccagcattttgggaggctgaggtgggcggatcgtctgagactaggagtttgagaccagcctgtccaacatggtgaaaccctgtctttactaaaaacacagcaaaattagctgagcatggtggcgtgcatgtgtaatctcagctacttgggaggctgaagcatgagaatcgtttgaacctgggagggggaggttgcagtgagctgagatcatgccactgaactccagcctgggtcagaaagcaagactctgtctcaaaagaaaaaaaaaaagcttacatttaagacagcttctcattttctcgttccccttgcttcagcctcacttcctttccttgtcccctttatttctatattatcattatgtttctatagttaaatattggtgccggaatataatttttaaagtaaatccttctgttgttcttaacactttttttttgtcttgtaaaggaagaaattaatgttttaaaaacagaagtactactactttcttgattatttttccctatgtgtgtttataacacttaaaaagaattacaataaagccaggtgtggtgactcatgcctgtaatcccagcactttgggaggctgaggtggggcgatcacctgaggtcaggagttcgagaccagcctggccaacatggtgaatccccgtctctactaaaaataaaagaattagccgggcatggaggtgggcacctgtaattccagctacttgggaggctgttgcaggagaatcgcttgaacccaggaggtggaggtcccagtgagctgagaccgcgccactgcactccagcctgggcagcagagcgacactccttctcaaaaaaacaaacaaacaaacaaacaaaaaaaacaaaaaaaaacttatttttctcctataataaaagtaagctatatttgtggtatacacatttcttttttctctgatgggttaaatataatttgtcagatgagatagttttcatgctggtaagaattttttcatccgttcagaattatctttctgtgtaaatccatcattgaatttcagtgtctttgcagaacggcagagtgacttggttgatcaggttctgttttttgtgtcctttgttctagatacatttcatattgctcttcagtcgacaagggaaattacggctacagaaatggtacatcactctccctgataaagagaggaagaagatcacccgggaaattgttcagattattctctcccgtggtcacaggacaagcagttttgttgactggaaggagctaaaacttgtttataaaaggtgtgagtaactttttgagagctcaatttctcagtcttactttggtttgttctaatcctgaacattttagattgctataccaattccatcatttactgaaatctttgaaggctggggcccagatatttgtaccaatagactaactagaaaagaactctcattttattgaaagaaattctaggtgccaggatggattctaggtaaataaactacaccttgatagtgcacgcatgcattcaagaaaagtggtatgaacacctgttacattcctggcattgttcttttttaatttgttggaggcggaatcttgctctgtcacccaggctggagtgcagtggcgtgatcttggctcactgcaacttccacctcctgggttcaagcgattctcttgcctcagcctcctgagtagctaggattgcaggcatctgccactatgcctgactaatttttgtattttaagagagacggggtttcaccatgttggccaggctggtctcaaactcctgtgctcaggtgatccacctgccttggcctcccaaagtgctgggattacaggcgtgagccatcatgtccggccattcctggcattgttctaatggctgtgatacatcattgaacaagacagatgacattcctgctgtcatgtagtatacatatttattaagtaaccaaatacaatattttcacttagtaacaagtgctttggaaaaactggaggttagtatgacagagagatggggatgtgttcagtggggcagctcttattatgcctgttacttgaatttgtaatgagtacattgaggacatgaagagtttaagtagtcagttcccagtcacagtaattgagtgttaattggtagagccaggattcaaatctagatctttttggctttaaagcctgtatattgtttttaccatatctgcttgccatggcaagaccatactagaaaggaccctcaatttatagatgagataactaagcctgagaggtaacataattttgcccttggagacccaggtaattgatgcctaagccaggaacagaacacagctgacctgaccctgcatccaacaccctactgcaactcccggaaggagttatgatccttagatatgctcttgcaaagggtgtttataaagctcgttgggaaaaacagaggcaaccttcacagattgatattcaatggagtaaattaccagcaagtgcctgcaaagctccttctgctgggcccaaggttggagtttgacaaattgaggagggaggctcacacagaatgactgaagcccattgtgaagtgggagggtggggagcgtgggctcctgacagcactggtcagggctttctattttacaaaaaacaattgacaagctggagaggggtgtgaagacaccctgattaccaagagcgaaaggatactgtcctcctgataatagctcttcaaggtaaaattttgttgagagtctttcatgcgtaattaatggaagtaatccaacccccacagaattttcatatattctgatttatatttcaggaggctattgggggtgatgaataatgatttcattcttggatgaggagaggctcggcgggggaggaggtgactgcatattcgtgggaaaaactgtctccaggttgcttaatgtattgtcatattttgcttttgttatttttcatttcaaggtatgctagtttatatttttgctgtgcaatagaaaatcaggacaatgagctcttgacgctagagattgtgcatcgttacgtggagctgctggacaaatattttggaaatgtaagtgttgtccttgtcggttaggattagctacagtccccatctcagctcttacttcagttctgtctctggtcacatcccttctctctgtcacatctaaaatatgaattgaacttgaaccgaagatcaccttagtccccctaagattagaatacaagatttttctccctacctataattcttagtaaatgaaagacccaaagctttccttttttctttttaaatagatatggagtcctgctatgttgcccaggtgggtcttgaactcttggcctcaagcaattctcccacctcagcttcccaaagagctaggattataggcatgagctaccgtgcccagccacccaaagctttcaagaggtggatgtatctttatcttcataccacaaatacaccagagaccttatttcagtgaaccagaatttaactgtgaaggatttcttgatattctgttctttattcttcattggctttgtcgtctcttttctgttttgactttttatcctttctctggctttttttctaagctataagtattcttaattatttatgcataagaaaaatagcaacaaacaaaaaacccaaatccttttccttcacattgctatgcaataatctttttgcattttctgccaagtgatgtactatgctaggtgctccagtcctcagaactcattcactcggcagtgcttacagcatgggtccatctttactctgcagggaaatcagcaagttaccattgaaccctcctgcgggttgacaccagcgattcctcttgagtcttcacctgctttcacctgcttctcgctgcagcactggacccttgctcaccatgacgctttctttaaattcgcccttcttgattttgccatgacattgatttctgaagcgcctccttggtttcttccactcagctcccttcctctgcccagccctaaatgccctcatctcttcctaactctgtgtgtactgacgctctgtcctggaaatcccttactaagtgactcttcttccccttgttggtgacagtcttcactgggcttctcatggcccagaaccaaactcatctactgaaaatccgttctgtcttgtgattggaatttgttatgttccaggatccttcagtgcaaaaggacgcagcttgttttgtcttttcctatgctttaccagaatctgcctctgtctattcaaattgggctgacattcatttccttctttccactctcactaatataggttcacttgggatttcaattttgcttttctcttaaacatcttacctggctttttatgcctctgagcttttctctgttcgccctcttgccctattagttaccatcttccttaaaaaaaccagatataggtgtggcattccttcacagccactttccatcatgtacaataaataaaatcaacccccccagcctgttgtttaacctttcaaagcatggatccctgaccactcctccatccttgatacactacccttatttatttatttatttatttatttatttatttatttattatttattgagacggagttttgttcttgttgcccaggctggagtgcaatggcacgatctctgctcactgcaacctctgcctcccgagttcaagcgatcttcctgcctcagcctcctgagtagctaggtttacgggcccccgccaccatgcccggctcatttttatatttttattagagatggggtttcaccatgttggccaggctagtcttgaactcctgacctcgggcgatccgcctgccttggcctcccaacgtgctgggattacaggcatgagccactgcctccagcctacatttccctttttatatacctgacagttctccagcaacaagaaatgaccttggagtgtccctaactggcacccgatttgcttgaccaccaaattgcaattctcttgagaccagtgctttgtgactcattttatccccccaccgcttaacttgtaaccagctgtgggccagacttgatagcaaatgttccaaaaacatttaatccatttcacagtttcaagaaataaatcattggatttggaaaatgttttcttctcataataccctcttccctattcccttactcactgaagtttttgttaagtgttaggataatttgcttccagcagagtttttttttgttcttgttgttattctctttaatggaatgagcagtatttgcaatattgaacacgttttatcagatttgttgcaacacttttcataaggatgaacactggaaagatttctgaaagaatttttcctccctcccttttttcccccttgtaaatgatgttgttaagacctaaaatgttgcttcagggatttcaggttgttggtcagtatataacagcaataagacaactagaccatcttttctttctcctcttggtataccaagtttattttcatttttttaaggagaaatttgcaaatgtataataacatgttttcaaacatattatttaatactttctactattcaaatgaattctcacatttttgtactttcctttgaaataaactacagacttggccttttgcaagagcctgaagaagtttccttgaggtctgggcattcccgtaacctgccttctctttctcatttctgaactccggcttgacctgttgtattttcctagattaaaccaactgtgataatgtgaattggggctgaattttgatctcaatctatctgaccaaatttcagccagatatctcagggcattatgcttctcaagagaacttgagtgaccttcaccaatgctaaacccagttaaagtacaaagagagtcagaatgaattcccatttctctaacattaatttcccattctattttggtatacctttggaagctctgtctttgtcatgtaccaaaatttaatttattaaaaaattcaatgaatctttcattaagctaagagcagctaagagcaattcaaggctatatgcccagtagaagttcggttcttgttaattaacagtgatgagcaaagacttccagtactgattctcattgacataatctcagcaataaaatatttctctttgattttcttttcctcccatattaatactaaagctttccttgaattctgcccttatataatgttatctaggggaaaacttggtactgagcttctcttataacactggaaaatattatctgctgaagacagacggatcaaaatctctggctactaatttaagttatgtatttttttttagcacttttcaattccaaggagatttacgaggattaactagttaatcttccgatcttcagtaagtagcattaacctcaatttatagaggctcagaggaaatgcctcaaagtctcatgccagataagagtctgaggatttagatacctgccatatttctgcattacagactacagtgtgaatttttactggtgcctcagtgtgtgaggatgttgatctcccagagagcttttgaatttgatgtagggagttttttgtttgtttgttttttgctgtcaggggaagagcactatgggtcccccggatgctggtgtaggctcactctctcaccaattcaaggatttggggcctgtcatgtgtctccgttttgcagatgagaaaaatgaccctcaaaaaggttaagagaagtgtttactttgctaaccttatagggctgctgggaggggcaaagagatggcgtgatagcaatacttaataaactattaattgctatatagttgtacattgcattataattattcttgttttattttatttatttatttttttgagacggagtctcgctcttgttgcccaggctggaatgcagtggcgcggtctcggctcactgcaccttccgcctcccgggttcaagcgattctcctacctcagcctccctagtagctgggattacaggcatgtgccaccatgcctggctaatttttgtatttttggtagagatgggtttttgccatgttggccaggctggtctcaaactcctggcctcaggtgatccacccacctcggcctcctaaagtgttgggattacaggcgtgagccactgtgcccggcctattcttattttatatatagctttatggtagttatatagtttactattatttgaagcatttgctgcatgtaacttgaaactttttgtatttactttagagcatcatttaataagtacatgtgcttcttagattctgtccaaaaggattcagttggtgaaatgccagaaataatctcactgcaccatgaattctgctgtaagaaaagaaccttaagccaaattacagaagagcacaaggctaggacattgaagataaagttaaatgatagtttctaccatttgaaagctttattcagaatctagatacacgagaaaataaataaagaggctcatgtttattaacatggtgagggagcaagaagccggggtatttgcataattagaaggagtggaatcacttgagcatcaagtacatatttttgttgtattgggacaacctcaaggtggaatttattattttattttattttattttgtttctttttcccgagacagagtcttactccgttgcccaggttggggtgcagtggtgcagtcttggctcactgcaacctctgcttcctgggttcaaacgattctcctgcctcagcctcccgagtagctgggattacaggcgtgtgccaccatgcctggctaattttttgtatgtttagtagagacagggtctcaccatgttgcccagtctggtctcgaactcttgacctcaaatgatcagcccgcctcagcccccccaaagtgctgggattacaggcataagtaattaggcagtagcttcagaaacctgacttgggactgggaacggtggctcatgcctgtaatcccagcactttgggaggccaaggtgggggggatcacttaaggtcaggagttcaagaccagcctggccaacatggtgaatccctgtctctactaaaaataaaaataaaaaaattagccaggcatggtggcatatgcctgtaatcgcagctacttgggaggctgaggcggtagaatagtttgaacccaggaggcaggggttgcagcaagctgagatgattccactgcactccagcctgggtgacggagtaagactgtttccaaaaaaaaaaaaaaaaaaatgaactggtctaagggtcttcctggatattttctctcattctcagatggcagtagactcaaagaataactatagggtagcacttttgtgttgctgtatgtgaaatagttgctcagttgtaacattctctgtaatgcctatggaacttgcatatacatttctcttcagagctacagatagtaactgtatatcaaggggtgtgtgtgtgtgtgtgtgtgtgtgtgtgtgtgtattgtctctctaactctgaataccaccttaccttacccttatcccttgaaactagtacagtaaattaattgccccatggctgctggaggacccagacctggggacgtgtcaaagtggggtataagaagttcctggagaattttcattagtatctgtcaggttcactttgcaggagtttaattgctggtttctcctaatgaggctcctgtctgtcttggattcctggtctacgcctgccttgaactccgaggttcctcagcttgctactataactcctgacttctgccttttctgacctctggtaactgctttcttctcataccttctttcatgtacatggatgtctaatctattgtgatttctttttgtttctttctattgtttaaaactgcaaaaatgatgcatatttttacatgtccctctaaacatatacggtttttaaaaataggatcgcggccgggcgcgatggctcacgcctgtaatcccagcactttgggaggccgaggcgggtggatcacgaggtcaggagatcgagaccatcctggctaacacagtgaaaccccgtctctactaaaaatacaaaaaattagccgggcgaggtagcgggcgcctgtagtcccagctactcgggaggctgaggcaggagaatggcgtgaaccccggggggcggagccttcagtgagccgagatcgcgccactgcactccagcctgggcgacagggagactccgtctcaaaaaaaaaaaaaaaaaaaaaaaaaaatgggattgcattctgcatattattctgcaactttcttttttttcctccttacaagtctatcttagagctcttgccatatttgtgcatgtaaatctaccttattcttttcagcttctacatagctgaaacatatacaacagcagggaaaggagacagtatctgtgacaccgaaagaatcattcaaatttctaagacaaatattacaatagaaaaaaacaaagtctttaagaagcaatttgtagacaaggcaagaaatggaaagggccagtgcatatctaataagatgtacagtctcactaataagcagggaaatgcaagtttaattaatattcatccgaaaatttagagactatccattgctggagatggcataaataggtaatcactcctactgttagtgaaacttttaagttttatagactactttggaggaccacattttagtatttatcaattttaaatatacaaatcctttgacccaaaattccccaaggaatttattcctacactatactcaaattagtatacaatacacaacaaaaattatggcagcatcatttagaataaaaactggaaacagcccaaagtctgcccatatccataaaggaactgcttaaataaactgtgatatacccccagtatgccatggtaattctgtatggaagttggattcatttggatctgttgacttaaaccatgttccttgtgaagtttgctagtttattgacctaacttgtaagtatatggaggaatttgctaaaatattgacatctatttcatgcaaagttatagcattcagtacaaccatagaattgtatctgggatgccattaatctctagcatattagaaacaaggcctatatttatttatttttattttttgagaaggagtcttgctctgtcacccaggctggagtgcagtggcatgattttggctcactgcaacctctgcctcctgggttcaagtgattcttctgcctcaccttcctgagtagctgggattacagtcgtgcaccatcatgcctggctaatttttgtatttttagtaaagacaaggtttcaccatgttggccaggctggtcttgaactcttgacctcaagtgatctgcctgcctcagcctcccaaagtgctgggattacagacgtgagccaccatgcccagacaaggcctctacttaaacttgctcattcatttatcttacaagcattttttgtgtcttacaatgtgccagaaaccagggatataaagataatgaagacaaagtttctgccctgaactcacagtacgggggagtgattagtaatcaataagcagaaactagtgcacagaagatgtaagtgagaacccacaggaagtgatgtgaaatctgaatggggaaaaggggatgtggggaatcgccacatgcctgacttttgaatttggccttgaaaaaatgagcttggttttgccagcaggagaataaagaaaaggacatttggggacacaattcaagaattgttggaatgtgcagaaagcaaaggcacaaaacaccgtgacattgtgagtttgtggcatgtgtgtcagatgcatggatgagaactggcacgggaaatcagacagcagggcccaggctggtaaagattcctatatgcctttgtcctgaagaccttacactggagaggcacaagatcagcattttagctaagcattagtggtcaatggccctgagcaggcacaaccgccacctggaaggtcattgcagtggcctgatggagaagtgctgtaggcctgagcagcagctgtgaaagcagagaagacaggaagggtagggacttatttagacaatagaatcagtagaaactgatgaccaaatccagagggatgagatcaaggagggagaggaatgagtggggaaggggaagtatgttggttgaactctagaatgaattagatggagaaattagaaagagattgcaactactaagcaaaatagggactaaaggaaaaagaataatcttgatatcagcttgggacatagtgacatggattgaggaataggtaggtaaagatgtctagttagtgggtgagaatattggactagtggcccagagggagatcagggctagtcatctaggtttgttgagctacctgcatgctagacacagctgtagagagtcagcaagattgtccaggagaatatgcattttgcaaagagaagaggctcccttgaggaacatgaatattcaagcagaagatggatggctagaatataagcaacatgcagtagagatgtttgtctgttctgttgactgatatgtgctaggcacaccttaaatacttcttaaacaaatgcagggtaggagggagataaattatccaaggagtctgagaaggaattatcagagatagacaagaaaaacaggcattaagtggtattgccaaaatcaggggagcaagggagaagagattttcaaggaagagagattggtgaagagtaccacatgtggctgagaggtaaacgttggggaggtctggagactttctttcttttttttttctcctccctttttctaaaattacactttaagttctgggatacatgcacagaatgtgcaggtttgttacataggtatttatgtgccatggtggtttgctgcactcatcaacctgccatctacattaggtattttgccccccaccccccaacacactccggtgtgtgatgttcccctccctgtgtccatgtgttctcattgttcaactcctacttatgagtgagaacatgccgtgtttggttttctattcttgtagtagtttgctgagaatgatggtttccatcttcatctgtgtccctgcaaaggacatgaactcatctttttttatggctgcatagtattccatggtgtatatgtcccacattttatttatccagtctatcattgatgggcatttgggttggttccaagtctttgctactgtgaacagtgctgcaacaaacatacatgtgcatgtgtctttatagtagaatgatttataatcctttggtatatacccagtaatgggattgccgggtcaaatggtatttctggctctagatccttgaggaatcaccacactgtcttccacaatggttgaactaatttacactcccaccaacagtgtaaaagcattcctatttctccacatcctctccagcatctgttgtttcctgactttttaatgatcgccattctaactggcatgagatggtatctcattgtagtttttgatttgcatttttctaatgactagtgacaaaagctaaaatagacaaatgggatccaattaaactaaagagcttctgcacagcaaaagaaagtatcatcagagtgaacaggcaaccaacagaatgggagaaaacttttgcaatctatccatctgacaaagggctaatatccagaatctacaaagaacttaaacaaatgtacaagaaaaaaaacaaccccatcaaaaagtgggcgaaggatatgaacagacgcttctcaaaagaagacatttatgcagtctggagactcaatgagcagagtttcaggagaacagcttcagttgggtgggtggggtatggtatggaaagagaaggtgtcagtgagtagaggaataagtagggagtaagacagcaaggatggtgtgtgagtacgggaaatgagctttatttggatgatgggagtgatcttgccatacttgctacacttaaataaacaccaaaatctatcagactctgctttgatccgcgccagggattctggatgtgaaatcccgcagtccggcggcctcagcatcacctgggaacctgttaaaagtgcagattctcagttctcatctagacctcctgagtcataaactctgggggtgggctgtagcaccagtgtgttttaatgagcctttggaatgagtttgagaaccactggctgtgacataattttgagaaaaattagcacagttgagctaattttcctctgaagaattagtttctgagagagttctaaagctagaagccaagatttacagagcagagagcaggagaaacaaagctctgccctccttcctggaatgcagctggggctcagttttcttggtgcagataggaagaggagccgagtggcctcattcccttactgagcctcaaatttcctgttgtaacacaaaacattattatctaaggatgtgctttgctttaatagaatgtagcattccatttattaaaggcctgacattccctgttctttttttctgtccttaaaatgccatctgatatttttatttttggtacgccacatgagtgcaaactgaaaaagctcgagattcgggcagatgtttcccctgatacaactgcaagtttatcaaaacgtttgtttttgtcccaccaggtctgtgagctggatattatctttaattttgaaaaggcttatttcatcctggacgagtttataataggtggggaaattcaggaaacatccaagaaaattgctgtcaaagccattgaagactctgatatgttacaggaggtcagtacggtttcccaaaccatgggagaaagatgatgatgatgatgatgatggtgttaataattataatattaaccagacttactgagtacttactctgtgctgggtacagtttctaaactatttatatgtattagcttatttaatcctcacaacaactcgaaaaagtaggtggtattgttactcccactttacagatgagtaaactgagacaccaagaggttaaatgacctgctcaatttcacacaggaagtgtggaattcctctattccactaggaagtgtggcatagagatttgaacccaggcaattgggctttagagtctttgctcttcacatttggatgagctttggagtgcaagagtccttcactgccaaaaaggtatcaaatacttagtgctattcttttcaagaataattttatgagatgtataaaaagactttcattaaaatacctatgcttccctgggaaaggagaatagcagtacattgttattttgtttgccagagatattaaagctttattattgagcatggcatttatcattttaattaaaatttcttacaccttttgggaaggctgtatgtgtgctcctgcttgcataaagaaattgggaacactgtggtttgcttgccaaggtataaatgggcccagaagcatccattttgtactgccctggactctgggatttctatataaaataaagtgggaatgttcttttagaagccgcacagatttgcatcatacctcctcagggaacttacctacatcagcccctccattcctcccaggacactgtgagaaagagcacttcaccccactgacctctgccctcccaaatgagatgctctgaggggctgggttccatcccagacctgccacccctagattcttcttcccacagcctcagtgggtcttcccatcttcctattttcaaataagtaggtcaagaggatccagagcattgtaaagcacctttttaaaatcagcatttggccggatgcggtggctcactcctgtaatcccagcactttgggaggccgaggcaggcagatcacttgaggctaggagttcaagaccagcctggccaatgtggtgaaaccccatctctactaacaacacaaaaattagccgggcatggggatgtgtgcctgtaatcccagctacttgggaggctgaggcagtagaaccactggaacccgggaggcggaggttgcagtgagctgagatagcaccacagcaccacctgggtgacagagcgagactccatctcaaaataaataaataaataaataagtaaaactggcattaaagctacttttttcctgctatttggaagagggtgattaaattaacaaaacaccattaggtgtgaattcccagcaactgttttggtgcatctttaggctgattacttgctcctgcccagccagagcatcagtcctctggtgaatggatgtggaggaaaacatctatttgagtgggtgccgtaagcagctgcgtgtgcctattagaaggccaatgcattcattaccagaggtgtctgacctcaaaaagtgcatctaaactctctgatgttgatttggctgtctccaaatgccacagggaggaaaactttacaaggtatttgagaaatcagtggtttggaaatttcacaaaacagtgtttcataaaatactctgggagttgggggcaggtggagggggtggaggtttttttttaacttcaggacctcagggtcctgactgtggagtctccttacaggagaaacagagtttttaacggagtctttggcacttcagtaattaaagctgaattgggggccaagacacacctgggttaatttgaaatcctctcaaattaggaaatgttttaaaaaggttgtcataaatctggtgttgctggttccatttaaatctaggaagtaagtgtttcaagagtgagctctttcacaattaaatgctaattggtgaatgagtggaggggcttgatgggtaggtctcaggggaccttgcatttagccctggtgtccctatggtgagcaggcaatgtcatggccaccctctcagtctcttctgttgcgctaacaacacttgccaaatacagagagtgttattagtgttctcttgggctctggtattcagtgaagtcagtaaatattctggggagcttgttgaagaattgactttgcatatcttgcctgcttaagaggtttcaactggataggagccagtagtatacttgcataaaggaaaataattactgcttttttttttttcctgtcctttggacccaatcatatatttgtagttactgaaggttaagggaggcctttgtgacattgctttagctgtgagaacagctgtcaatcttcagtagcccctaagacttttctctagctcctacttaataacagtttcttagaataataacttttaaaaagctacacctgcctgcggatttagtaagaagacatagcctcaaatctccaaatgctcaaagcttattctgagcgtgtggtggctagatgttgataagaggaaaagaaaggaactgtttacttggttgggaatacttatttgggggtaacaacaatgtggacaatggcacaaagttattagaaggaaaattaaaccctctgtctgggcgtggtggctcacgtctgtaagcccaacactttgggaggccgaggtgggcggatcacttgaggccacgagttcgaggccagcctagccaacatggcaaaatcccatccctactaaaaatacaaaaattagccaggtgtggtggtacacatctgtaaccccagctacttgggaggctgaggcaggagatttgcttgaacccagaaggcagagattgcagtgagccgagattccaccactgcactccagcctgggtgacagagcaagactccatctcaaaaaaaaaaaaaaaaaaaaaattgctgggcacaatggctcatgcctataatcccagcactttgggccgaggcaggtggatcacgaggtcaggtgttcaagaccagcctggccaagatggtgaaactccgtctctactaaaaatacaaaaattagccaggtgcagtggtgggctcctgtaatcccagctactcaggaggctgaggcaggagaatcgcttgaacccagggggcggaggttgcagtgagccgagatcatgccactgcactctagcctgggcggcagagtgagactctgtctcaaaaaagaaaagaaaatgaaactctcaaaggcgatagtggtcattaaccacaggacttgcaataggtaggagcgacaaacagtagatattttaccccaactaacagcctgccaagaagggaggctcaaggccagatgcgatggctcatgcctgtattcccagcactttgggagtcccaggcaggaagactgcttaagtcaagagtttgagatcagcctaggcaacatagtgagaaccttgtctctacagaaaaatgataaaattagccaggtgtggtggtgtgcacctgtaatcccagctactcagaaggctgatgcggaaggaccgcttgagcccaggagttttgagaccagcctaggcaacatagtgagaaccttgtctctacaaaaagtaataaaattagccaggcatggtggtgtacacctgtaattccagctactcggaaggctaaggtgaaaggatcacttgagcccgagaggtcaaggctgcagtgagcggtaatcgcaccactgcacttcagcctgggtgacagagtgagaccctgtctcaaaaaaaagaaggggagggtcagattgtatctcatgagcaataggattctatgtgccctcgtgtggatgcaggcgaaactgctaggtgcaccctaacactgtcacccttaaaagcgtaaaccatgttaacagctaggccaaaccacaatgcagtaggaagtcataacatacactgtgctatatgcataagaaacacagcagagctagatgtatccagaagaggacccaagatacagactccagctcctgtcttgagaaggtaagagcaactaaggttctgccagctctaaaagtctgccccaaacctttaaagtggcaagctcaagaaaatgccaacttttaccttattggtttacatagcttgagtaaccagcctggctcggctcagacagggcagccagtgtggtgtttagcagactgagtcatctggtgatgtgagcagtgccaatgactagaggccactgaaccacaaagacaggaaagtgtcaactccaggcccctcccgaggctacaggcagggcctagcaatgctctcatctggtcatgggtttttgtccactttgcaaaaataagatattttaactgcaaaaagtacgtagccatacaatataatatatgatagaggagtgtcaagcaattaattcgtgaaaataacatgcaaccattttttattttgtgatatttgtcatcttcaaaattcacaatctgtggtcgtttcttttctcattctaagtacactttatacctgattttgtatttgtaactttgtattcccatgtaaatggtgtaaactctagattccataaaaccagcatggcccaatggcctgtatgatccctctgctaagttaaaagaccccacgggcagcatctgtagaggggtagatgggtatggggctgtcttggccaatgcccacttaggaggtgagagctttgttgagtaaatgtggatgactgaatacaaatgttttctggcagaactctggaattctagatagagttggtgaaaaccagttagaaaacctcttttgaaggtaagggcagatttctagccctagtatctcctgagcaatcttgctcggccagtagccttggtatcttcagcccatgtcagtcagcgtatttcctggcaggttcacatgaatcatataccctggagtttaagcttaagaacaagttgaacttggattgctaaatgagcagatcgtgactcaaacgaaagaggcaggtgattttttgtcctctcgagctttcttattgattcaacttggggccctggtgtgacacaaatatatatgtttaaagtaggagagtgtgcaagagaaagcccatctgtcttgcatggtatagaacctggaacatcactgttaactttgaactctacctgtaattgtgagtctgttcaaacatttttttttaaatgctgaaaaaaaatattatggctttggggcatgttagcaaacttagtaactgatggacagtatgaaaagaatgagatcatgtcctttgcagggacgtggatggagctggaggccatcattctgagcaaactagtgcagggacagaaaaccaaatgccacatgttctcacttaaaagtgggagctaaatgatgagaacacacggacacatagaagggaacaacacacactggagcctttcagagggtggagggtgggaggagggagaggatcaggaaaaatgactcatgggtcctaggcttaatacctggatgatgaaatcatctgtataacaaatccccatgatacacgtttacctctataacaaacctgcacatgtatctctgaacttaaaagttaaaaagaaacataatttgtatactttgggaggaagcctttgaaaacatatggcagaaactatacattttttcctgtgaaccttgtagagaagtaaagaaattcttaagaattttggtctgtttatcttttttgtcttgacaatatgtataataaagatgctctgcacaatataggtaacgatacatatgttatacagacgtaattcagaattctctaatacacgtacctggatgtggtcctcctgatcattttagcaaacgtgtttatcttaagtcaacagtgatatcttggcaactttgctttagcatttcaatctctctctctctctcttttttttttttgtttttgagacggagtctcactctgtcacccaggctggagtgcagtggtgcaatcttggctcacttcaacctccgcctcccggttcaagcaattctcctgcctcagcttcccgagtagctgggaatacaggtgcatgccaccacactcgggtaatttttgtatttttcatcgagatggggttttgtcatgttggccaggctggcctcaggtgatctgcccacctcagcctcccaaagtgctggtattacaggcgtgagcaccacactggccaagcatttctcttatcagacattcactttatgatcaagcttaactttttctcagttgaaagttacttaattccagccccatatggatgtgtatacaaattatactcaaactttgattagaatgcaaagattttatatccatgtatccttttgacaacttgttttcaacaatggcaaataaataaaagaatgcagaagatttcacagtctgcggaaggctgtgacttaaagggaaaattgttctaatttattgttcgctttcagacaatggaagaatacatgaacaagcctacattttaactggaaatctacttgaagactccagcactacatgttatgaagctgtaaataagcaacgcctcccatccggttttttgatggagcctcaggcaccatgccaaaaataatttaaagggattctttgttaactaacaaagttaaagttgtttaacatatttataattactatgtgtctgtattattaaaaaaaattatgtgtctgtgttatactgtataggtacttgtagctctaaatgtttaaagtaactaccacctaacccaacagacaatatttgtaatgtattaactccatgttatgtttttaagctggtttagatacattagctgcaattttttttgcatttgacacaatattgtaataatccatgattttgaatgtaaagtatatatgatgtcattaatactttttctaaatgtttagttttctaaattgtataataattcaaaattatgttaatagtgcagagtttatatgtaatgctagacatttttcatacacttaatagtactgtaactgcaattcacatacaaaatgtctgattttaatgtgctgaattcatttattttttttagaattgggattatgaaaataaccaaagagtatagaacttaataagtgtttttgatgccttagaagctgctatcttgactgaggttttaatttatcttttaattgaatataagggacattccaataaggttttctatgaactatatatttattaaggtttatagagacctagagatacagcatctatgacttcctttattattctaaaatagtatgataagaattaatagcaataataattattgctactattttttaaaattcacgttccaagcactcttagatgctggaaatttcatttcaaatatgttttaatgtatctctaatgcatttgaagacttattacatggcttacttagagcatttaagattatcacagcctatatggtagattcctttccttcttttttcttttcttaccctttcctccccaaagaaaagatttgctgctgaccattattactgtaagtatatcacatttgtgcttcctggaatgaaaattctgtataaccaggtcctaacagtgatcagacatattacagggaaatagcttgtaggccgggagtggtggcttacacctgtaatcccagcactttgggaggccgaggcaggtggatcacttgaggtcaggagttcgagagcagcctggccaatatgatgaaaccccatctctactaaaaatacaaaaattaggccgggtacagtggctcatgcctataattccagcactttgggaggcagaggtgggcggatcacaaggtcaagagatcaagaccatcctcgccaacaaggtgaaaccccacctctattaaaaatacaaaaattagccgggagtggtggtgcgtgcctgtagtcccagctacttgggaggctgaggcaggagaatcgcttgaacctgggaggcagaagttgcagtgagctgagattgtgccactgcactccagcctgggcgacagagcgagacttcgtctcaaacaaacaaaaaaattagccgggcatggtggcaggtgcctgtaatcccagctactcagggggctgaggcaggggaatggcttgaacccaggaggcagaggttgcagtgagccaaggtcataccagtgcactccaggcgggtgacagagcaagactgcgtctcaagaaaaaaaaaaaaaaaaagaaaaagtaaaagcttgtagtattctgtcttgctgcctgctatttgatgttttacctgtgcattttcaatgttagctttgaggtctggtatcattcatattagagtggtttgggacctccagtgatttcctagaagagtgtgtttcctgttggattctttaggagatcccatctggtagatttttagagaactcgatggaaaaatgttctctttagttcatctcagcagacatatttagggaaaacagcaaagcaagcaggagaacaaagggaaaaattcaccaattcctcaatataaccattgttcaaaggaaataactcagattagcatataaaataatcattaggcttttactatccaatatttcttcaggttaccatgtaattacaattatggcatcagcttgaagtttatcatgtatgattgaccactgtgtttactttagctaaccttcagttttgtggtttaactttttaatgtgttagaattttttctttctttttttctttctttctttcttttctttctttctttcttttccttcctttcttccttccttcttctctctctctccttccctcccttccttccttcccttcctccctccctcctttctttctttctttttctcttttcttttcttttctttcttttctttcctcgcttcttgtcacccaggccagagtgcaatggtgtgatctcaggtcactgcagcctccgtctcctgggttcaaacgattctcctgcctcagcctcccgagtagctgggattataggcatgcgccaccacgcctggctaattttgtatttttggtagagttgggatttctccatgttggtcaggctggtcttgaacgccgacctcaggtgatccgcccgccttggccttccaaagtgctggaattacaggcatgagccgctgcacccggccaaattctttatttttcaatacaattttgtaaagatggacctcatgtaaatccatcatagtttttccggttcttttgaaatttgtcaccatatttggataaaggtatctcttgaacctcattcaaatatactacacatgttctggataattccatattagacactttagttatggacagggcttctcagacttcaatcagtgtcacacatagaaagtaaatatatctcttctgggcaaggtggctcacgcctgtaatcccagcactttgggaggtcaaggcggcagatcacctgaggtcaggagttcgagaccagcctggccaacatggtgaaaccctgtctctactaaaaattcaaaaattagccaagtgtggtggcacatgcttgtagtgccagctactcaggaggctgaggcaggagaatcgcttgaacccgggaggcagaggttgcagtgagctgagatcacgccactgtactccagcccgggtgacagagtgagaccctgtctcaaaaaaaaaaaaaaaaaaatgaaagtaagtaaacatatctatatggcacagtggggtaaatttgagggattttagggacatcttccatgggcctaggctaaaatagtcattgtgttttctttatattatataattactataaaactaccaagagaaagacagtaaatgttaaatttctataaaacttccaaaataaaatgttttaacatgttttaatgaggaacttggtgtgttttcatgaatacacttttttttaagtcagattttatgtttgaaattgctactcataattcctggtgatgtctctttaatatgacctctttattttcttggtacctaccaacaagaagcaacttcaaaagtaagtggtagcaaatgggagaagagtatttattgcttttgctcctactgacttttctcatcattcacctacattttggtaatctgatctctttacacgtaattaatgatgtgatcattttttaaatctagtgacagctccttttctttcattaacaaatgtaaagttgacaatttttgtgataaagcaaatggatttttgattcaaacttttttttccatatcaaacctcctaaaataatgataaagctttagtcaaatgtattgttctaatcttttttgagacagagtctcactctgttgcccaggctggagtacagtggtgtgatctcagctcactgcaacctccacctctgggttcaagtgattgttgtgtctcagtctcacgagtagctgggattacaggtatgcgccacgtgcctggctaatttttgtgtttttggtagagacggggtttcaccatgttggccagactggtattgaactcctgacctcaaatgatctgcccacctcgacctcccaaaatgctgggattacaggcgtgagccactgcgctcagccagcgtcttctttagaattcatgttataatacctacgaaacatcattggtgaactgtgtttaatttcacctttctaagttataatcaatacattttactggtaaattttacctgataatgtacttattcacaatggtccctgaaaatttttgattaagttcattcagatgctgaggaatatgagcaaagcaagccaataaatattctccaataatttgcaaaggacaaccattaatttttttttaattcttattttaactcttgacacaagtttaccagtagaccatgtactttggtattaagcagaaatcatctattttgtcacatattgctaaaaacagaaaggtctgtaacatctagggctgcctttttttttttgagtcaaggtctggctctgttgaccaggctggcgagcactggcatgatcatggctcacttcaaccttgaactcctggtcttaagggatcctctcaccacagcctcccaaatagctgagactacaggaatgcactgccatgcctggctaatttttaaactttttttagagaagtgggggaagaggggcgttctccctgagttcccaggctgatctcgaactcctgggctcaagcgatcctcccaccttggcctcccaaagtattgggactacaggcataagccaccatgcctgaccttctcaggctttattagactcaccttctgatagaaccatttaatgtggaattcagccctacacaagaactttcgataagttcttcatgaataagctcacgcattaactgaatctcagcattttttccttgcatctgtgctatcacataacttatgcagtgtttccattatatttaacttatttaagtgttcatttactattttgcttactagtttgttttgcagctttacagaataaataatgttttaagcatttctcttcagggtttcacagttactaacaagtatcaattaacctgagatgatctatttacaatgtaaccattctggattagaattattttcgtgtctttgcatgttctgtatccagtgataatattattcaaaagtggcactttttctctttcctttggaaaatgatgaaaatttccacacagattggtaaaatgagcagttctgcaattgtgtgagttacatgaggttttgctattgttagctgacttcataaccagctttatgaggtatacttgatattgttataacatttttttaaaaattaaaaaatagagatgagctctcactgtgttgcccaggctggtcttgaactgggctcaagtaatcctcctatctcagcctcccaaagtgctgggattacaggcgtcagccaccacacccagtctactataacttctaggaaactttgtttcttatattatactttcctttctttaaacctttatttaatcttgtgtgtaaaatgcttgcttagtagaaagatgccagtataatttacttgattctattgctttacttgataacattttgaagagaagaagacatttaggctgaagaaaagggagaattacggtccaggcgcagtggctcacgcctgtaatcccagcactttgggaggccgaggcgggtggatcacaaggtcaggagttcgagaccagcctggccaacatggtgaaaccctgtctctactaaaaaaaaaaaaaatacaaaaattagccagatgtggtggcaggtgcctgtaatcccagctactctggagactgaggcaggagaatcgtttgagccccagaggcagagattgcagtgagccgagatcatgccattgcactctagcctaggcaacaagagcaaaactccatctaaaaaaaaaaaaaaagaaaagaaaaaggagaattatgaagaacttggttccacaagtaagatagtcctcatactgcatcagtagtgacttaaacttttttaaaacttttattttttgtggggggatctgttgaatttgggaagcctccagttttaataaaatttttttattatggtggaaacatgtctgtaaaacttaggactatagaaatgcaaagaataaagaactgagggagttacacacatttgtagtcagaaattaagttcaaaaaataatttaggtcatttgcattttttagtatgcaaaataaatggaaaaattaaagtgcaataaaaatataatttgggaaatgaatgcagtaaaattgaaaacattgaaatattataatttaataaaataaacttcaaaaaatgtatgaaaatataagtatctttacttatataggattaaatatatttctgataatctgtcctctataatgaattggtttaattatgtttttctgtttttagaaatgggcatctttttatttctggaaacaactttttaatgagattttatcaaacattagactatgactaattataatattcaaagccaataccaaaacgatggataaataaatgaataaaacaaggcacattaatagaaaaaaatgaatgaaatcaattacgggttctacttgaaacacctaatctcattataatagcaataataaaacaatttgtacatactttattagtcgaacatttattaaaaatataagagcatagagcaaattaatttggaagaaaatttaaatcttttacatacaaataccctcaagaataataaatcatggagtattaataaaattaaaccagctgataattttagaaagtgcttcatgcacagagacttttattcaagtcctctttgctttctgctagtgcttttttttttttcttgaaatgggatgggatctcactctgtcacccaggctggagtgcagtagcacgatagcagcgcactgcaacctggacctcctgggctcaagcaatcctctcaccgcagcctcctgagtagctggggctacaggtgtgtgccaccatacttggctaattaaaaaaaaaaaa

SEQ ID NO: 669 - DNA, 111607 bp, Homo sapiens
acgtgcacattttttgttctcactctaataatgtgataaagctgaattatttccaattttctgacgagagaggtcaagagacttgttcaaggtcttttctcttggtaagtaaaggtgtccattatgagaacatagttcttctaaggtaaaataccactccagaagcttcacccttttatagaaatatgtatctgagaagtggaagaaaaaataaatcggcatcattgattttaactttccagttattgctaaaatctcatcatctgtatctttgcagatgtaggcaatacattacctcttgtggcaggttggtttatcttggattatttgcttttctttataatgagctgatactgttctccatataacttctgttcatgagttctagtccatcttctgcagctatacagactaaacaaataagcactcacttttcctagacaacctttcagtattttcaggtactcttctctgtgtgccatgtcactattattattattattttacaggacatatttttcaggctgttttgtggaagtcactctcttctggacctggtcttatttcattaatcataactctaaaacatgaaatctacacttcagcataatattttagatgtgttctgtttagtggattcgaacacaatataatgatcacctcctttgttccaatgatgtgtaaatatgttcaaagttcatgtgctttgggatagctactaatgattcatattgaacttagaaatctgcatgattgagtttcttgtgataattctatagtaattgtgcctctaaatccatatatctgataaaggtccatcatgaaatttctagtaataattactgagcatggaataatgacatctatatactctgagtttaaaagttggaacattatgtctcattcacataaactacagtaattctagatgttacacattacctatttatttttattttgttaatttgattacaagctcaacttaatattttatattctccagtttttatttttaaaatagtttaaattaaactaaaaataaatacttctggttctatgcattttgcataatggatattcaacctgtattacattctatgaatataccacaatttattccactctactgttgatagatatttgggtttttctggttttgagctgttatgagctaagctgctagtgaagatttttgaacatgtcttttttttttattttagtggacatatacaccaacttcccttgagtttatacctaggagtataacggttggagcatagggcaagcaagtgtttagctttaggagatattgtcaaacagttttccaaagtggttgagtcaatttatactctcagcaggagggtatgagagtgcaagttgctcagtgtactccccagtacttgacattgtgtgtctttttaattttagctctttgagtaggtgtgttatttcatttcaatattagtttgcatagatttgattatttatgattctttgtatcttttgatatgcatattggcctcttggatattctcttttttgaagttttggtcaagccttttgcacatttattaatggattgtttttctttttttaacaaatgcataagagcttatataatatgttaaatatgttagctatgtcagaatttatgtattgcaggttttttatccaggctgtggcttatctatttactttcagaatattttttgacaaacagaaatttttacttttgctttgttgattttttcttttgtgatttgtcttttttatgttctataaagatttttttcctaccccaaggtcatgaaggtatttaatcatattttcttctggaagcttactgactttggctttcacatttggggtatgagccacctcacataaattttgggttatgctgtaagttcagagtcaaagttcacctttttttctcatatgtatatctaactatttcagtctttattgaaaagaccatacggttgccactgaagagaactggtgcttttacctaaaccaagtgactgtttatgtgtgagctgtttctggtttcactattcttttccgttgatatgtttttctacctttgcactgaatccatactgtcttaattactgtagctttctagaacacgctggaatcttgtatttcttcctcttctttaacatcttcctgtctatttctacataaactttggaatcacatgtcaatttccacatgcaaaaagtgtcaacctttttgattgggagtatattgtacttatagataagttttgagagaattgatatattgaatatttaatttttttgaccccaaaacatggaatacttctttacttattcagattttaatgtctctcagtagtgcaatggtacttgcactactttcttaagatttactcataaatgtgtgattttctaaaaatgctgctgtaaatagttcctattttatcttatttttcaattatttattgctagtatatagagatacaattgttttttgttgttgacctgggtccagtgaccttgatgaattgatttattgattgcaatagtttatctttttatttgatgttgtatgtccacaattatgtcatctgtgaaaaaaaaaaaggcagttttacacactcctttccaaacattgtaaccttttcttgacttattggaatggttagaacttactttataatgatgcatagaaatagcagccgttgatgctctttttgtatttctgaccttttggggcaagcgctagcatttcactattgaatgcaacaatttctctctctctttttttttgtacatatcttttctaaaaatcagaattaggaaattccctatagtgccatcttccagtttaccaattcttcattctattgtgtccagcagtttcgtaacttcatgtgttatctttttaagttctggaatgtcatttgattaattttaaatcctctatttatgtgtttaagttcctcatgctttcatttattttgttcatgttttctttcaaataacaaatgtattaatcacagtgaaccaaaattctgtttctactacttacaatatctagattatttttacttctgctcctttcgcatatttttctcttgctaattggttttattttgttaccatgttgcttgtctagtattttgtaaaatagtattttggacatagtatatgatgtaattataaagtctctatctagatgataccattttccaccggtactgttgaattattcctccatttcagttttttcttttagacaggatgagagcctaatcacataaatgtaattaggggttaaattatctaaaactgggccgggcacgatggcgcacgcctgcgatcccagcattttgggaggccgaggcgggtggatcacctgaggtcaggagttcgagaccagcctgactaacatggtgaaactctgtctctactaaatacaaaaagaaaaattagccgagcatggcggtgcatgcctgtaatgccagctacttgggaggctgaggtagtagaatcacttgaatctgggaggaggaggttgccatgagccaagatcatgctattgcactccagcctgggcaacaagaatgaaactctgtctcaaaaaaaaaacaagaagttatctgaaactaaacagtttcagtgaaacccattctacacttggattgtattatagtctttctggacttttgattgagagactgttgggtgtaggccttcaaaaactgagggagatcaagttctgcttttcaaagattatcaatttaatggtttttgtggtcagagaaaaatgctttgtgcaacgaaatcctttcgaatttgttcagatttattttacagcacataatatgatctatctaaatgttgttccatgtgcacttgtaaaaaatgtaacggccaagttggtaatagtggtaaagtcttctgtagcttttctgattttcctttacttgttctatttatgactaagaaatggctgttaaaatctccaagtctaattgggatttgtctatttctttttcagttttatcaagttttgcttcatttatttgatactgttgttagatgcaaacaaatttaacattataatttctctgtgacttaatttctttttcttttttttcattgtattctcattttatttcgtgtttcttttttttaattttatcatttttatactttaagttttagggtacatgtgcacaacgtgcaggtttgttacatatgtgtacatgcaccatgttggtgtgctgcattttacccattaactcgacatttagcattaggtatatctcctaatgctatccctcccccctccccccaccccacaacagtccccggtgtgtgatgttccccttcctgtgtccatgtgttctcattgttcaattcccacctatgagtgagaacatgcagtgtttgtttttctgtccttgtgatagtttgctgagaatgatggtttccagtttcatccatgtccctacaaaggacatgaactcatcattttttatggctgcatagtattccatggtgtatatgtgccacattttcttaatccagtctatcgttgttggacatttaggttggttccaagtctttgttatcgtgaatagtgccgctataaacatacgtgtgcatgtgtccttatagcagcatgatttataatcctttgggtatatacccagtaatgggatggctgggtcaaatggtatttctagttctagattcctgaggagtcgccacactgtcttccacaatggttgaactagtttacagtcccaccaacagtgtaaaagtgttcctattgctccacatcctctccagcacctgttgtttcctgactttttaatgatcgccattctaactggtgtgagaggttatctcattgtggttttgatttgcatttccctgatggccggtgatgatgagcattttttcatgtgttttttggctgcataaatgtcttcttttatattgcataaatatatgcataaatattcttctttacccctggtactatttctggttctgaaatctattttgtctaacatcaatatagccactgcagctttcttttgattaaaatttacattgtacatattttccatctttttacatttaatctatgtttttatgtttaaagtggattggctatagatattatatagttgagtctttgcttttttattaagtcgatttctgctttttattcagtaaatactgcctaagtgaagtatttagaccagttacattgaaggtaaatattcataatactggatttggatctattatcttaccatacattttataattttttttgcctttttttggtccctttcctgctgtcgttggattttctttttaatgattccattttatccccactattggcttaatagttatgtatcttttaaaaatttgtaagttttattttagtgtttacaatatatgtctttaacttgtacagtctactattaaatattataccattccatttagtatgtaataatcttacagtagtatactttcactttcttccatcctttgtgccattgttatatatttcactcctccatttgataaacctcaaaatatatttaactatttttttagagcctcacatctttaaaacatgttaataataaaaataatgtttacatttgagtttgggagttagtaaaagtggaatctcatctcatttcatttatttttagtccgggtatccttgaccgaacttgatgctttcccacatccttgaaaaagagctatctcttcctttctatttatagcaagatgttgagatgatcactgagacctgcaaaaagatttgtattcctcaacaaaaatcttttcataaattaatgaacttttatttattgctgcaatatgtaatttatacttcttgaaacctgtctttggaaaaattccaatgaagaatgaaatgccccctttcagggggcaacttatgatttattaacccagtgagactaacaaactaaaattttattaatgcagcatagttgccaaagtatatagaaacattctatatattctatgtttctgctttgtgagattttagtaaacattctaatctaggaggatttggtgatcaaatggttttagaaaatgctacaaactttattttcctgcaggaatttcatttagctgaatctctttggtctaggaatattttttagcacttaaacagaagttctgcagacaagcaaagttacttaatttgcttaaactaaaattggcaaacacattggactctagaaagcttttttcttttttttttttttttcctgagacaaggtcttgctctgtcgcccaggctggagtgcagtggcgcgatcttggctcactgcaacctccacctcccgggtttaagcgattctcttgccttagcctcctgagtagttgggattaccgacatgtgccaccacatctggctgatttctgtatttttattagagatggggttttgccacgttggccaggctggtcttgaactctaggtctcaattgatccacccacctcagcctcccaaagtgctggaattataggcaggaaacactgcacccagcctagaaagcttttttctattggtacaattgtaagtatctcattttttattgaatgtattttgaggattactgatttaaaatattcaaatgtttttcatttttatcattcctagatttagaaaagataaataatttatatttaattctatctaccttattcacccccttaaaaatccattgaatgcctgccatgtgccaggcattgtaatttatacaaataatggtattactgatctttgagtacagattatctggcttcaaactcaatattggttttactttgctttatgcactttatcacaggggcctccatcgaaacttattcataataccagatatttccaaggcattacagcatggaaatgtaaaatctaattctagctctttccatattatatgatcttgagaaaacttgctctctgctcggtacctcaattttccttgtctccaattctaaacgtaattctaaatctaccagaaaagcatctctaggtattattcaataaagaatgcaattcagacaggaatataggcaggtttttttttttcttttcattaatgcatgctctatatacattaaaatttgcagatcttaagtatacaatttgataatatttatgtaaacatgtatctgtataatcgccatttagatccaagtgtaaaacatttctattgcctcaaagttttctttgtgcctcattatggtcattgcctcttccccccagacacagacattgctgtttgaacttctattactataggtttgttttgtctgtctggaagttcttataaagggaattatatgccatataatcttttgtgtctggcttctttcactccatataatgtcgctgagagtcattcaagttgctacctagtgttttaatgccagtaggacttcagtttcttaacctatacaatgaaagggattgggctagatgaactctgaagattttttgaattctgagaatgagaggctctttccactgttttgcaataattaacatgcaggaattctgacctgattcagttgccatgataccatgacaatattgggaatgacagctttgaatgtgtcatccagtgagaggatgacattgcatgtctgggcgtggaacattttatgcacctctgtaatgtaaggtcagaaacttttgtagctcaggatgaccttactgatttctgagccctcccacatctagcattcttcccatgtgacatattaattgaattgtctatatcacatttctaaaagtcattgataaagagacttaaaagaagactttatgcaaagcttctgcctaattatgtcttggtaatctctctatgtgtagtgtttaggggtcatctatgggatcagacagactcatattcaaatcctggtgcttcacttctatctgtgaaaccgtgggcaagttgcttaaattcactgagtctgtttcctcacctggaaatgagggtaatgatagctacctcacagtgttgttataaagaactgaatgagttaatgcatgcaaagtgttcatagtgccttgaacttgagtactgctcagtcaaggacagctgttagtgctgcagcttctcagcaaaatctgttatcttgtgctcctgcaattcctcactgaagttccctttctgggacagtcctgtgtgttcacatttgctgggacaaaagtgagtgtaagcagtgagtagtgaacagccacaggattttaatcaatcctgtgaagagggaaactttccatagagaatgaactggggcagttaaaagagaatgagcagtgactggaggatggaagccttgggttctaatgacttccttagtcaagagaagtttcatgaccttgattgtggcactaaatctctttagaataaactaaatagtgtaacacttttgagcagtgatccccaacccccggggccacagactggtattggcccatggcctgctaggaactgggctgcacagcagagggtgagcagggtttaagcaagtgaagctgagctctgcctcctgtcagatcagtcattagattctcataggagcatgaacgctattgtgaactgtacatgcaaaggacctaggttgcatgccccttatgagaatctaatgataaacgtaatacacttgaatcatccaaaaccattcccccccccaacccttgtccacagaaaaattgtcttccacaaaaccggtccctggtgccaaaaagtttgtgaatcactggtttagagaacagttgttcattggtatctttgggggattggctccagggcctcccccatataaaaatctgcagatgctcacgtccctcatttaaaatggtgaagtatttgcatataacttaggcatttcttcctgtatactttaaatcctccctagattatttataatacctaatactatgtgaatgctatgtaaatagttgttatactgtatggctttgagaataacaacaagaaaaaagtttgtacattttcagtacatatatgcaatttctttttcaaatattttttatctgtgcttggttgaatccacaaatgaggaaccccataaacatgaagaactgactatatgtgtttctggttcaaactctgttctgccacttactctcaaatccttcaaactctcccaaaggaagtttttccatattggaaagcaagatagtacggaagttaagaaaatgagtctggattcagatgaattggatttgaatcccaaagttgccattaacaatgtgtaaaatctcagacaagctaatttatttctctattcattggtttcctgatctgtaaaatgggttgttgcaaagataaattaagaatacttttaacagtgcctggcacaaaataattagtcaataaatgttagatattattcacaaaataggtatcatgctacctcttcagattactgaggatacttaaatgaactaaggttaaatgaccagaacaaatcttaattattatcaacattgtaatttatgaaaacatggctggagatgtaatgagatttgaggcaaaattgagatcatcaggagaaaattaatagatttactatttcttaaatggaaaaataagaaaaatgagtgggagaagttatatttatggtttataatacctatgaaaagaatgcttttatttttgctctgaagtaggaaaaactaaatataagttctcaactcagccaataaaataataataacataggcaataatactgataacaataagtttaaaatgatattttcatgaagtaaaaaccgagagagaacatgcaattctttctcaagtgaggtccttgctttgtggagcttctattctggtgggaaacacaaatagtagagaagtaaataggttaacaaaaagaagacttcagacagtaattattgtataaagaaatgaaaataagccatttcattaaaaagcaactggtcttggggatgtagtagaggacaatctgctttagatttggttgtaaagaaaagtctctctgaaaaaataatatcttaagttgagctgtgtataataaaaaggaaccagccactctcaaatcaatggcaggggctttccaggcacaagaagcacctgctataagatgctaaagtggaagtgagcttggcacagttgagagataggaaggggactgatcatagcagaatattataagtgagtggaagaaacaatagtacaagttgacattagaaaaatttatttgcaacttgtaggccacagctgggagtgtggacctaatgccacatgtgaagtttgatggaaaaccatcagaagtctctaggctggttgtttacttaatctcatttattttttaaaaggcatgtcaggctgctatgtgaaaatccagatagtggcaaggaagctaatgaggaggccagagcagcagtccgtgtgagagatggtggtgtcggtttctgtgaagagattcatgttgtagaagaagagtcaataggacttactgagagattaaacagaaagggctcataagaatcctacgtttttggagatggtattgaagctggagacatcttctaagctaggctgtggtaatggaatgttagaactggagggttgataggctgaagtctaaaaagctgcatgatagatatcctatgctgaattttgccatttttctttgggtgtatgtttaagtttctgttgttattttgttttatttatacatatatatatgtttgtgtatatatacttaattttaattatttaattatgacatagctatcgtcaatatccagaatttatatatctgtaaacagaggcaagaagaggcaaaataacttattcaagtttacacagttagtgattaactatatgaccatttaagatatttatggaccctccatattgctcttccaaaaggctgcaccaatacacactttccctgcaccatataaacaatgctcatctccacaaactctcccagcattgctagtgtttttctttttaagccttgtgaatccaaattgaatcctctttctggtcattaaggactgcgggccttctctttggctaattttgaatcttttgggagggagtcgggaagaggattatcagagagaacaagaaatgaaataataataataataacaataataatattgagagtttataattgccaggaaccattctaagcactatatacatatatacatgcatatacacacatgtatacatatatatacacatgtatataagtatatatgtatatacatgtatacatatatacacatgtatatacttatatatgtacatgtatatacttatatgtatacatgtatatataagtatatacatgtatacatatatatacacatgtatatacttatatatacttatatacatgtgtatatatatgtatataatacttagaatggttcctggcaatcataaactctcaataagtatacttatttatacatacatatgtgtatatatacttaactttaattatttaattatgacatagctatcattaatatccagaatttatgtatctgtaaactgaggtaaggagaggtaaaataacttgttcaagtttacacagtcagtgacagatgcaaagctagtcatttacctgcagaatctgtgcttttaatcattatctgctactgacaacctacaagacatctggttggtgaatgtttcatttacacaaagaaaacagtgtaagatagtttatgtggttcaggtattagaaactctagtagttaggaaaaaatacacacaagctgaataagtcagtattgatttagttaggatttgattgaaatactgaaagggaaaaactttctctactctctgtgtttctgttcaggtgtcttcattatcagaatatgtgtggcttagccagaaaaaccatcatcctcattatcaccatcactaccaactcctgagtgcctactatattctgggcccttagctataagcactggagatattatggcaatcctggaattacaatcacttttaaaagggggactagattaagtgaaaagatcccattggtatgaagtggtagagtctgtattcaaacacagtttgtctctgtctaactttaaaatctttactcttcccaaagtggtaaatgaaggaataagaagacagattcataagccaagatggtgtcaaagacaaagaatcacataggtttacaaatatttagacagtaagcaatagcaaaattatctggactttgaaaagcagagatgaatagaaagatcttgattctaaggcgggaaggagtcactggaggatttttgtggatagaagtcacaaagtaggattcgtgtttggaaggaactattaatagttaccacttactgaatacctatgaaagcctaagaattttcaaatatttaatataataactttatgaaataatttaatctcacttgaggctcagaaattttaagtaatttgctaatgctttcatggttggtaaagagtggattcagaacttaagattctgatctaattggaaagctgatgttcttgccttccttgctaataaatgttatagggatatagatcagacaacactgccagatttgagagtgatggaggctgggcaatgtgacagcagctggcagcaacagccaatatcaatttcatttcacatgaggggacatatagaaactcatagtttttctggttggctttttctttattttccttgaaaaggctataggtagtatattctgaaattccctgaattttctagcagtatgttggaatgcttgaacccatctttctttttttttcagtgtaagcttggcatatgatcaagaaatatggtttttaagtgtttgggggaagaaattacatcaaaattgagaggtgttaaagcttcaattgggtcttgagagataggagacatttaaatgagatgtgatgagaaaattgatgacttaaaagtaattaattagcacatatggatatttagaaggggaaagaaatctagggcaagagttagaatatatgtggtttagcctcgactatgacacttcctagaaattatgtcctgaaattaattctttggagccatcttttctcagccacgaaattccagtaaaaatatttcacagagctgttggagttatgaataattaagttgaaaataattttatagtatctgggactaatattaatgacaaaatttttttggaacaggcaacatccacaattttgaatacattctaggtatttaaatttttaaatgttaggaagacaagaaaataaaaaaaattccttgtcaacaaaaatttgtcatctttggatactcttttaggtattgtggttacagacatgtataagacattgagtctgcactgttagatacatagctatgaaaagaaaaagcagttcataatttagtaattaaaatattgtattaaatgggtgatctagttgacacatgtgtcctagaggaggtttgaggagagaatggttcctgaagccaggtggacagagaactttccttgtagcaggtgaaactgctctacttcaacgttaagggagtaggcagattcctcaactgatactgtgctcttgtaataacattgcatcataaaattgggaagaaaatgatggatcaactagtctttctccctcattctacagatagggaaactgaggctcagagagtgcaattttcatatagcgtaactttttttgatgataaaatcagtactcaattctaaatatatctgacttccaaatcattgtgcctcaccactttaaccagtctattattacatttgtcatagcaactgttatcatcaatgaatgtttgagtaggtagataaaaaaagataagtatagatggatataaatagatatatagatttatagatatgtttaaaaagcacaagcttgcagtattcttttaaagcaactttgataatttttcattttactttttttccaaattattatttgtacagctggactaatttccagtaaaattgtttactgcagttgcattttaaaatgtagtttgtgttaacttttaccaaacttttaataaagatatatccatatcgatgatgcacaattgacaactctttccactgattatattttctaatttatggaggtaagttatgaagagtttactcctcaatttggcatgcaaggatttggccacactcagtaaatattcaaagcagaatagttagccaagatgtttgcttcaatataacattagccgagtatattaacttcctataaagaggagatttgctaacagaaaatatcagataggaaagccatgagaaataaagcaggatgagcccttatgatccgtgtattgtttcctttgcattttggactcaaatttttttctaagcatgtctatcattatttttattcacctttgttacagtctaattaaactctgcaatatcactttccccccaactattctcctttgagacttacccacatatctgtgtccagatcatccatctcttaaggtttttgtcaaattttatttgtcctatactttttttttttttttatctttcagctaggagtaaattcccccattccaaattcccatgggactttattttttggcagttataacttttcatttcaaagtaggttacactagggatatgccttctccatcttattatattataagctcctttagggcaaggtttgtatctgattcattgccagtaacacccacagaactttgaaactgatactaaaaaactactgaatcaatgaatgagtaaaggtttttgatagaggaaatgaaaaatgagaagtggattttaaaaatgaagaaagggatggcaggtctgaataacatgttcagtgcggaaacatacaattcttcataacgtgagaaacattcagctgatatatgacatacctcagagcaattgaatacaggagaaaacatggcagggagaaagtgttcacaattgtcattactgtgattttcaaactctttatatatgcctttttccttttcaccagttaatcaatatatcaataaatatgtacatacctctttgcatgtccttagtgtgctagatcctggataaaaactgatgatttaaaaagttatgctctttgaactttcaataaaggagaaggctggctgaagcaccctgttctcatctctgcttaaacacataacacttctatttattatgtatattatggttatattcaaggtgttatttgagcacattttattgcttaaacagtaagttagatatattaaaggcagaaacattgtaagtctcagagaaagaccggaagactactagaaaggttctaaatgagcaagcagagagcaagttaggaatgtaagccttggaacccaagtttgagatagaccatggttgtaagactaaagagttagaaatacaaataaagctgtaaaatgtgacaaactatgggtctctgagtagcttgttaaagttttagcataggtgggaagccactcaaagaagaaaagaaagggtttagaaattagatctcagagaagttcagctgtagagatgctagaagacataataatgatcggaaaacttagaggagacaggtagaaagaccaaggtgaaaaatccagtgctgtacatcatttgaaatggtcctatctctggctgaaatgggtaattgatggattcaatgttttttgaggggcattctgcactcactagagtaaggatttgatttttaaaatcagagatgagaaactggccaatctagtagattattcaaaaataagtgttggctgggcccagtggctcatgtctgtaaatcccagcactttggaaggccaaggcgggcgaatcatgaggtcaggagtttgtgaccagcctggccaacatagtgaaaccctgtgtctactgaaaatacaaaaattagccagtcatggtggcaagcgcctgtagtcccagctactcaggaatctgaggtgggagaatcacttgaatccgggaggcagaggttgcagtgagccaagatggtgccactgcactctagcctgggctgcagagcgagacaccgtctcaaaaaaaaaaaaaaattgttacttggctttttctatcagtacctatatcccctctaagtaacatatcagagtcccttctttcagaattgactgtctgatcaccaagataatgaacaaagctttgaagctaattctggttattaagcagagaaaagagtttctttcttcacttctctattaacatttcaaatgggatgatttttttttttcggggataagggtttgtcctgaatattgtagggtgtttagcagcatccctggccactatccaccagatcccatagcaccttcacagttgtgacaaccaaaaatgtctctagacgttgccagatgtcccctgaagggcaaaattgccgctagctgagaggcaataaaatggagcaaagctaagaaaaatgcaaactggaggttaaacccatgatataaaatgctgtatatgagatgagtgtgtttgtcccctggaattcagggtgatgaaacgagtcaatccccaaaatcggacatggtggaagattgaaaaagaagctgtggtttgggaaaaccacctaggaccgggagtcaggagaatatgaatgagttcaagttcttccactttctagctattcttgaatcaatgacttccccttgccagagcttcttaataaaatgaaaggatttaaatatgctctactagaatatactgcagcccattctaggtcaaaggctatggtaagtttgtgactcttcataaatctatacttggttctttgggtactgaactctctctagaactagactctcaagaaggctgagtgtgttttcttgtcagagcccaactaacaggttttctgtctttcttttttccttgtctcacaaggttcatttctatatccatcctcactacttaaagagaaatggaggtagaaagtgtgatctggcaaagtcagctcttttgccctaaaatgatagtcatttttccccttggaaaagaggccttaggctaaacagtttctctggagtaagcactatttttttgagctcagaaatataacctaaacgggcaaggaatcaagagtaaacttccatgggaattgtagagcccaggtctctacatacgcctctcttagaaaacggacgtcagaggatattcactgtttcctccataagtaggctgccattttcccattgcatcacagctttaagatgagagattactttgactcccaagctttgttttccagttcagcttcatgcataccagctaattaggcaacatgacaacagggtggagcgatacttgtattctggatgtttccacacccacagtggatttggcctggtgccgctgccagccaccctcagagcagtggcatcttaaaatgcaaccacacccagacaccaacaaattgtattttttaaagattcatgttaatgaaaaattgtatattattgattaatctgtaggcaaaaaagaaaagtgtcagctctttcttcccttttctcatcctctaccttttttgaaatttacagatacaatgagctagccatgtaggtgagtatacgtggtgaaggcaggagttgaggcggcttgacccacacaatgccaatttggactaacccaggcttttggcatatcaggaacacgggctagcttttgcttggcgccttagagcttgtggagtacgttcatttacagtttaattatattttcatgacaaaactgatatataggtggtattatttatattttataaataagaaaaatgggctcagatataaataaacgtgtcaaaaatcacacacaagttgaggggcccagttttgaccccaaatctcattcttttgtcactcttttcatagctattttctatgtaacttaatggtggaatgttctggtctaagatgtcatcaattaattctgtatatattgagtgctattatgttccaggtactgctacctgcagaggcaatatttttattacattggctgatatactcgacaagtacggtttaattggtctgccttctttttgtcttcttgtttcatttcccagtgtgcctcacctcatgagtaatttaggaatgtaatctgtgctcacagtcttgcttcagctaaatgtgagggctggaattaaaacacagacttcctaactccataacaaatatcattttgaatacaatcatgaccttgctagaaagttagagaaataagagggattgataacagcatgaaaggacattttttttttcaataagacatttcttctctttaaagaagagaagatgtttgaacatttaagagctttaaatgagctgtttggttttctgaactatttgaaaagttgtcattttttcatgactcaagtgacctgtcaatccttccagccacgtgtggctattgttcattgaaggtgaaccaattccttccaaagacgtcaccatttgtaatacaataaactgttcaaaggaaggggcactaacaagtaaatgatttctctaccctggaggttactaatttgtacccttaaaattaggcacgttttttggcacttcccacaaaatattcagcacttcaagaaacttagaggtgaattgccccactatgatctcttgtttgatgtaatcaacaggctaacaattaaaagacttctaatgatagctaacattgagcattccccatgtgccaagtatcatctaaaggctttacaacatgaatgaattaacttaatccttgtgacaatcatgattaccacctctcagtttagtggtgaagaaattgagatagagggtttaggcaaattgcccatcctcatacagcaaagaaggcagaatttgacccctgtagcattgctccaaagccaaacactgaatttctgaattatgcttccttctcaagaaggcttggctatgtatagcttgactgttaccaataatagatgcttcagctctgtaatgtaatcatcccgatctgctcaatggtcttatcaaggggatgatactcatggtgatttgcctgaggtcaaagtgttagcttgtcacacatttccaaaatgtcactggtctctgtatggtgcagactggagaagtgatctctgttgacgcactgtctgggtcagtctggagaagacagtccaggaaaatcccgaaatacagtcatacctcagaatagaccaggattgatttccaggacccccgcacataccaaaatctgcaggttcttaagtcctgtagctaccctactcaatttgatgtgataagtgagtccttggtataggcggttttgcatccttcaaatactgtattttcggatatgcctttcggtgaaaaaactctgtgtataaatggacctgcgcagttcaaacctaggttgttcacaagtcaactgtactttactttggaattacggtgtgggtgttttaaaaggataacgatcacgcttcctctccatcaaaataaatcatgacgtttgtagttgaatcatatcagggaaaggtgtcattgagggtgtaggctgcttatttttaaacttgaaataactaggaaatgcactctatttgtcttagccctcctatcttcgtctgtaaattaaaggaaggaggtgtgctagatgaatttcagtattctatccagcccaaaagatatatattcacttagttaaaaaaaattcatttttgttcttaaaaataatacctaatttgtgcagaaaatttatcaggcaagaaaagtaggaagagaaacattaaaaagtcataagtaattccacccatcagagataacaaatgttaagatttttttgaaaacccatttctgtctcccttaacacagacatatataatgctttaaaaatagtatgaaatgaatatgatttttttttctaaaattaggtttactgagatacattttataaaagcaaaattcacagtttgggtgtgcagttacatgacttttggtagacaaaatcacttatgcaaccaccagcagaatgaagatatagagtattttcgtcacccccaaatctcccatgtgtacctatgtagtcagtcccctcccctgatctccagcaaatggcaatcactgttctgatttctgcccctaaaatttgtccatttacaaatgtcctataaatggaatcctaaagtatgtaacattttgtttcaggcttctttcactaagaataattcttttgaagttcatccatgttgtagcaggtatagtatttcttttttaaaattcttgagtagaaattcatcatgtagatgtgccagttggttgacctattcatcagttgttgtacatttggcttgtttacagtgtttagtgattctgaatcaggtcattataaatattctcttatgggttttgtatagacatatgttttaatttctcttgaataaataagtagtgttagattgctaggtcatatagtaagtgtaggtaggattttaaaatcctcttttgtaaaaacttgttttaaaaaatattttgtttcataatttaaaaaaatatttgttttaaaaaagatttacaggaatttggaagatggtacaacaatgttctgtgtacactttacccagtttcctccaatagttaagtctttttttctttagattttctttgtttctaattcatttgactcacaaaataaatgggtgctaactacagcagttatagtgatattattcacactacacagaagaaaccttgggtcattaattgataacatcaaaacctcattcacctacattgaacttccagaatcttctgtaccaactgcctaaaatactaaaaatgtagaatactacaaattaaagatgaataccttggtaggcatgaatgaccgaagtaaaaccaagatttatagagagtcaattaattaaaaatcttccacaaagagaagcccacagccacatggcttaactgacaaattctattaaatatttagtgaagaattaatgtcaactcgtcacaaacccttccaaaaaatagaggaatactattgggaacacctaccaattgattctgtgaggctagtattaccctaatactaaagccacacaaaagcatcacaagtagacaagtatgaataaatatccctgataaacacacacccagaaatgcttaaaaatgctagtgaaatgagtctagcaacatataaaaatgactgtacaccatgaccaaaaaggattattttatgaatgcaatgttgacttagcctccaaaaaccaatcaatgcaatacacataactaataggataaagaacaacaacaaaaacatcaaaaacaacaaaaagatctcttcaatagacacaaaagagtgtttgaccaatccaacacccatttgtgattaattaatctaaaaagcttctgcacagcaaaagaaactatcatcagtgtgaacaggcaacctacagaatatgagaaaatttttccaatctatccatctgacaaaggtataatatccagaatctacaaggaacttaaacaaatttacaaggaaaaaaaaacaaacaactccatcaaaaagtgggtgaaggatatgaacagacacttctcaaaagaagacatttatgtgacaagcaaacatgaaaaaaagctcatcatcaccggtcattagagaaattcaaatcaaaaccacaatgagatgccatctcatgccagttagaatggcgatcattaaaaagtcaggaaacaacagatgctggtgaggatgtagagaaacaggaatgcttttacactgttggtgggagtgtaaattagttcaaccattgtggaagacagtgtggtgattcctcaaggatctagaaccagaaatatcatttgacgcagcaaccccattactgggtatataccaaaggattataaatcattctactataaagacacatgcacatgtatgtttattgcagtgctattcacaataggaaagacttggaaccaacccaaatgcccatcaatgacagattggataaagaaaatgtggcacatatacaccgtggaatactatgcagccacaagaaaggatgagttcatgtcctttgcaggtacatggatgaagctggaaaccattattctcagtaaactaacacaggaacagaaaaccaaacactgcattttccacaatggttgaactaaagtaccctcccaccaacagtgggtaaagaatatgaacaaacacttctcaaaataagacatttatgtggccaacaaacatatgaaaaaaagttcatcattactggtcattagagaaatgcaaatcaaaaccacaatgagatactatctcgtgccagttagaatggcaatcattaaaaagtcaggaaacaacagatgctggagaggatctggagaaataggatgtggcaaatatacaccatggaatgctatgcagccataaaagaggatgagttcatgtccttcccagggacatggatgaagctggaaaccatcattctcagcaaactagcacaggaacagaaaaccaaacactgcatgttctcacttataagtgggagttgaacaatgagaacacaggaacagaaaaccaaacatcacacgttctcactcataagtgggagctgaacaatgagaacgcatgaactcagggaggggaacaacacacattggggcttgtcaggttgggggtgttgggggcaaggggagggagagcattagtacaaatacctactgcatgcggggcttaaaacctagatgacgggttgatgggtgcagcaaaccaccatggcacacgtatacctatgtaacaaacccgcacgttctgcacatgtatcacagaacttaaagtttaataaaattttttttaaaaatacaaaaattagctgggcgtggtggtgcacccctgtgatcccagctactcaggaggctgagacacgagaatcacttgaacctgggaggcagaggttgcagtgagccaagaacatgccactgcactccagcttgggcaacagaatgagaccctgtctcaaaaaaaaattgtgtagtttaaaatccacttattctatcatagaaccagatagtagcagctcatttaaaggatctgtaaatataagctgtaatttttctgccatctccagatgaacacttccttgatttccagtcagattttactgttagagagctgtccctttcaatggagtcatacctgtctctaatttcaatcaggttctacctgtgcattcttgggttatatgaagtagaactaactgttgttgttgttgttttctgcctgatcctaaagaatttcaagcctttcctaagtgttcaaagtgccaatgggtaacagttctggattaaagttgattataaacagattctatgaattctctatatattatgtgaatactttattttcatcaaggaaaacattctctcatccaatttttgtaattcgtggctatctctcatttattaggcacaaaccacttagaattggaatgtcctctccgtgaaatgattctttgtcgtcacgaaatgattctttatccctggtgatattctttgctctggaatctactttgtctgatattaacataggcactcaagcttttttttttatttgtgtaggtatcatatattttatcccattcttttacttttgaactatttttgtatttatatttaaagtatgtctctttaggcagcaaatagtttgggcttcctttttaaaaaatctaatctgtcaatctctatcttttaatttacatatataacctatatctatgtataatacatttacataaagtatattcttacatttaatatatacataatttacataaaacagatttacatatttcataatccgcatggtcagatttgcatctaccatcttattatctttaccaattgttttctatttttatcacctgctttctatttttactaccttttttttctgagacaggatctcgctcttttgcccaagctgtagtgtagtggcatgatcctggctcactgtagcctcgacctctctaggctcaggtgatcctcccacctcagcctcccaagttactggggctgtaggcatgcaccaccattcctggctaatttttctatcttttgtacagatgggatttcaccatgatgcccaggctgctaccacctgtgttttaattccccttttcttcttttctgctttctcttggatgaatcaagtattatgatatcattgtatcttcttttgttaatttactaactataaatctttggttgttgttgttattgtttaaacagttggttattttcaaaagagatttaaataataaaaaaatatatttatccatgtagctactctttttagtgatttcctttcctttgcatagattcatatttctatctaatatattttgtcttctgcctgcctgaaaaatcttcctttaacatttcttctagtgcaggtctgcagtaagtgctgaattcttttaactcttttatgtaaaatcgtctttatttcaccctcattttcaaaagttgatttcatgggacatagaattctagctggtagttttttccttcagtcacttaaagatatagtttcatttcctcttcacctaacattgtttattttttttaatctggtattatcttattctttactcctttgtatgtaatgggatttctccctcacctctctcacccatctaccagctgattttaagacttcttgtctcaatatttttgaacaatttgataatggtgtgccttgatatagtttacacacacacacacacacacacacacacacacacacacacattgtgcttaggattcttttaaattcttggacctcttagtttatagtttcttggacctcttagtttatagtttcttggacctcttagtttatagtttgaaacaaattttggctgttattacttctaatattttttttttacttcccaagacccactttcagggactataattatattagtctgcttacaattatcccacagcttgctgttggtcttatctttttttttctgttttattttggacagttactattgtacaccttcaagtttattaatcttttcttcaacaaggtcaaattattgttaattacatttagtatatttttaatctcagattcagattatgttttgtttttattccttgtctctgctttacatttttgaatttatgaaacagttataataactgttttaatgttcttaagtataattctaacatccgtaacagttttgagtcatttatcctacttgtgaatcatatgtccttgcttcttggtatgcctagtaattttagactgagtgccagacattgctaattttacattattgagtagtgaatgctttttgtatttctgtaaatataaagttttgccctgggacacagataagttacttggaaaccatataatctttttgggtcttgctgttaaatgttttaaagtagaacctatggctaattatcccctactactgagccgcagcctggtcttctgggaatcagagctgtgtgcctgtgcctgagcttcttctccgtgctctatggcttagacattttctcaggccagtaaactggagcaattttagggtttagcttgtttgtttactatctcgtgtatgacttttcttcatttcaaaagactgatgtccacaaccttgaagatcattgtttaatatattgtgtatttgtatttgttgttgttgtttgtttgctgcaggcaggagtgtaaccccagtccctgttactttattttggctagaagaagaagacatccagacagttttttcctattgattttgcctcttattatgggattattttcctgtttctttgtatgtctggtattttttaattttctgctagacattgtgatttactttgttaggtgatggatattttttgtattcctgtaaatatctttgaactttgtcctgggacacaattaagttacttggaaatagtttgcccattttaagcttgtttttaagctttgttaggtggaaccagaataggctttgaggttaattttgccccactactggggcaacacatctctctaatctgtaaatgaatggcaaggtttttctttctgacttacaggaacacaagttatctcctcccatatgtaagttctggaaatcattccttctaatccttagagtgattctttctgcagcctggagtagttttctcatgtacatttacctgtcagtactcaactgaagattctaaataaactatgtgccacaaatctccaaatgtttctctttgaatctttctcttcttgttaacatgccacggaaattttacctcctttggtctcacagaccctcaggtttgtatgatcatctcagggaagcttctattagctacctgtgttctccctctccgtgctacagcctggcaactttctacaggctgtgaactgtggtaatgtagggataacttggtttgtttcccccctcccaagaatcactgcactgtattatatcatgtccagtgtcaaaaacaattgcttttgcttttatttttttctcattgtttcaggtgaaagaataaaatagtttctgttattccatttatgccagaagcagaaatcatatttataatttaaaaataaactgatgtattccttaacccacacctcaatttgtgtttctattttcaggatgtaaagccggcatattaatattctcatttccccaattaaagccttcacattatttgattcctaataaaattataaaagctatgtcttcaagcagctttaacattgttaagaaaggtgaaggacataaggaaaagacagaatcttgatttaatagacttctatctgattctgattatcaccacttattatttgtgtctatggggaagctcctatatctctctaagtttcagtaaattgagaatgataacaatgatacatgtccagcctattctacaggctgatcatgaggacaaatgagaatgcatacagaaaaacacggataatttgtaagcattttacaagtgttagtatttaccttcatcaccaagactagtttaagttcattttttgctttcaatccattgatgtctttcaattctctttatttttctaaagatatacctctcctttggactcattccatattttccttttctttcatatcctagtgtcactgagttggtgtttaaaactctgttgaatatgaaaaaaatatatcagaacatgagtcacgaggcctgagttcctgtctcagctcttccatttatggctaatagatttgagacaaattagtcaatcatgcagatctttaaacttctcatccatgaaatggaaataacaccttctctctccttaatttaaaggtgaggatcagctatataaaataaacagaatgtaaatatttaaatattaatacacacatattgtgtgcaaactggtattatacaagttattctataactatgcactattaggcaataaattatacataaaattgctctataataatataacaaacaaatgcctttagtaatgctaataactgtaagaagtacttaaataattttctatacagtttttaagtacttttcccagcagcataacaagtattttttatctagaagagacagaaaaaatagtccctgtactgtagacaaaagacagttattactttttccagggttgtttatgtggatggcaaataaatgtccactatgtatagtttcttgctcagaaatatgaaaattaaaatttgacctctcagaggtcagagattctatctgttttttttagaagtttaacattgggctctaacacagtgctaggcaaatgcaggcatttagttaatatttgtcatattcacctggagagtattatggagctcatctggaataccataataatttcttaaccttgggtttagatttttaaatttttaaatcacattttagtgagttggtcccacgcctgagaattccctgattttagagttattactcattcgcttcttcctttttttttctgtctattgaatcaaggttgtggtgtgacacaatggttagtgctgtttaacttggtacattcttaatttttaaaccttacaacatggatttgagtctcagcttgaccgcttacatgccatgtggcctgctgtgagtcactgagcctctctacgtttttgttaccttccttttaaaccagccttctttcttaaagcaactgagatgaaataaaacagtaattgtggaaatttgttgtagattataaagcggaattcatctttttgggtttttttactcattcatttattgatttcactaaaaatatcatttatctaattggagagatagacaagtcaactgacaatttcaagactgtgtcatgagtgcaaggtgtggaagtagtaatggcaccgggtactgaggggcaaagagtaagaacactctattaagggtcaggaagggagcctctgggaacacacagtctaagcggaatcctacaagcaaagatatagaagtaaaggaaaagatcatcctacaaaacaaagaagcaatatgtgaatgctttagtaatgggaaacgttatcaagtaaacatttttggtgaacggtatttgggttaaagcaagagaagtctggaagtctgtctagctctgttacacacattgctggaggacatcaaaatgtgtgcattaaagcccttgagagtacaaaagataaaatctatacaaaggagccaaaagactgataacaaatgcaatatgtgaactccaacctgaaagtttgttaaccagttggctttctactttatctaatggcaaagattatttcttcgaccaaactttaatcaaattcctctgaaccctctttttgactgggccttaaccttggcctatgagaactgcaaattcttagcccaaatgatgatgtctacctccctttgtactaagaggcttgaacaaatgttaccacagtttctaatacctcaagaacatgttcctgatgacccagcccctgcttaagttcctatctgaaaagctcaatgctacctaaataatttactatttacctgactgtagacccatgacctcccatttcttagagcatttactttagaaaacttgcatctataaattagcaaacacaaatggcctaaccacaatgaccaaccttccctgacatctcctttagtacttttcctttagcacatgatatggtttgggtctgtgtcaccaccacatctcatgtagctccgataattcccatgtattgtgggagggacctggtgggagatgactgaatcatgggggcgagtctttccagtgctgttcttgtgatagtgaataagtctcacaggatctgatggttatagaagtaggagtttccctgcacaagctctctttgcctgctgccatccatgtaagatgtgagttgctccttcttgccttccaccatgattgtgaagcctccccaggcatgtggaactgtaaatccaataaacatctttcttttgtaaatgcccagtcttgggtatgtctttatcagcagcatgaaaacggactaatacagtaaattggtaccaggagtggggtgtttctgaaaagatacccaaaaccgtggaagcagttttggaacttggtaacagacagaggttggaacagtttggatggtccagaagaagacaagaaaatgtgggaaagtttggaattccctagagacttgttaaatggccttgacaaaaatgctaatagtgatgtgaatgataaggttcaggctgaggtggtctcagatggagatgaggaacttgttgggaactggggcaaagatgactcttcttatgttttaacaaagagactggtggcattttgcccctgccctagagatttgtggaactttaaacttcagagagatgatttagggtatctggcagaagaaatttctaagcagcagagcattcaagagataacttgggtgctcttaaaggcattcagctttttaagggaagcagaacataaaagtttggaaaatttgcagcctgacagtgtgataaaaaaaaagaaaatccattttctgaggagaaattcaagccagttgcataaatttgcataagtagcaaggagcctgatgttaatccccaagacaatgggaaaatgtctccaagagatatcagagacctttgtggcagcccctcccattacatgcccagaggtttaggaggaaaaaatggttctctaggccaggcttagggtccctctgctgtgtgcagccctgcgttgaagacactccagtggctgaagggggccatggcttgggctatggcttccgagggtgcaagcctgaagccttgacagcttccacatggtgttgagcctgtgagtgcacagaagtcaagaactgaggtttgaaaacctcagcctagatctcagatatatggaaatgcctggatgtccaggcagaagttttctgtaggggtgaggtcctcatggagaacctctgctagggcagtacagaagagaaatgtggagtaggagcccccacacagagtccctactgggcaccacttggtggagctgttagaagagagccttcatcctccagaacccagaatagcagatccacaggtagcttgcaccatatgcctgagaaagccacaaacactcagtgccagcctgtgaaggcagctgggagggaggcggtaccctgcaaagccacagaggtggagttgcccaagaccatgggaacccacctcttgcatcagcatgacctggatatgagacatagattcaaaatatatcattttggaactttaagatttgactgccttcctgaattttcgacttgcatggcatctgtagcccctttgttttggccaatatctcccatttggaacagctgtattgacccaatggctgtacccccattgtatctagaaagtaactaacttgcttttgattttacaggatcataggtggaagagacttgccttgtctcagagtgtggacttttaagttaatgctgaaatgagttgagactttgaggcactgttgggaaggcatgatcaggtttgaaatgtgaagatatgagatttgggaggagccaggggtagaatgatgtagtttggctctgtgttcccacacaaatctcatcttgtagctcccataattctcatgtgttgtgggagagacctagtgggagatgactgaatcatggaggtgggtcttttctgtgctgttctcatgataatgaatgagtctcttgagatctgattgttttaaaaatgggagtttctctgcacaatctctctttgactgctacaaagatgtgacttgctcctccttgccttccaccatgattgtgaggcctccccagccacgtggaactatgaatccaatacacctctttcttttgtaaatttcccagtgtcgggtatgtctttatcagcagcatgaaaatgaactaatacagcacacctcagcattaaaaaagcatcctgcctctggttttagcagaattgagcttggtttctactggagtttcttttctctattggaatagcccagataaagtgagtcttgccacttttaataaatattcagctctgtttctctttaacactattctacaggatcataagtttaatgtactggttacttaaagagaaaggagcctacataagactgtattttcaaccgtataactgtgtctatacatttttacacagtttgcatgtgactgggtcaatacatacggtgagtgtattgtttgctatggctgccgccacaaaataccacagactgggtgacttaaacaacataaatttattatattttcacatttctggaggctagaatttcaagatcaaagtgacagcaagtttggtttcctctgaagcttccttcttggtttgtaatgggcaagttcccactgtgtcctcatgtggtttttcctctgtgtgtgcatcactagtgtctcttttgtgtgtccaaatttcctcttctagtaaggacatcaatcagtttggtctaaggcctaaccttataacctcattttaacttaaccaccacttttacttatctccaaatataggcacaccctgaagtagtggggtttaaggcttcaacatataaattttgggcagacagagtttagctcttaacattgagtacctgagacacattagttacagttgtaggcaatgtggttactacggtgtgtagtgtttaagaagctgggctctggagtttgaatgcctttattacattgactgtgatcatttgcaagatcactgcttacaagctgtatgaccttggaaaagttatagaatctcaccaaacctcagttgctttacctgtaagaataaaatgatacttaatctttatatttattgttgtacctaagtgcatgaaatgtgttagcaaattttatttctttacaattttttttttttttgagttggagtctttctctgtcacccaggctggagtgcagtggcgtgatcttggctcactgcaagctccgcctcctgggttcatgccattctcctgcctcagcctcctgagtagctgggactacaggtgcccgccaccacgcctggctaattttattattgttagtagagacgggtttttcttttagtagagacggggtttcaccatgttaggcaggatggtctcgatctcctgacctcgtgatctgcctgcctcggcctcccaaagtgctgggattacaggagtgagccacggtgcccggcctacaaattattttgtaaagataatctttttctaactttgctataaatctaacagtttcattcttccctactgtaaacacacacacacacacacacacatattacacatataaaatttgcaatgcttttttgctaaaattaggtagacttttttttttttttttgagaaagagtcttgctctgtcgcccaggcgggagtgcagtgaagtgatctcagctgactgcaagctccgcctcccaggttcacgccattctcctgcctcagcctcccgtgtagctggggctaaagacacccgccaccgtgcctggctaatttttttgtatttttagtagagacggggtttcaccgtgttagccagggtggtctcaatctcctgacctcgtgatccgcccatctcggcctcccaaagtgctgggattacaggcgtgagccaccacatccggccggtagactcttaggtacttcaggattaatttgttatgatttattgaaagactgtagctcctcaaacctctgttttctattgtcaggataaatcctaggagactttaaaatgcactaaatttttgagtgataaacagtgtggggccatgggtcaggggttcaagtaatatcagctatagggagaagctgattgttgtttctaaaataaaatataacccatatgaaaatattaatacaattaaaaattagacattgaaattcctgtcttcttaatcctaatctaataaaagcagtaattatgtctgtaaatagcagggtctatatactcagtaaacaaacaatgcccatcccattctattattagataaaatgagaggcttatctctagtttcttagtctttccagacaaacagaaaggaattcctacagagagagtgaagttagttggtaatgcaacattaccagataagaagatgagtaaaggctgttttccagttagtgtcttttacaaaggagaatataggccgggcgcggtggctcatgcctgtaatcccagcagtttggaaggccaaggcgggtggatcacgagttcaggagatacgagaccatcctggctaacacggtgaaaccctgtctctcctaaaaatacaaaaaaaaaaaaaaaaaaaaaaaaattagccaggcacggtggtgggcgcctgtagtcccagctattccgggaggctgaggcaggagaatggcatgaacgctggaggcggagcttgcagtaagccgaaattgcaccactacactccagcctgggggacagagtgagattccgcctcaaaacaaacaaacaaacaggagaatatagacatgttagattgatgggggaaaatattagaattatagaaaagaaaataaaaaaataaaaaagaaattatttcatcttttaagatatattagaatatataaattttactcatggtcacaacatacctctttttgcccaagtgattgtgtatgtgtgtctgtgtgtgtgtgcatgcatagggctgtatctagtttaaagcactgtaacgtctggattctctttttttttttgagatggagtctcgctgtctcccaggctggagtgaagtggcgcgatctcggctcactgcaagctccgcctcccgggttcacgccattctcctgcctcagcctccggagtagctgggactacaggcgccctctgccacgcccggctaatttttatgttttcggatttttagtggagacggggtttcaccatgttagccaggatggtctcgatctggattctctttgaacggtataaaagtctgtgagatggccgtggggaaactcagagaaattaaaggtataaaatgtaagaaagtgtcaaggctgagatgaccatcccagctagttcctactgcaggtttcttttatgacaccaattttggctggtaaagaaaagataataacacctaattggctgcctcacaacactgcataaacaaatcaaaagagctaatgaatggcaggttgttttgaaagctgtggaaggtgatctaatcataaaagactatagttatttattaactattatcgtcatcaaggctccctctgtgtagaaaaacagaagactttaggaatgatatggtaactttatattttggaaataacctttgtttgtagtaacattactgatctacaacaatctttataattttctcatttcctccccctgtatcagtatccttcagattctgccaacctcataaatgcgtaaggttgtaaaattcatagtttttattatctaagcccactcatttctaatgagaggaaaaaagtttctacatgtttgatgaataattgaaagagttaaaaacaaggatgatattttgagttagaagaataccttgataacctaactctgacccaaacctgagttctccaaaccttcaatcccattcatttaaatgtaatattcatggtgattttcaggaatgaggagtaattaacagagcatgtgatgaatcacctctggctttacaacattcctaaaatgaaatggagaagaagccctaatgaaatgagccagctgatgagtacttccaattttgggggtgctcactgaatcttctttttactactttctccatttggaaaagatatcagtttcaaactttttattcatcatttcagaaaaggctggcatctctgaggagctcttttccagtaagaaggaaaccaatgtcttcaatgtttcctcatagtagagattcctaagacaggcaatcatcttttggttcttctgttccaccctagcaccacttccactcctgggaatattctccatttgggctaggctaggggtcactagagcataatacacagtcattgattccattttaaggcatcaaactcttttaccgtcaataacagaatatatggttgggacacatttcgtatggtctgacagggcagatgaaagataaaaaattagtattgatatgtgaatatttagaagaggcttttagagaaagagacaagaaatcaatgctgattgaaacagagcaatggttttcgttaagttttaacaggtgatgtttcgatttgtttaggcattatggtttaaaatacaattaaaagggaaaaagagaacatatatcgttatagtttaatttcacctcaaattgtgttggggtagtttttctatgctgagtaaatataaatctattggtgaaatccacagtcaacagatgtttacttttcttggtatcttagaaattatctagtacaaccacgttattataattatgtaaaaatgcaagaccagctatcattaactatcaagcttatcacataaacttgataattgttctaagcacctctctctctcacacacacacaaacacacacgcattatatatatgatttatctctaaacctcttagcactagtacaatgtacgtgttattatttttattttacatattaggaaactgaggcttagagaaaataagtgacttgtccaaggcaacatggctaacaattcaagatttggacccatttctagcttgcttcaaagctgggttcatttctatccctacatagttgaaaagactacatagaatagaaacagatttctgaaaccctgtctcattctctttccattaagctatgatggactttgattttctaacctgtaacaataatggaatttgaacttgctttccgtggtcactaattttactattccattggaaaggagccaagctacaacaatagtgcagaccttgaaaccaatgattttatatatatatatatatgtgtgtgtatatatatgtatgtgtgtgtgtgtgtgtgtgtgtgtgtgtgtgtgtatatcttttttttttttgatggagttttgctctgtcgctgaggctggagtgcagtggcgccatctcaactcacacaccctccgcctcccgggttcaagcaattcccctgcctcagcctccagagtagctgggactacaggtgcgtaccaccaagcccatctaatttttgtattttaatagagatggggtttcaccatcttggccaggatggtctcgatctcctgacctcatgatccgccagccttggcctcccaaagtgctgggattacaggcgtgatacactgtgcctggcccagtgattatatttttataggaaataaattatttcatgagagaaaaaagaaaggacgtattatctcactgtgataaatctcataatattggcatactccctaagttgggcaactttgatcagttttctggaaccatcataaaaaggcctttaattggataaagtctcgaacttttcttctgtggatgtgaatatcttgagaagtactggaatgaaacaatttggctctggtttcagtcatcttcacatgtttcttcaggtgctttcttaagctattagggcaaaataagctggtagaaaaaaggtgttacttgtaggatgaaagaagcaactaaagagaagaaactttctctagaaaaatgttacatttacacatttataattgttaacaacttttttcttcttttctttttgggagactaaataatgggatgatacaggaagaaatatgatttagagaaaactgattgagccaaatttttcaaacggtaatatgggtaatcataggctatggaaagttaaactgagtctccaatgtttatgattatgatgtttggctaggatataaaataaggcttcagaatataaaatatcctgcagattgagaagttttaaaagtagttacatacaagttttatttttccaacgttcctgccttttctaatgtctaaggatgaagcagtgtacagagaggaaagaatgttatatgtgtggtctgcttgcaagtgctggatgcctcctctgcctgctccaactaaactgtctgcttatgagaaagtcattgctcctctgagttcctgcctccctatatattcaacattagaattttgccaggttatcttttagggtcgttcaactctaacatatatatgagtctgtgacactgaactcagacacttcagaacaggaaccctggatttctctggatgtggaaatctttaaatctatacctgactggtaggacaaccaatctgtcttcctttcctctcctctcccacttatgaagggagtccagtcagaaacatgtttgtctacgaggtagtatatctggtatttctgaggaattcggttattatataggattatagaatattcaactttgagtagggtctgtggactccatcaattgcgttctgggggaggtaccatgaaagaacattcctactttagaaatagatattctctgttcaaacctgacaccctgacaggatcctaaaggatggaagctaaagtggtgtggtatataagtcccatgaccttgaacaactggttttatgtgggtgtcaccagtgctttataaaagtaaactgcatcgccccgagttcagtcatactgcaccagctgagcaatgcatggagtggacctgtaggcgacttgcatcgtcttcaacatgaagatagccacagtgtcagtgcttctgcccttggctctttgcctcatacaaggtgagcaatttgtgtgtaatctaagcctcttgccacacatctcaaagccctggggaagggacttttctccccctactcctgccaaaaaatgtttacgtatgcatgtataatcctgaaatgtcttgccagacacagagttctgaagatttatatatgtggctttataattatgttgttatctttagaaatggcaagtagtttgagataatctgaattttctaaccatgagaaattcttccattaattctttattaattcagaaaactgaatagattcttcttcatcttcctcttgctaaatgtatcaattcataatgcatattcttatatatgtaatagacatttaaaacttaattgtaaataatatatgtattttaatgttataggtataaatgaaatattttttaaaattcaatcatctgttcttattttaaagcagtggtatcttctagcttattttagtcttgtgttttcaaatgctaaatgggttgaaagcatttctcccaaagagtgagggacttttgtgggagctggaaggtagatttttatatttgctatttaaccctaagagaacacaaattgcctagacttacgttgctctgaaacattaaaatttttaaaaagagaaactcatagatagtctgaaatcatatacaaataatgcccattttcctaaaataggtgtgtaggtacaaaagagcctatgttaatgagagagtataatagcctgtgaccttaatcttaccttctgtcagatctctaacttttgcagctgtaataaggaggtagagctgccagaattcagaaaattaaattttatgtatatatcctataaatgtaatgctatattatagtttcaactataatatagtttcaaaattataattggtatagtattttgtgtgtatgttatattgtaattttaaaagggaggctggcatttattactccgaaaggaccttttgaagataagctattttgatggggttagaattcacatgagtattattttccaaagtaattgtaactttctgagtgattagacctttgtgagtatatatactaatctcctggtccagtgcccttcttttatttgccatgataaatcttaatgtgttcaaaaaccatttgcggttttacaacatattgtcattaaagcaatcaagatgctgcattaaatggattatttgttttgtttattaaatattttacatttccttaactttggtttctatattttcatcccagatgctgccagtaagaatgaagatcaggttagtcctgctttttctgttcattgaattcattccaagattcccaaagaaaagtggtttgtggccaacaccttcatgttaataatacaaacatattatactggtaggtactaatagcttttgttaaaaacacagaaacagatttttatgaatcaggacatgagcctctctctcacacacacacacacacacacacacactcaacatattaatgatgatggatgtctgcaagaggcaatttatcatgttaaaggagcattttaaaatttcataaacaaaaaataaatcaactggaaaactactattgttccatttaacatctcaacaagccatgatacaccacataggaagctgaaataaattttctagtaatcattatgcaaaagagggtggtctgtatcttgtatatagtcggtgtatatagttcatgtaatgaatatttattgagcatctcttagatgtcagaccctgtttgagatgctggggttatttttaagtaaacaaaatagatgaaattcctgccctgaaaattacgttttagtgtaggaaaacagacaaattaataagtagcttagcaaaacatatggtacgttaaataatgataaatgctaggagaaaaataaatcaggaggcataataggatccctgagaatggaggtggtatccattctcataaggataatcagggaagttctctctggacagacagtattagaataggaatctgaaggtcataagggaatgaaccacgaaggtatttgcagtttacagcaggccagacagaagcacctgtgagcgcagaggccctgacgcaagaaggtgctttaccaactcttaaacctcttttgtttgataaattaaaaaatcattttctactagaagttaaattttttaatctatttgaaagataggatgaccaattactcacacacacacattttatatatttatatacacacacactgctatgcatgctattaattcagcacttaaagcacaatcttaaatgttttgctgaatatgtggcaaaatttgttttatctctggccacgaacattaaaggaataaaaatgtgaaacagctattctttacgttgaaactctgagaaccatggttaaaatactctcttgccgtattttgttgcaatgattttttttaaagaaacttcttacatgagtgttctagagaattttatcatgttctctactatttcatctaagtttactgatagggagaggtccagaaagttcagtagagtagaaaataagctagacatttgggaatcagagagcatgctcacttggaagttttatactgggaaaaaagaaggatattatataaatatcattgtgtataaaaccatcattttctttttcagagtccgtgatgatggttggtgatttatggcagatactgtgaattttacactgctatttttcatagcattaacctctatttcactgaaaaatattttaaaaacaaatttagtgacttcttatatttggtattaaaggcaagaacacaaagaagtaattatttatttggaagcctttctaatcagagtttttggatactgtgtcagaaatgaaaactattgatgtagtcttttttacgatgctgtgattttggttattttccaagtttagtagcttgggttcctttcagcatgataaaagcatgttaaatgtcataaacatgaacctaaacagcagggaaaagcactgcagcaatctgcaaggatcttaagcatgcttaaatttgtcatcacctaagagtcattcttcaggcaaaagcaagctggtcagtgctctaacactgagatagggcaatggcagctcctggagggttttattataatatctggagatggacaatagaagacaacaaattaggcctcagccagtgagggaaacaggaagaacttggccctagagggctccagttttcctgggacatgctgagaaaaagagaataacagcaacagtaacaaaacaaaacaaaaacaggccagggactggaagttaccctgcaagtaaacaggtgctgaaaagtcatctactcaactcaggatgacttttggtctaaatatgcttctgtttcaaccctctctattatggtcattgaaagggtattccattttgctcagagaaaaactcaactgctgctttccatttttatggtcttttcctgtttcccaagagaatacattggataatttcataactcagaaaaatagcattgaatctcatcttaactaattaatcactgtgaacaaatttcttaacctattatttgggcctctgatgctcagtttgtaagaaagggagtctttctaggaattaagttctcatctaacagtgatattggagaagtccaatttagggattattcttattgatgcaactctttaatttttcttataagtagagacaaggtctcattatatttcccaggaggatcttgaacttctggcttcaagcaatcctcctccctttgcatccaaaattgctgagttacagccatgagccactgcacctggcctgatgctactcttttatgataagctttcaaaattatttagagctttattccaggattatcatgagtcgtctatatactttctataagacttacttaataagggatatattttcattacaaagaccccaggctcttctctgattctactatatggattttaggatcaattatattcatcaaggtaagcataacttgcaaagttggcatttgatactgtagaatcagagatcagacaggtctcaagatgcccagttattaatctgtgtccagaaattactactctgctactctgatggagtcactgtgtagctataataatcttagagatatttaagcatgccatccttagctaaatttcccagggctggtctgtgatatcgtttagttattctccttcaccattaatcattttgcaagtgctaccaactgcctaccatttttaagaggctagattaagtacatcattattcatccaggcaagtatacttctgttctacctaatgctgtatctatgtcacctagcaaagtatagtaatccaataataagtgattgctggctcattcaatgatgatcataaagatataggagactactggagttcaagaccagcctgggcgatgtagtgagaccctgcctctccaaaaaaaaaaaaaaaaaaaaaaaaaaagaaagaaagaaagaaagaaaaaacaagcacaaaacaccagatatagatataggagcctaaatagaaacctttaataaattttttggaacaggttgtgtttgtcagagttgaagcaaaagctttgtttatttgtttcctgatacaagcaacttgaagcagattaaaaaaaatcaaaacaaaaaacaacaaaaatccccttagattccaaaggcctattctaaagacctagtgaattttcactgggtacagtggctcatgcttgtaattccagcactttgggaggctgaggcaggtgtatcatttgaggtcaggagttcgagatcagcctgcccaacatggtgaaatcccatctctgctaaaaatacaaaaattacctagatgtggtagcatgcacctgtaatcccagctactcagggggctcaggcaggacaacctcttgaacctgggaggtagaggttgcagtgagccaagatcatgccactgcactccagcctgggcgatagagcaagactccatctaaagataaataaatacctagtgaattttctaaattaaaagggaatataacattttaaaatcatactttactaggtagcagaaatgcaccatattttaagctcctaaaaaagaatgagtgatgtatagcaggactttaataataatatttaatattatttattaatatttaatattgaatgaatcaaagaattaccacttttgaagatcattctactttccttttccccaccaattctattatttaaaatgtttcccctgtcctccttaaactttgtataacggagttattggtatttacaaaaccaaaagcccaaaacaaacatagtaggattttagttccaagggatgtgccaaaaaaaaaattaccagagagagagagaaagagagagaaagagagagaaagccttatgcaattattgagaaatttcctcagtacttccatagattcacaaggtttgattctgatggtagtgatagtagtgctgatgacatttgtggggatggtggtgggggtggaagtatgggtactttctaaaaaatataatacaaatttgaaaatgcaaaatggttaggcctctcccagaacctcggaagggggatgtgacagtgaagggccctgaatcttaagctttattagctttaaggtaagtctgcctgtgctcataagtcaaatgatttatcaagggacatgaagttcttttcagaaaataaaccagtctagaaacttgttttccagataaatataaccaagaaatccttttttcatttaacactgttaaaatttctaggaactgatatgttgcagtacagccatggggaaatgtaggcagacattttataatgttcaatgctcaaacaccttgcctcagtccttcagcaacattttcatattcctttcacagcaattactattggcctactgtgtactaggtattttatatgtgtcatcttagcatattccagtaataatactgacaatcaccagcaacatcaaaacaataataataaaaaaggaggaagaaggaaggaggataatttattaattgaatatctactatgtatcaggcattctttgagggctttacatacttaatcttcaaaaaaccttggaattgtgtgtgtatatatatgcagacatatacatatatctacatatatatatcaaaataaagcttgttttgatgtacttttagctaacacaacttttttggcattatcttaggaaatgtgccatgaatttcaggcatttatgaaaaatggaaaactgttctgtccccaggataagaaattttttcaaagtcttgatggaataatgttcatcaataaatgtgccacgtgcaaaatgatactgtgagtaaaggtttctttctttctttccaatgtttgagttaacagctagtctctgaactggtaaatgtattctttttctttcaagtgcatttttctaaaccgaaatggttaaataaaagtgctgagcagatcactctgacatttcccatcagataaagttggataattaccacccacctggaaagattttaataatcactcaaacaagattctgaaagcattccagagggcccagtgtcaataccttctgtagcactctatagtcttttgaggatgtagttccactttgaacttcctggttttggaaaaaaatgaatttgacaaagaaagtcagattccttgggcctgttaagacctgattctgttgcagcctagggactgagaagattggcttaagcataatgccagactctcccgtgacagccaaccagcagaaggacttaagcaaggtataccctgattctgtgagctgccagtgtctttagacacctagcattattctaggatgagatgaactaaagggtagattatagtttccaactccttgcagctcagaaagaattagtatcctggaagtttaccaatctctattcaatgcttcttaacttggtttccttctctccattgtcaccccaaaggtaaaagaaggcttgggttatcaattgcaaatcctcaaaccagaatgtcctaatttgtttttgaaaaggaaggttagcctcaatttctgaccactgtcaaaacttcaacagtggtagcaagccaatactgagcttacccacttaggataattatattacaattggctttttaaatgtcaggttggtgtgtgtcacaggatttaatttggggattgacgtagtcaatcatattgggataatgaagctcagatcgtttgatcatgcactgcttctagtgaagagactgtgagactataaagaagccaggacaagatttaatagaggatgggaggcctagggcaggttgaataattctttctttttttgaaagctgaatgtaaaccagcaggtatattatttattataaaattttcttcttgtttcataagatgttttaatatgagactgaaagtatgaatataataaatttactgaaaaataatgtaaaacaaaaatgaaatgccttaagagtctaaagacagtttatcattttgaagttattcaattattatttttatgacttacgtaaattatgttagaataaaatttttttttttacctggaaagaaggaggctgtgcaaagcataaaagctgtcatcagattcctaaagaactggcttatggaaaagaaaattgatttgctctgtgggtccctagatgttggaattagaaccaatataagcaggttcaatgtgaatattctctttcaaaaactgcattcaaaaaatggtgcagatagctttgagagttggtgaccacctggctgttggaagtattccaggaaggtagtctgttatgcagttaaagttagagattcttcctataataccatgttcgagatatttttcaatgttgaagggagatctggggttctgtgtccacttctgaacatgctaccaattttgacatgccaggctaggctgaggagagcagttaaaattaagtttaccatgttagctgttattgttaaaagttgagcaaacaatgtttaaactatgctatttcttgtccttttccagggaaaaagaagcaaaatcacagaagagggccaggcatttagcaagagctcccaaggctactgccccaacagaggtgagactatttggagccaacctgtttacttttgagaggatgtttgactctatttagagctatctgtttattccttaattactaggtcatacctgttttgaagccaacaacttaggagggagggaacatgggttagtccaggggtgggctaaatatctggtacatcttgtccataggcccaacccatgatccgactctaaaaacattttaggcactgacggaaactaagaggtggagtgagccagtgtgatgtctgccttccaaggccatcatttctcattcctcttgtcctgtcttagcccaaagaagagctttcctgggactgtagaactaagttcaaatcttagaattcttattgcttgtgtaacttagaaaatttatgtatctctggatctcaatgttttcatctgtaaaatgagttttagaccgaatagaaactaagttttaaaagccggtctcagggtttaacatgttctagcaggcatttgactcattctgtttcctttttcttttactcttttgctttttactgtatatgttccagtacctggagggtcctcctaattcaactatagttgcttgtttatatctattttgcagacagggactcaggctaatattttgtttaagaaaagtgttctctggtaaaaaaaaaaaaaggtcataaaacattaagaagtaagatagaaggaaggaaagaaactgcaaatttatcctactatataaaccatttcacttgataatttttttcacttagaaacatttttaaaatctttacaaaattataaaaataaaatttaaaaaataaaaatttggggtccagattggtggaaatatatatctagcctacaatatctcacaaatgggttactgacaaagctgggactaccaccagctattctaaccactactcacatcaccccaggtctcctatgcagtttcttcactaatttccactttcttttccttctctgctggccccaacacgtaattaaaataatcagtcaaggttagtacaccttaattacttataacatccatggtctaacaacgctgacatcttccttggcagtgttagccaagaacatctgagaacctcagcctccacagtaaacatagtctactaaattatttgcctgggctcaaccagtctcacttttaaaacaataacagacaccacaaaattgatccataattgaaaactctttatctgtagcaaaagagagctacttttatattctacaaaatctgtgggggccagaaaggtttagtggcaactttatatgtgtcttatttgtcacattcaaagagtggctcactttctaacatccattctcctcttcctcctctgtcttcatcataaaaaaatgatatatctatagtgtttaaaaatataaaatatgaggaaatgacaaaaaagcaaaatacacacaaacataccaattttaacaaacctatctaaaaaatatagctagttagatgtttccatatgtagacacaaatttattgaagtttaataaagtaggagttttaaaaaataaaattacagtcttaagaaataaaattactttttgttaatatattatgcctgagtcacacacacacacacacacacacacacacacacacacacacacacacaaaactgtaaaaaaaaaaaaaaccctctagataaaactcttaatagcgatgtggttcactacttaggaaactacttacataaccaagtagtaacttacattaagttaaggcagttaacatttggctgtgtgcctttcaaataagttctgtctaaatttttccttgtctctgtatttaaaaggattcatccaattataccatgtgttttttgttgttgttgtttttctctccactataaaacagaacaatgtgctgattttttctgcttagactccgcccatcagaaatcaaccctgctactccctctcagaataaggtgctctgcatttcaaggagtttcctcctacagacatcctctcactctctctttcatcactaattttcttttcactagtatgtcatcctttcatttcccgactctagtattccctccattaacaagtcttgttggtactgcctccaaagtctaactccttttctccatttccatccctaccatctcaatccagtcatccataatttctgatctctggtgttttggtacatgtaaagacttgtttttttaattgatgaattcattcattcaatgtttatcatgatttaggttgccaactttatagaatattaagttcacacgagtctgtgtgtttctgaggtccctcttttttcagattcatttattgctttaataactagtatggtaagtcccccttcttagttcatgttgttaaaggttgatgggacctatgcatagatatatggtttccatatacatgttagagataaaaataactgagtttataaaaacttcatcttgaatttggtaacccagtgtgtttatggatacaaagaatttgtaaattaattggggtaaaattgactttttacagtattaattttctaaactcatgagcatagaatagtttatgaataagtcatataattttgatctactttataaaatttacaaaatattcagatttttataatttttgttaatatttttaaaatgtgtaaatttattactattttgaatatattttgttttttattgtgttttatctgtttattgttgatatagacaaattctattgatttcttcaggttaatcttatgtcagacaacttttgtttttgttcttggtagttgatcatattacctacatataacaagagttttataatattcctttcaatcttagcacatctttctttcttttcttatataattggtaaaggatccagacttcaatagttaaacactagtgatggtaatgaacatcaaataatccccttgtctcttcatattaaagggaatacctctaaagtttctccattgaatgtaatatttatcatagcggtttttacctctacacttcagcaagtttggaaaattcctttctatttttagtttgctgaatatgtgttgcttattattaaaagtcttctttgcaactattaaaataatttgattttttagtctattaatataaataaatttctggatatatttcttaatattaaactattattattttcttagagtaaatcatactttataatatattttaaataaatttatgaatttggatactaatatcttaattagaaaatttgcaattatgttcttaagtaaggtgaatctccacttttatcttttaaataattcttatctggcttgggaatttacataaaattatcctaaggtgtgacactttagactctgactaaatcaggtggtcagcagatcctctcctcagaaagcaactataaagctagacaaaattgaccaaaaaccattttagcaatctgaaaattgatcagcagtctataccaatctgagaagcatttatcttgaaaaactgctgactttaggaataaaacgagaggtctgtgatgttcttgctcagggatattcccatttcatcccctggcttggttggcatggaggttctatacagggtacaaaggtcagcaaaggcattgccattgttgaagaaggctaacctaatttggagtaacgagcaaaagtcatacccagaggtgttttcagtgtaagtgataatcttcaccaagggtaaggaaaatggtctgaggttgcagtcataattgaagcaagtgtattcctggctgagccttcacacgtagttgaaagagcccaaagagggtcaagagattcgcaaactcctaactgactataaagctgcgcatatccgcttaataaacacaaaatgtcccagtgagaagcaaatgctggagtagatgcaaaagtggcctgaactttgcatgccctcccctgtacacaaaggtctatctgagagggtgaaagcattgttagcttgaagtatttgaacacaaactgtgttaaatccttagctgaccattaaactacaaaaacataggggaaaaacataggaagccaggcttaaaaaataaccatgatagaaactatcattttcttagctgcacatcagcagctgcaattatgagagaggaagatttcaaagatttaatccagccacagaagcaaaaaaagaataaaaaagcagtgaaaataatctttaaagaaaaaattgtaaacctgagtacctatattatctaaaatgttgtttttataatcaaaatgttcagtttttataatccacgttagtgaggttaaaaaaatgtcagttttcaccaaaagttataaaattttcaaagtaacaagaatatacaacccatactcaagaaaaataattaatggagtttgtctttaactgtgtacagatgttagatgtggcagacaaagacttgaagcaactattaaaaatgtattcaggatactaaaaaaaatcatgtttgagggttcacaagaaagtataataacaatgaataagccgataaaaactttcaatgaaaagacagaataatttttaaaaagacccaatgaaaattctggagttgaagggcacaataactgaaatgaaaagttcagtagagaggctcagaagcagatttgtgaatccttaaaaaagggaattaccaaacttgaggaaagcttaataaaaactaacaatggaaatacagagacagacaatagagaagaaaaatgaacaaaattatacactttttgagacagcagcaagaaagccaacatatgcataatgggaataccacaaatagaggtgagagaaaaaggaatacaaaaattatttgaagaaacaatggcctaagatgccttaaatttgatggaaaaaaattaattttaacatttaagaaactcaatacaccccaaataggataaatatgaagagatccacatatggctcatcatgattaaaatgttgaaataaaaaaaaaaaacaaagagaaaatttagaaagtggcaagagaaaaatgacacatcctatatacaggctgtatacaattaaaagctggcccctcatctaaaataatgaaggccggaaggcagtaaaatgacatgttcagaatgctgaaagaaaaaaaagattaagcaatattctatattctcaaaagctatcctacaaaaattaaaacaaaataaagatattactgtactaaagaaatctgagagactttgttgttaacacaactaccttaaaaataataatgaaggaggtcatttagctgaaaggaaataactaccagatggtagcttggacctacagacagaaatgaaaagcaccagaaatagtgaaaattgagttaatctcttagcctttttaaaagaaataatcttaatatataaggcaacaattataatgctgttttatcaggtatatatatatatatatatatatgacaacaatagcataaagggtgatagagaaaataaagctttattaaggcaaagtttctctattttaccaggattaagtattattctgaagtggtttgtaataaattaaggtgcatattgtaattactagagtagctactaagaaaatagcatatataataaatatataacatcaacaaaggaattataaaggtgtactagaaatatttaacccaaaacaagatggtagtagaacagagaagcaaaaaaagacaaaagcatattgaaaacaaatagaaaagtagaaatgtaaatacaaccataaaagtgattatattaaacataaatggtttaaacatcccaatcaaaatgcagaaattgtcaaatgataacaaaggaactataagctatctccagtaggtgctccttagattcaaagacacaaatagttgaaatgataacagatcggtaccatgctaagtttaaccgtaagagagcaggattggctatattaatatgtgataaaatagacattaagacattattagagacaaatagggatattttgtaactttaaaagtgtcaatacgttaagcaatataacaatgataaatgtatacacacctaatagaggctccaaatttatataacaaaaaatgctataattaaaagaaatgaaaagaaatgaagaattcaaaaataatcgttaggaatttcaatactccacttaaaatactgatagaacagctagactaaatatgaccaaatagaatacttgaagaatactatcaactaattcaacctaaactgaaatatagacagtgcttctccgttgattgtagaatatgtattattttaaagcaacagaggaacattttcaggatacactatatactaaggtacaaacataataaattttaatatattaaaatcatatatagtatttttttttaaccacaacagagttgaattcaaacccagcaaggaaaatgaatcgtgaaaatccccaaatctttagaaattaggcaacacacttctggataattggtgggttaaagaaacaatcttgagagaaattggaaaataatttgaattgaatgaaaacaaaaagacaacaatttaagacttactggacttgtctaaagcactttctagagatttaaatggcttaatcagaaataagagataggattcaataatttaatcctctaccttgagaatattagaaaacaaagtttagcaaactaaacccaaagcaagcagaagaagaaacatataaggattggagcagaaattagtaaaacacaaaacatacaaataatagaaaaaattaataaaaccaatgttggttctttgaaaagatcaacaaacctgacaaacccttagttttattttcccttcaagaaaagaacagaagacaaacattaccaaaatcaagagtgaaataggagacatcagtatgtgccctggagaaactacaaggcttatgatgaatattatgaaaaatattatgccaccacattaaataacttagatgaaatagaaaaattcctagaaataaccaaattattgaaaattgacccaagaagaaatggaaaatcataatagacttacagcataagtaaagacattgaatcagtaattaaatttaaaaaaatgcccaagagcagatgactttattggcaatttccattatatactgaaaggagaaataatatgaattctttacagattcattcaggaagaagagacactttacagctcattatatcagtccagcattattctgatacaaaatgtagaagacatcacaaaagcagaaaactactgacaaatattcctcataaacatagacagaaaaatccttaacaagacactggctggcaaatgaatctgcaatatgaaaaaaataaatcattaccaaataagaattatcccaagaaagcaatgttggtttgggaacagaaaatctattagtctaatacacaatattaacagaataaagggcaaaaccacatgattatcttaatagatgttgaaaaatcacttattaaaatccagcactcattcaagatgaaaactcacacaaaatattatcaatagaagtaagctttttcagtctgataaagaacgtctgtgaaaaacctacagctaacattataattaatggttagagaatgaatgctttgcccttaggattgagaagaaagcaaagggtggtttactgtcaccactcctattcaacattgtactggaggttcttagccagtataaggcaaaattaattaattaattaattaaagacactttttattggaaatgaagcaactgtctttaattccaaaacatgataccatatatgaaaagttctagggatccacaaaaagaaaaattactagaactaataaatgagtttagtaagatttcggtgtgcaagattaataatacaaaattgtatttctatatactagcaatgaacaatttgaaaattaaaatatttcattcacgatagcataaaaaatgtggaaatgaatttaacaaaatgagtacaagacttatacactaaaaactataaaatggtactgagaaaaatgaaagatccaaataactagtgagataaatagtccatgttcatagatgagaaaactcaatattgttgagatggcaattttcccaatattaatcaataaattaaacatattcccaatcaaaatcttgtcagtctttctttttggtagaaatagagcagttgatcctactagttatataaaaaatattgagacatttaacagtaactgaatttaaattttgttataatgcaatagtgatcataacagcgtgccgttatttcaagataggcataaagatcaggggaatagaatagggattacttacttttatggtcagttaatgtttaaccaacatgtcaaggtaatgctgagaaaattgaatataattaattttaaaaaacagttttatcttataccatacacaaaagttaacttaaattttattttggcactaaatgtaaaagctaaatatatgaaacttctcatgtaaaatataggaggaaaaaaattcatgaacttgggtaggtagagtgactttagacataaaactaaaagcgtaatccatgaatacaaaattaataaactgaaatttataaaaattgcaaatttgtgtgcttcaaatgacaacaagaagtcaatgaaaaagcaagttatagactgggagaaaaatagtcacaacctatatagcaggtaaggacttaaatccacaaaacataaaaacctcttacaaccttattataaggagacaattcaattaagtatagatattacaccaaagatatatgaatggctaataagcacacaacaagatgcgcaacaccgttattatttaggcaaatgctaattaaaaccacaatggtgtatcactacacgtacccactagaatgattataatcacaaagacagaaaatgcaaaatgttaagggtgtggagaaactggaacacatatagtcagatcggggtaatatacaaggttacagccatattggaacacagtttgagaacttcttaaaattttaaacagattgaccatgtgatccagaaaattcagtcctaggaattcagtgaagtgaaaatacaggtccatagaaagtcaggcatgtgaatatttatagcaacaatgtttttaatagttctaaactaaaaacaatccaaatgtccaaatgtccactggtgaattgataaacaaaaggaatatatttatacagtgaaatattattcaacaattagaagggatgtgctactgacaattttgcaatatggatgaacttcaaaaacactatgcaaagtgaaagaagctagaattaaacaattacatatttataattccatttatatgaaatgtccaaaaagggcaaatttacagagtcagaaaaatgtttaatgattgcttgaagctggaggtgggggctggatatactgtacacaagcacaggggaatctcgtagggtgatgaaaatattttaagaccagattctggcgatggctgtacaactctttccatttactaaaaatcactgaatcactttcaatgggtgaattttatagtatataactaatacctcaataaagctgtttagaattttatttttcagttcatatgattgtaactgctttggaatgatttgtacattactattatttaatacaaaatttcctagaccttcagaaaaatagattataaagctattgggactgagttattttggggtgggaatatctcagaccaatatatcaattggattaatgtttattgacctgtgtaacaaatgtagttatcttatactttttcatagtcatatatgcaatttggtttttgtaatgtattagcatactgatactgatgaaatgctttcatcgtattaatgtctcaatatttatatggtagtttttaattatcattccatatatttttacttttcatattacttgtctctttggtcagtcctactagaaatcttttatatcaggttgtttgataatatactctgttgtttctgttttctatggtgttaattcctgtttctttatgtttgttcctgttcattttacaatggggttgaggaatactttattctttaaatttaatttttaaaaaatttatgacaaatatttttgaagatattaataattatacatctcaggatttatactttaagtatttctatttatcattattttccaaacacttcttaatttctctacccctaatgttatttagtaatagattatctaattttcaaatatgtggaacttttaaatattttatattagcttttaattttattaaattttggtcagagaatataaatgatgtagtattgattatttgttatttcttaagactttgtgacctcacaaatattctgcttttatgaatgttttatatattctttttttttttttttttttttttttttgagacggagtctcgctgtcgcccaggctggagtgcagtggcgcaatctcggctcactgcaggctccgccccctggggttcacgccattctcctgcctcagcctcccgagtagctgggactacaggcgcccgccacctcgcccggctaattttttgtatttttagtagagacagggtttcaccgtgttagccaggatggtctcgatctcctgacctcgtgatccgcccgcctcggcctcccaaagtgctgggattacaggcgtgagccaccgcgcccggcctatatattcttaaaaaatgtttattttctgtttcttggttgtagttgtctataaaaatctaatggcttaatattcttttttttttacttaatatataaatttctgagaagtgtttgcttaaatctctaactccagttattgatttatttaagtctattacattctgtttgttattgtttgacatatttaaagtctatattattaggtgaatatatgctcatgattgttatactttcttgttcttgttcttgtcattttttacttcatatattgtccttctttgtcacttatgatacatttttggactcaattctaatttttaagtgttaatattgctgcatatgctctcttcctcttcatttttgtcttgtatatttttattatcttactggtttgatatttgcatgccttttcattttaatttttctcaatacatgggttcttttttaaacatcaaattaccaattgtctcttaatttgtaggtttagcacatttatatttattgttatttctgttatagtgagacttggttctttcatttttaaaatattttcggttactatatttagtagtttcttctttctagctttttttgggtggtgatttatttttgttcttattatgactatccctaaacaaatagccatacttttgattatttattctattgctaatatctgtgtctattgtcaatttctttgtcttctctccaaatgtatgttaatccactctccatatattttctgtaaatataattttgttattaacttgattttagcttaaaattcttattgcttttctcttttattctttttttgttaattatagaaattgttcctttcttcagatatttctttctatatttatttccttcttttggagacttctaattctattttaaatgttctttagcttttccttttttagaaaaattgtttcttatttccattgccttctaggagaattccttgatctgatcatctggttcacaagttcattatttatttgtacctatcccatctttattctttatattgctagatttattatcatttgaatattttccatatacaaaatttccactttgttcttcctttataacttctttcttgttattgttttacatttgtttatgcagatatcttctcttatctctccataacataattagacttgataaaatatttttctacccattccaatatttctacttcaattaatacatgttgtttagtatattctattttttacttgtcagatatacagatattcttattgtaatattccataatggctgtatttattttttctgctaaattcagttaggtagtgttcaatgtcaagcttcagtctgtagcccttctggtgagtataaggatagaaaaagagataagacccagtgctggaggttctgaatcccctcttttccactccagcttgctgccacttcaccaggtcaggaatctatctgtaaggtctcaggcattgtcaacattaggaagaggtgttttctgtaggttgtgatccaccacctaggggtttggaggggaaggagatggagtcatatatccttgcgcctgttttcatcatcccccagctggccttttgacttgctctgtcattcccctctctacacctgtgacctagttagtacgttgctgttgattttctggggaagggggatagtagtgattgttttgagttaattactttgatctgtaatttccctatgcttctgtagtatcttcaggaatgatttttgagagaaaaccaagagccatcctgctttttctttatgcttcggtcacatttcccttctttctgtccattccttaaaaaggacagtctagtttccaccacaaatcctttgcaattgccgttctctatgcccagaatgttcttccctcaaatgtttttgccactatatctaaaatagtccccattctggtcactattgtatttttctgtttatttgtgagagcacttactataatttatagttgttgtgcatatctgtctctttctatcagaatgtaagctccttagaatatgtattccatttttttctctctctctcttttttattttatattttctgtggcagcttcacagtccagaagagtgctaaaatgtagttaatatgtaataaattttgtggaataaatgaacaaatgaatgaatgaaataacttatatggccactgcttatcttattttcaatgtatttttaacttctttctaaacatatgaatagtggagtatgttctttagcttttcttttctattttcagttcttttccttctagataagagtttctcaacctgatcttctgtatcctacttttattctttatattatgtgacatactgatacatcataggtctacattctaagtgtttcatatttatcattaaaatgtctttattttgacaatgataacatgaagttgtattttgcaatgtgatattctaaagaaaaattatccagttttattatttggttttaggtaaaagttaaagtcaagttaactctatatcttttttagctaggttatgtcacaataataagttgccaaataatgtttcataagaattcacttgatccttattgcaaatctggaatgtaggtagggtgtgaatttccatttttctgatgaggaaagtgaggtgcaaagaggtgaagtgagtgggtggcaggtctgagacttgaacactagtcttcagttattactttgtacatttgtttttctttaccatcaggtttgttcctaagtgtatgtcacattattagaatagagatttgggctttctcctgccgtacctaaaagatgtttagtttacttggcttgtcagtagagaaaacattgaaaataacaacaacaacaacaataaatggttctgtgtcaggcactgttccaagtgctatacatgaattaacatatgtaaatccctatatagtcctgagagtttgacaaaattataaccattttgcacatgaggacactaaagcatagaggtgttaaataacttgtccaagtcccatagcttaagtggcagacttagaaatatgaaacaagcaatcctgctcttaattactattctaatctataataatagaaactttgctgtagtttatagtttacttagagctttcatatccgtaatctactgggcctcactactactctgtggagaaggcaggcaggattggacagacgaacaacatgccaagtttcagagtggtgacgtggcctacttcacccagacagcaagtggctgaagtaatactgaaattctttcttttgaaatctaattttatctgttcttggatcatgttttattgcccataaatttattagctcaatgtagccttcatgatatgtttttcttctccagcaatttacattattgtgggcttaaaatgttaatctatttatacatctaaggactattttgtttcttacattttgacgttccttgatcatgtcttttgcagctgaattgtgatgattttaaaaaaggagaaagagatggggattttatctgtcctgattattatgaagctgtttgtggcacagatgggaaaacatatgacaacagatgtgcactgtgtgctgagaatgcgtgagtattctctgaagtaggctttctccctaaaacgtgttctctctataattacatgacacaattttccctacagtctttaagctaacgattcattatgtgggagttagccattcctaaattattagtaccacttcttttactactcttaagacaaataaaggtgtatagcataacactttatattttacaaagcacttttatgtatgatttatcagatggttatcactttatgaagtagacagaatagggagattatagattatatgttcataatctataaaatgttatagattttatatttaaaatgtataataaaatatagctttaatataataaaacagatttaatattttaataaaatatagacttatgattttataatctataagttatagattatatgattatcatatataacagattatataatatatttacacacatacatacatatatacatatatatacatacacacatctatcttctatctatccatcatctattatctatttgtttatctatgtgtataccctttttcacagagaattatttcatcatcaaattatgtttattaagtgcttaataatttgtaatattagagtagataattgagactttcaatattaaatttcttcccatctctcaacatttaccaaatagctaaggcatcttactgtcctatatcttgtccctgttttgttctttctctaccttcaatgctagatttggttatcaattgtcttcaccaacaagatgacatacctgcttggcgggttctggcttgtgatctcaatcttgaattgtctggtcttaaggttttgcaaatatgaaaaccaaggtgtgtacaggctaatgaggggtattataattattcactttttgagatcctgcaagctttagctctccttgcaataaatattttcagcaaaataaaactgcattaaaacactctcatcttttgcaggatggtattttcagaaattcactttaaaattatgtcctcaactctcaccaagggtcaacatagagaaaccgaaaacaaacgtagatatatgaagaacacacagatttttatcagatatatattgtgtagcacaagtatgagcatgctatatatttaattcttactgtgtcttatgtggggaatcccattataaatctttaaatctctggtccaggtgaaagtttctctcccctaatttctggtatatttctttgtactatgtactttgtactatgcgatgagaatcatacttctccttgtgttgtttcccttgcagctctagctgctaggaggctctacaataaaattgaaaattttatttttatagtgcccctcagctgatatcctttgaaataacttttttcttatcacttttaaatatttagtttttttctttatattgtttttactaaatttttattgttttacagatgttatcattgtaatctgctttaactttttacaaattaggaaatatgtcttacatttgcggttctgtgttttcagatatactttaaaggtctacgagactgaacaaaattaattatcaagactttatgtactttctatgaaaaataaaatactagtcttcataacccaaataaagagtagtatagtgggatgttagataatacaaatttgactttgtttatttaaaacaacaaagttccttgggtgctgagtgttatctattatccagttacaagctttacttttccccatcttctgatgtggatccctcctctaaacaaaggttaaaaaaagatttctataaataacatttacaagtctgaatctttaccatctcttccatgttaactacatttctttgacttgaagttataaacagtgacttttattagaaaaagtaataaaataatactatgtggcagctgttttcgggagtaaaggagaatgacaatgcaatgtagagcagttaggtttgaatggtgggaagttctgtgatattaaactgctgtgtctactaacttttgattctaggaaaaccgggtcccaaattggtgtaaaaagtgaaggggaatgtaagagcagtaatccagagcaggtgaggtcaattgtcagcctgatgggaaatactgggaggctaacttcaaatagtaagtaggtgctctcctcttccttcttaggtgggagccttggaaggaattaattcttgctttatgtgaaatggaatacccagtactgcccactaatatgaaaaagctaattatagtctctgaaactggatcagattactttggtggttagatctttcaatctattgctgctttgtataaaaaaaaaaagaagaagaagaaataaaaaggaaactacatgtgtagtagaaagggcacaacacttcagtcacttagcctgcgttaaaaccccagcagtgtcacttgctgtttggagaccttggacaaattacttaacctaaaatgagatttgaactaaatagattttttttctatgatacagttttgtgagcctgtgatggtaggggaaggggaaggaagaaaggatctcatacatgtcacacttgtctttttccaggtgaatgattttcctaattttcaaggtctgatgccctttttataagcttccagagcacctgaggtgacttgcaccaagtcatttagcatcatgcaattttaaatgtctctttttatcacctaggagattgggagcaagttgatggcaaggactgtgctctgtctgagttctggcacatagtaggttatctgtttactaaataaatgaataaacaagtaaaaaagttttatatttaaccacatgaattatagagtacttactgagctacatctacacagctggtactgctctaagtggcccatagcaatgtcagagggactgagttcaataaaatttctgaaaacagtgttgtcagcattacaatcttggtaagtttcaagttcttttccctgttcttcaggatgtatgcagtgcttttcggccctttgttagagatggaagacttggatgcacaagggaaaatgatcctgttcttggtcctgatgggaagacgcatggcaataagtgtgcaatgtgtgctgagctgttgtaagtagcatcatccccaggtggacttgatgatgatgcacttggttgctgtcccgagaatcactcagcagagagataaaatccttttcatgaagcatgcaattctttgtctttacactgtgaaatagcctttctcacagaaaggcttcttttctttttcttcttatcattgattgaagtttcttaaaagaagagaataaggtggtcatgttagttattaaattcaagactctcatttcttttaaattacagtaatttgaaaatgtatagtgttttataaggcacaatattttaaaatttagaaagcactttcatatggaatgatctaggtcagtcgtctgacatccattgcttcatttgggcatatgtagagacccttcctgagtaatgtgaggctaattaaaataataatagtaataatgccatgtgtctgaatctatttattagcttaaaaagtggaacgcggatcattacaaaaggaagggctattgggttaatctttatctgagtgcctggcagtgcttgggcattaaagacgcagatgtggataagatctaattagtctttcatattctggctgttaaacaaggtttagactctctaattcacgtgccagcaaaccttaaattgctatatttacatcactggaactttaaaatcaggacagagatttaactgattagcaaacaaacgtcacacctgcctttgaaaattacagttagtccttgtagaattcaaggacatgtccaatcaggtttacaaaacagtgatgataactggtttccagacaggaaatcagcctgatttccactttcttatctaggagacatgttctctcaatgttcaaatctgccctaattctgtagggtttttttttctttttatgcattatgtgaaaaggggaatttgacctctctaactcctggtttcttactctgtggaactgagatagccacacctatctccggaatgagacgctaatcaaatgatagatgtgaaagggcttaaagctcaattcaaatgtagctttcattaacaacttagtacttttacatgaaagcaaacaaatactttacaaggtatacaaagttatacttaagggtgtggatggcaatgtctcaaatgctcagtttggtttcacccttgtcacagcattattttaaagctcttggttctgcctgttaaagggaattttcctgacaatcttctgtttgtcaatcaaggtgtcacacccattcagttttacagaacaaagcttctaattgactgtcagtgagtcagtttcacaccctttcttactataggcaagaaagctaatttacagaaagcaagtttcccagataagctattgccgtctttctttctttccttatctttggcaatttctctggctcaggcattgaagacggaaatgcttgtctcttgtaagaggatcattttcagcaattcgtagcagaggatatgaaagtgtttagcacaggactgaggatactgaaaatatgattgagtcataaactgaccaactgtttacttttcttaacagtttaaaagaagctgaaaatgccaagcgagagggtgaaactagaattcgacgaaatgctgaaaaggtaaaatgactcaccaacgcaattttgttcttgtggccatatttattaacaaatgtatgcctaaacctttgagtaatgaaataaagtcattgtcttttattattatatagatatttttcttaatatcaaaattccccaaattgactattcctagaatattaatcattagattcagatttaaaacagcatttcctacctaaggcccaaaatgtgcagtttccacctgtgtttctccagtcctctagcccccaaaagaagatataagatagaaagtttgtataaaccaaattctgcttaatttctagcagccttctttttggtttagtgtaaacccattttactctgtataaattgtttaaaattggcaatgaaatataaattaaacaggaataattttaaaatagtgagagtgttttaaacactatatccactagtgcattttatgtgcaattaaattgacacaagttgaagttattcactttgccattgtgattattctgttcagaaaaacctgcatttataaaggtcttgattctgctttaaaaaaaaaaaaagacaaatttttagaatgtgttttaaaaaaatccttaaaattatttttttgaaattacttgataatttaattattcaatctagtataaaaagttttgaataagcactttaggtaatgcagcctggatttcttaaatcacctactttcaatgagagggatagcagtttctttgctaaatggctaaccttttgttgagaagtcagaacgcctgagttttagccttggttttgccatgctctgggtgtgggagactaagtaaataatcatcctgggccttaattttcttgtcagcaaagtaaagaggttggataatgacctgaattttaccttcctgttggactgtgattctacatcctgcacacttttgtactaatacaagtgcactcctttttgcagatcgtagggcttatgttttcctaaaggaagaaacaagcccaccttttggtagtcaagagctagcccttcagttcgtaatgcttatttaatgaagcaaagctctcaacctaaatagggtattgaaggtttacatttaggaaaactaagtattcagaaccatctacagtttatgcaacacttgccaaggattgaaaaggaattcttttgtggtggttgttaaatttcagtctaaaactttgggtcatcctgtgatagttaacattttattacttcataaacacagagagttattttcctttgtttttcattaggtctctgtacttccctcttcctctctgtggctagggtcattgttttggtggggtcaccgggcatgatggtgtgaataggactgctttattgtgatggctcaatatgttccctataattaacttgtcactaggttgcaaacacagtgtttcttcagaatctccttggctgaatcacaacttataaactgaaattatcattgtttcttttacgagaatcattgagcattaattttttataccatgctatgattatcaggtgactgtcttctgcttctctatttctaggttgttacaaccatgaggtttggagcacatccattgctcctccaaaaataaatatcttcttaataggaagcagttaggattctctgttaaagcatcccaatggaatttgaattattttttaaaaaaccaaagaatgctagatctagaaaaggtcctacagagcatctgttccaaaaacctcattgtagaagtagtaactgtggttccaaaggagaagggactttgctgtggtctcccatttgggtgagagggacaatctagtggcccaggtcatttgactcctagccatgctctttatgcccatgttttcttgcctgaaattgaatgacgaaggtcacacagttgaaaagaaagttatagaccaggattttttgtaggtcatattatagtactatatctcaccacaaaatgtttaatgacatagagatccccaagcctagagtagcttagagtatcatttttttggtaaagtttagccctcctcacatagtagagttttcaaaacacagaaagtagcctgaaagtattgaaccaaagcatcaggaaatctgaaaacaaatctttcttggattttttttggtggggggaagtcactcctttttagcttttctaaatgagtatcagtcttgatgatctatctgtctaaggtgagggtgaaaggaaattagatctactctctctctacaatgtcagaaattattatggataaagaaggcagaatacacaaaaattatccacagatccatagagaaaatcaactaaagtaagcataacactgttggataacatcttgtttctttatacttacaaacttagctggattattcttgacttgatccatattaagtcacttttagacatctcatcttctcacaacttttttttctttttttttttgtgatttggctgctgcattttgttgtgtttgtgctggaacctcatgaaagatatcccctgacccctattgatctgaaagttaaaaagaaatacctagttttaatccaagaaaactcttggtcagccttattttttccgaggctgttttttatcttttaataaacctaccacataacagatacaagtgccaagtagttgacaatataattactgtttcttagtaatcctcattaatatgttgtatgtatttgccaacttctagacctgatgttttgtggtaataaatctattataaagtttccagattaaaacgtagaaaaatggtaaataaaattacttgttggctggatgtgttggttcatgcctataatttcaacactttgggaggccaaggcaggaagattacttgagccaaggaattcaagaccagcccgggcaacatgatgagatccagtctctaccaaaaaggaaaaaatttagccgggtgtggtggtgcatgtctgtagtcccatttagttaggaagctgaggtggaaggatctctgagcctagaggttagaggcttcactgagctatgatcattcccctgcaatccaccctgcgcaatgcagcaaaatcctgtctcaaaaaataaaatatcctgaaatgaaatgaagtaaaataaatataattgtcttttcaaaggatttttgcaaggaatatgaaaaacaagtgagaaatggaaggcttttttgtacacgggagagtgatccagtccgtggccctgacggcaggatgcatggcaacaaatgtgccctgtgtgctgaaattttgtgagtatagaagtggttttttcagagtgattcaaagggtgggagtggagattgattggattgatgagtaaaaataactttgaaaggaagctttgttgttgagaaccatctgagcagttttatgccctccacaaatcataatgccacctagtgagcaggcactactgatgtttgtctatttctgaagagaaatggattccattttccagttgaaatattgacttacagcatagcacacttcttaacattcccctgtgactgtgacctatgtgaaactgtttgtgaactaattctagtatagaatgggggtaaaagcaggtaccacgacttcgattgtttttcttcagtaattatcccatggtaacagtgttgatgcaacactctcagatacttcaggtttatacattaattggattactcttatctttttatctgggacatatgaccttgggagaagggcaaatctcacaacatacaaattatcacatttatgaaaatgtcttagatgacatctcatgacactttcggcttctctagctctacaagccctttcctgtgtcctgtcctatgccagttcctcccggtcttggccagatgatgtcccctcctcttgtagattacatttcagattatctttccttggacaagaactcctaaagtccttccctaattgaaattaaattctcataatccttagtaattgtcttttctaaccaccatcacagttggcaattatacaattatttctccaagtttttgttgactttcagtcttttctaccagcctcaagaactacaagagggcagggtatgtgtttgtattatatactcctgcatgcccagggcccagccaacacttgcccaaaaaaccataattactcactaaatgaatgaatgaagatatgaatgaagatctcccactctcaagaagcttaagttcagtagcagaaataagccatggacatgtgcacatatttatatattgcaaaatagaataaaaactgctgtataagagaagactattcgatacaaaaacacagcaatagacatagcgctcatttgtatttgggaactggaatgtcttcttcaaaaaggtagaatttaagctgcagagttttaaatttcttttaagaaagggagatgagaaaaaagatcattttagtggaagtaaatggtataaaggtgaaattaaagggtctttttggggatttgaggtgtttttaaagtgtttgtactaaaactcaggacaacttagatatttttccatctatacctaatgactgttttgtaacatgaagatcggaagcatctctactcatttattttactttttccagcaagcagcgtttttcagaggaaaacagtaaaacagatcaaaatttgggaaaagctgaagaaaaaactaaagttaaaagagaaattgtggtgagaatcagtttgatcaatctagttacaacttgtgtgtgtgtgggggggtgcgtgtgtgagagagtgcatattacatagtatgcactttcaatattgtttaatattttccacactactagtaggtttgctggaaactaatttctagttattattttgtgaaacttagattaaaaaattatggcattacaatttctagctgtatatggaggcaattaatcaagtcacattaataatgtagttttgcactcctaaatgaaggtgaaatatcaaaacattgtctgaattcaaagtgtgatatgtagtcttcgatgtgtggtagctattgtgaaggtatttacttcaaaaacaatatcaatgttgaattttaatgtgcttccttttaaattatactgttctctgctttctaagtatcttttaactagtcacctgtctgtttttctactgctaccctcttagctcagacacttaatagttttcttttgcattgacgtattggcattgtacctggtttgtacactgttggtctccatctttctcaatcttcaagatttaattcatcctccatgttgttttcatatgtcatagaatatgagaacaaaaactatggttccacgagtcagcgatgctataaaattccaatgtttgaagatattctagagtatattcagaccatttcacttcttatagaaaccctaacttatttcttacagacagttttccagacttctatgatgtgcagtcaacagttctcctaagtaagccactccatcaggccaccctctgccagtataactccattttctttctttctttctttttttctttttctttttcttttcttttctttttttttttaagacaatttctttctttcttttttttctctgtcacccaggctggagtgtagtggtgggatcatggctcactgcagccttgacttcccactctcaagctatcctcacacctcagctttccaaagtgctaagattacaggcatgagccactacacatagcttaagcctcattttgaactgctttcttcccctcagtcctaggttaccaagtccttttaattttgatattcaaatatctgtcaactactattttatcatttatttccaatttttctccttccttccctttcttcctttcctttctcctttttctttttcttctctctattcttttttctcttttcctccctctctttctctcttttttaataatataattactgttctaacttcagtccctagttaatcaaatcctccacacatctggttgataacctttgtaaaacaaagatttgattttgccattttctgctataaacatttataattttcccattgcctaaaagtaatatccaaattcctttcaaagtttagtggtctttgattttcaaggtctccttttgaccatttcccaaatattattctctttatccaactaattatttagccactatattcataaatatgttagattacctcaaaatagcatgttctttcacacccctgtgtgtttgtccatttaattcctcttggatggcctttttccacattatgttcctgaatatattctcaagatagaacttagacataagttccctgaacttccatgaattattcttttcattgtacttgtacacacttaattcagactagtgttatatttcttagctttttatattgcaattacttatcttttccatttgactgataaagaacataaatataaataaatcatatttctatttatatattcctaacttaagcattcgttgaaaatgtaaatggatattacaaggagagaaatatcacaatttttggatggtcctaaatcttaaaagttttatttttcatccttaatttctcttttttctttgtaaaataacatttaacattcatacatagaaaacagaactatatctcaactttttcttattcattattcagaaactctgcagtcaatatcaaaatcaggcaaagaatggaatacttttctgtaccagagaaaatgaccctattcgtggtccagatgggaaaatgcatggcaacttgtgttccatgtgtcaagcctacttgtgagtatagagttttagaatgtcaaagaaagaagggatcttgcaggtaatttaatagaaacagcttctttcatagatggggagactgtggctcaagacagggaagtgagttgaaaacattacatggaaaatatcagtgatagagctgggagtaagtacctagagttatttgttttaagacgccttgttcctctgacactccctcttttagcactggaatgtcctgacaaacatgaacttgtacaaatagtagatgcccccttactcctgaaacttcacacgttagcctgttttagcaatttataggtatctcatcttccatgggagttaagagtccaaaggtgatgcttaatgtagaaatggaataaagtcaaaattcccatgaaacaacactaaactcctataaaattacaatgggtattattttatgtaatgcaatatttctcaataagttagaatggacagttttctttcaagatttacgatagctctttatttggctgagctcaaattaagtatttaacttatatttagaatctatggctttctttgttttgattgacaactacatatggttgaaatatcatcagttaactgtacatactgtgcaattccattgtacaaagcaaatttaggcttatttgttttatcagtatatggaaattattgtggttttttttttcacatcttgtcctttagatgaaacagctatgagtaagcaaaatatttaagtttaaagcaaagctagggtacacatggtgtgatagatagaccatggtcttgagggaggagaccttggttgtagtcatatcctgagatgtagcaaagaccccctctacctctcatcttctctgattaacaaggggatgagtagatgtgctttgttaaggccactttcagccttcaggttatgccaccatgattttagttttggtgcctctgttatgaacattgatcatgctccttttcttactatgggcaagaaaactaatttacagaaagcaagtatcccagatccactattgccgtctttctttcaacattaaacagacattatgaagaaatcatagcaccatactatcctggaggatattttgttgcttctcattgatatgcagtgataaagggacaaaattgttccactctaaggagggagaacagttaacagtgcaaggatgtggagaaatcatggcatgtgtttgttcctaatggatctgcttctttttccctcttattcagccaagcagaaaatgaagaaaagaaaaaggctgaagcacgagctagaaacaaaagagaatctggaaaagcaacctcatatgcagtgagtggaatccatccaataaatcctatttggtgctataatttgaacaaattttaagagcctaaagggtgagattttgccctgcagaaatccccagaatatcttaactcttcaatctggggatggtattgagatgaattatatgggaagattgatccattcttgctgattaaaaactaactctgcaaaaaaaaaaaaaaaaaattgtttaaaagctgaaaaactgagttctacttctagttttatcacttatagactgttagcttttgctaactactttccagagaaattctacatgtatgctttctacatatgagtttctgatatttcacatctaatttgagataaaaaataccttgattcccccaccaacgcatgatttttatccctgaaatattacaatattagtttccaaagccttagctcagttatcatcaccaatggttttgatgataaaagtctcctaattttcactctggattttatcctttcccttgcccaaccagtctccctaacatagttggagtaatgtttcaaaatgtaaataagatcataatattgctcttaaaacccacaagcagctcatcatcatatacaggatatgctttaatcctgttatctctcctcttatttgtatccttatctccattcagaaaatcatgctctgctatgtgccatgtcttttcctacctgtgtttttcagctagttttattttcataaacctgtgtgcgtatttcccaattcacttttttttgcccagtcaaatcctatttacacttccacagtctcacctaaattgttcttgctccctgacaccttccctggtttcctttgagttctcagattttattgtaccctgtatgttcgtacctattttattctgtttagattatagtggaatttgcttatatattgcttgtattatatggggacattgtgctatgttttattttttcctatctcttggcatatgatgtttttcttgttgtcaaattgaattttacatttgagaaaaacacaattaaaatcctcagctcaaagagatgtaacattagtttctgccaatgtagatgtttgaaccttctgctttaagtagaaatgaaatatatggccaacttacttcttctatctcggcaggagctttgcagtgaatatcgaaagcttgtgaggaacggaaaacttgcttgcaccagagagaacgatcctatccagggcccagatgggaaagtgcatggcaacacctgctccatgtgtgaggtcttcttgtgagtagccctgcagctgggaacatggaggaatgattttgttctttctatttcatttccatgttcaattatgggagggccacttcaacataaaaatgaaagaattaaggcatatttagagaaactgtctgattggagacatgtatttgaaaatccatgtcctttgaagattgtcaagacttcacacttaagcaaggagaaagtcataatcttgaaatattcaagtagttttgtcttttaagtgtggaaacaggacaagttctagcttatctccgtgaataaaagtgaggccagtgggccaaagaatgaaaggtctggaagacaggttccaagtggatgccaggaagaacttcctaacagtttgcggatttcaaagatggatgatttaccatggaattccaaggatgatatcagtacagactttacaggcagattaaagcaaaggcttgggagtcattagagatacagtaatgagcattggaaatttagaaaaccacctctggactagggtttaaatcccaagtctgtacttattatttctatatcttcaggtgagttatgcattccgtctgtcagtttatttgtatgttggggttataataatagttttgtaatgcaattgtgaggatttcacagtgtaagcacagggttaggcacatcacattcaaagaatttaatcgttgttaagtgtaaaattaaattatatttgagatcacttctaatgtggcgattctatgatttttacttatctcttcttaaccatccttttttagccaagcagaagaagaagaaaagaaaaagaaggaaggtaaatcaagaaacaaaagacaatctaagagtacagcttcctttgaggtgagtttatatcctccagcaactcagagggatatggccctgaggatccacagatcatgttcagggaacacgtgcattccttaaaactgtatgaaacaattgtacagtttgtgttttcatatgtgttttcatgtgtgcagttatacatgtgcatatgtgactatttcttggttgttgggttcattgtttttatcacttaaaaaatccatgccttcaaagttaatcattctaaaataagccaattgctaatcctcgtttaagaaaaaaagtacaagctttagctatttttgcaatctgattcagcctatgttcaacactttcaacttcctgcctcaatttcacaggagttgtgtagtgaataccgcaaatccaggaaaaacggacggcttttttgcaccagagagaatgaccccatccagggcccagatggaaaaatgcatggcaacacctgctccatgtgtgaggccttcttgtgagtagagcagtagccccatagcgtctgaggattgagcagtgggaatttccatgggaagttttcaaaccattgtgaataatgcattttcttcttcagtgtagcattcagtcttgggtgtcatatttaaatggactaaaaacaaacaacagcaacaataaaacaagtggagggctttctattatgatataaagagatgcagaataagccagacacagaaaaacatataatgtgtgatgtctcttatatgtgggatctaaaaaaagctaactcatagtagagagtaggatggtgcttacaagagaatgggagtagggaagggtgagggttgggaatgaggaaatgttaatcaaagggtgcaaagttttagttaagcaggaggaataagtttatgggatgtattggacagcatggtgactacagttaataataatgtatcatatatttcaaaaacattaaaaaagtaaatcgtaaatgtccttacaccttcccaaaaaagataagtatcatgagacaactatgtaaattgcttgatttaatcatcacaatgtatacatataccaaacatcacactgaattcaattaatatgtacaattattatatgtcaagtaagaacacaatttaaaaaagtgaggtgcagaataatttcttctatgacatttaaaaagtaacctagaatcattcacccagagaagagaatacttcatgataattatactaattgcttttagttttatgaaaacattatcagatgaaataggaaatacatatgattacacataaaatattacaatgcatggaaaatttatgggatttttttgttcactatctttcttcctacttattctatgtgattttaaggaatataattaaaatggaaaagagctataggaagaaagatttgggctcatgatgaagattaactttgtaataaagcagaaaaagacaagaatggagattttattatgtaggagttgggagcctattgatagggtgcctaaaataggtctttaggatgaatgtcatggtatggccggcccttcaaaaacgtgactaggcttttcttaaactcttgatttttgactaaaaaaacccccattttatttcccatgtgccaagaatcttagaaaggacttaatttatttagtcttcccatatagaaagcaatataatccagcatattttcccatagcatttgaggcttggagcactaaaaatctattagaaggaaagttgagatcatgaccatataattatcacaacaaacgtttgttgaacgcatataattatgtgacacttgctcagagatttgttgcctaatctcatttcatcttcacaacaaccatatgaaatagatgaaaccagataaaaagcaagaacaaaaaacaaaactaaggcccagaacagttgagaatgacggaaaagtcaggacaggatatgggacttacagatgaaggaaaagttaatgtatttcttgttgtggggtataatcacttagtgaagtctttcagcctgttttttgttctcccttacattaatttttcagtagcaagaaactaattctgccacttagtggtcatctttgctgcctcctctgacaattttccattggggaaagaaaatgctgcttaaatgttttagtcaacttagactcgtgataaaggttagatcggttttcatataaagatgtatgaacaatcccataattttagatctattttagtcagtttatttcataagtatataaattctttattgaaaagaaataacctttatcacctcatgttttatagatatgttaacaaaggtgattgattttttttgagaattattctaccctccatagttagtttttgcacactttcataccatgtgaaaacagtcttttcaatttttaaaaaagttttagtttgatctatgtgcaagtattttgttgattgggacacattaaaacattttcacaaattatgtaatttttttctacattttgaactatttgtgttatatatccaattatgctgtagatccaatccaccaagctcaatttgcaacactgttagttatccaaaatgtaacagctatcactttcacttcatttccatcatatgcctagttttggaaggaaagtttcctttcaataatgacaataatgattatgtcaatctcttataacaattatatcaattattttattttgtaccaggtactgttctaattgctttacatgtagcaactcatttaatgctcttaacattccaataagaaaggtacttttattacctcttctattcctcctaaacacacacttaaagatgaggaaggcacagagaggttaaggtacttcttgtcttccttgcagaatttggctccagagtctttcctcttaaccaccatgctatactgcctctcagaagataaatattacctctccataaagagtaatcacacatgcaaaagaatcagcaaataagaaagtactattgcagtacatatactgggaagttaaacaggtttactccctaattcaggggctttctcttgcacaccattctcttgaggtagagtgaatcataattgtttattgtctaataaaagtataaactactatgggtggatatttggcagtgtttgagaatagtcaaaacaataaatgatcaagctatgaaagttaaggatctagtctactatattaagatccatttctggccaggcacggtggctcacacctgtaatcccagcacttttggaggctgaagcgggtggatcatgaggtcaggagttcgagaccagcctggccagcatggtgaaaccccgtctctactaaaaatacagaaaacttagccgagtgtggtggcatgtgcctgtaatcctagctacttgggaggctgaggcaggagaattgcttgaacccgggaggtggaggttgcagtgagccgagatcgcgccactgcactccagcctgggtgacagagagagactccgtctcaaaaaagaaaaaaaaaaatccatttcttctctctttttcttttcggtttcttaaagtcaacaagaagaaagagcaagagcaaaggctaaaagagaagctgcaaaggtaatattctcaggaatgctgatgctgtgccctgacatttttcatttctttataattctttacttatcctattagaataaatgttttctgtttaattttcatgcctgaaataaatgaagaacatttttaacctgaacaaaaagggtcctgataagaagtgtccagagtaccaattttatttcacaattattcaaattttgaggtttatttcataaaaagtggaatgttaactttttgtaaggaattttccccatatttggcttttattagatttctgttgttagagtattaacttatgccatttactaatttcaatttacattattcatatctctgttatttcaaatagagagtataagatctcaatcattccaatttacaaaacgaaagcacatatattatcatatttgagctttgtcaccacccagctatggagcaagtggtggttttcttgcacccaattaagattattaagttgggcctctgactttccagttatttttattccactctccatgcttttataattttatacatagcagagtcaaatttatctgtgtggagatgttgaattattctcatataatagctacatacaagatttatctttctttctttttttctgttttttttgagatggagtctcgctctgttgcccaggctagagtgcagtggcgcagatctgggctcactgtaacctctgccgcccgggttcaagtgattctcctgcctcagcctctctaatagctgggattacaggcacgtgccacaatgcccagctaattttttttttttttttttttagtagaaatggggtttcaccatgttgaccaggctggtctcaaactcctgacctcaagtgattcactcaccttggcctcccaaagtcctgggattacaggtgtgagccactgcacccggcctgtttattctatttcttaacaatagccacaacagtacaaacctcatcattacttggggaaaagttgacacagtttaaaatttgccttcttactgactcttttttttttaaataagtgtttctactaggtgaaactatcttttcattgatcatttagaattgaaaatgtgttttcatccattatgtttgatcagctgccaaatcctcttagatatttccagtggtattaacatattcctccttctctccactcctattcttaccctcttgcttcaaatccacatctcccattcctggtttttaatttttttaaatcaatttactcccagaaatatgttagtttctccagggatcagacttattctcttctctatgtataaagatatgtctttttaaatttatttatttatttatttttgagtcaggtcttactttgttgcccaggctgtagtgtagtggtgcgatcaaagctcactacaacttcgaactcctgggctcaagtgatcctcccacctaagcctcccaagtagctgggactacaggcacacaccaccatgcctggcaatttattttatttttttattttgaatttttctgtagacacagagttttgctattgtgtccaggcttgtcttgaactcctgggctcaagcactcttgcagtggcctcctaaagtgttggaattacaggtgtgagccaccatacttggacaaaatatatatttatttcttaggttaagcatgttttttctcttctttctcagacccctaaagacaaatcacaggtaagcaatattctcatttcctccaggaaggcttctcatctaagcctgcctatggaatcttcccacctctgatctttcctagcttttacagaccatgctatgcaacacaacacacacgtatgtttttgatgataaatattttcagatctgctataatgatgggacaattctgattgatgacggaagctttgtaaatacttactgatttactactatgtgttatcacttttgtttttactttttactctacgttacatattcctcataataggaaaagatgcaggaaggatagaaaactactctgagaaaatattttcttcatttcccaggaaatctgcagtgaatttcgggaccaagtgaggaatggaacacttatatgcaccagggagcataatcctgtccgtggcccagatggcaaaatgcatggaaacaagtgtgccatgtgtgccagtgtgttgtgagtgtccaccccatctctcccactgaatttcttcatccatgatcgcccctgagtctcagatccttcatgcatgtgtagagtatagaccgtgagttatatattagaaaggtttacaagcagatggataagacattaagtaatattgaatcatatagtgacaatactattatttattcaattatccttctattttccaattaagtcaagggaaaaagctcaatttaatggtttttttttaacacttgataatcttcatttgtgaaaaagagagagcagaaatttcatgatttggattggatgatctttttgatgtctttcccactcctgacattttatgatttgttagtctattcagataggagctaaggagaagccagctggatggaggtctgtggggtcagtacataaagactattaaaatagcctgaacaataaatggaataggaaggattgttatttatcctttcaaggacattactatataatgcaaacattcataagtggtttagtgtggagtaaaacctttaggaaacaggctcataccctaaatgtttactaaaatgtctccttgttaagccaggttcatggccttctaaggtctttgttttgctgagtggtgtaggtaagcctgtgactacagctccatcgtgtgggacaatatagaggttaattattatcacttctaattctcctttttaggctcttaatctgctcctgaacttaaccctaaaataaatgccgagaaaaacgcttatttaaataatacctgctgaggtgcaaagttaatgtctcctaactttcacatgtcttgatccaaccttaagtggatgcatacaattccctaaaaggagaggttgacagagtagagcactagaagaaaagtggcctgaaattcaagaagccagggtttttctctcacccgttcaatttgctggtgttgtggtaatgactaaatgtagtaaatgctaaggattttccagcattaacatgctatatgtcagtagaaaatggcaagaataccagaatattaggcttgtgttcaacccccaaagattagcagttgaatctaactggacttaaatcactactgcaatctaaaccttgaatttcaacttcaatattagctccattgaaataatatttaaaatttttagtttaaagtaaaacatggtttattatgattttgagcccatcatctgacttagcatcaccctttgcctttatcacggatatggtagttacttggagaggaaaggtttaagcagtgaaataaaatcaagacaattgtagctttattcggaatgttaattaaaattagcgacgtacaaaaaataagatcacctgagggccacagactgataaagatgcatgcttgttttgtaattattcttctttagagggggaatgtaaacagctaagtttatctgtactattggttaaagcaaaagcacctctcagactagataaatttgtattgaagactgaatctgactgttggtttggaagatcctcattccttttaaaaatgtactaccaaaaagagtagggaatcatattcagcctatatcttctttttctattacagcaaacttgaagaagaagagaagaaaaatgataaagaagaaaaagggaaagtcgaggctgaaaaagttaagagagaagcagttcaggtagttgtttgagatcatcagagccacataaatattcaacgatcactctccctagggagggctcctattccctcctcctcattccagtattcttagtttctttgcaaactgggaaaatgtgtttggatccccatatacaagagtactcccctttccttattcaatttattcacattaaatctattaattgctcgtgcaggagagagatcaatcaccattttctcccctgattgtgtcaattatattacctaagaaagaagtatatatagattgttatcttactgtctgaatgcagactaatagagacagatgttcagatttttctcaagtacatttttgaatatgaatatttaccttaaaaacagcaacaactagggatcccacttaattatctgtgagattttgaggagataaaagcatctctgagtcttgagtttgcattctttaacatctcacatgatggtgataacaatgataattgtacattcgttgctactgtatgcatcatggcataaagttttatgactgatatttgtagtagccattgaagggacatattattatctgtgttttatagaagaggacttggaagctgacataagaagttaagaaatatatttaattagttacatataatacaattatatactgatatattatttactatatattaacataaatattatatgatacaaataatatcatatataattataattatatgtagttagtaacttgagaaccaagaattgaaccaaaagttctggctttaaggcccatgatgcactttagattttacacgcttctgccatttgtattattcctgcagactatgccttaggtcctcattattcttttcttttgtccttctgtgatttagaagagctcatttctactgctcttacctttgctctctacaatctactctcaactcttaagccaaagtaattatttaaaaccataaggcaggtcgtgctacccagtggcttctcacctcactcaaagtaaaaatcaaggtccttgtagtgtctggaagtgccatacatggtctgatccctgccacttttcataggtcacatttcctattattctacattgttctccatgcaccaattatactggccaccttttggtttctgggacatcccaagcattgattcatggctttctatcacgtggtcacaaaaacaatgtggttaaaaaactggactctaggctcagactgtcagggttcaaatccttgcttcatttccctaccagtaaggtcctacagttaacatcttcatatattagctttctcacttataagataaggacattattattacgtatattatttttatgaagtcccaagaaacttattaatgtataacagcacagtgtcacacatatcttaagtagtcactctttaatattatatttattgctgttaatgtcattattggtctaatctcattgtccagtggggtgttccatactggagagttcaccaattcttcaacatacaatgaactttaccttctatatgccattactcacagtcagaatatccctcttgtctaccaaaattctggccacttttcatggctcagactgtgtgttaactgctccctaaatattttcccatgtgtgcaatatacttaataactctatcacttgttatgccaacaatttaaaaagtattttagttatattattcattgtattataacttatagttgcctctatgtgttttcttcaaagaaattaaaaactctgtgctagttttctatggttgcgataacaaattagcacactttagtggcttaaaacaacataaacttctcattgttcaactcccacttatgagaacacatggacacagggaggggaacatcacacaccggggcctgtttggggactgggggaaaggggagggagagcatgcaaatatctaatattagccccctcatgcaaatatctaatgcatgcaaatatctaatattattagccccctcatgcaaatatctaatgcatgagggggctaaaaacctaggtgacgggttgataggtgcagcaaaccaccatggcacatgtatacctatgtaacaaacctgcatgctctgaacatgtatcccagaacttaaagtaaaataaaacaaaataaaataaaataaaaaacaatgaaaacaacaacaataacataaacttcttatcttatttcataggttagaaggctaaaaaggatctcactgggctaaaatcaaagggttggcagagctgtattccttttctggagtttgcaggcgacaatccatctctttttctccaaatctagaggccgtccatgttccttggttcttggaccccccttctctgtctacaaagccagcaatgttatatctctctgactgttcttctgtggttacatctccctctcactctgtcttccatctcgctcttgcagttttaaggactgatccttgtgattgagccttacactgagcccattatggcaatacaggataatctcttcatttcaaggttattaacttaattatatctgaaaagccctttttgccatgtaaggcagcatattctcaggtctcaagtattaagacttagacgtatttggtggaacggtattattctgtataccacagattcctttaccaatttaagaggccatacatttttcttctctgtatctttcacagtgcctagtgcagaataatatttgacctgaaggttttctaatgagataaataacagcaatccatgttccaaatgtgtgacctagttctctgaaaagcattttggttactatcaaccttcagcatcaccttttccatgcaatcattatgttttagtttttaaagcagtattgtggaggaagatttctagtgtttagttattggactcttaaaacctgcttctgcttcatttggcaggagctgtgcagtgaatatcgtcattatgtgaggaatggacgactcccctgtaccagagagaatgatcctattgagggtctagatgggaaaatccacggcaacacctgctccatgtgtgaagccttcttgtgagtgggcggcagccactgctgctactgagtgtgggagaagatcagcatcgggtgggcaagaggggtgacattggaagttttctccaggagatagataataaaggctgtctttgcactgagtttggaaatttactattataaagccatatattcagcccatttatttctggtgttcttcaatagtctgagaggtacttgaatcaccatcaagaaaggaccatgtgctaagagcaaaattacactggagttaatggcataaaaggattaggacttctgttctctgcaagcataggtcactgtcaaataatccaaaggtgtaatcattaggtgctaataaattgaaaatgagttaacatctaattgatatcttagtttatttctggggagaagaacaatatctttatttttcaaaagagatatagtcataaaagtttcttcactggtttgctatggcatgtgcgtcttattctttaaacaaccttaagaacaagaacggctgggtgtggtggctcatgcctgtaattctagcactttgggaggccgaggcgggcagatgacgaggtcaagagatcaagaccaccctggccaacatggtgaaaccccacctttactaaaaatataaaaattaactgggcatggtggtgcacgcatgtagtcccagctacttgggaggctgaggcaggagaattgcttgaacccaggagaaggaggtttcagtgagccaagatcgcgccactgcactccagcctggcaacagagtgagactccatctcaaaaaaaaaccaaaaaacaaacaaacaaaaggacaagaacaatgatgtagagagatgtgtgtttacctttccactccaaagctaagttggtggaggtatagaagtaatggaccatttttatgtagagacatttctcctttagggtagtatgtattgggtgctaggaatgattgttttgtcctcccttttcttatagccagcaagaagcaaaagaaaaagaaagagctgaacccagagcaaaagtcaaaagagaagctgaaaaggtagtaatcctgaatgtttatactgcaatgaaaggatgagattttgcagtatctctgtaaaaataactatggaattactgaaaccccagttgtgagggaactaggggttcatttagtccaggggttgagaaactttttcttaacagaacagatagcagatatttctgtttttgtggccatagaatctctgtcacaactactccacttggctgttgtgactgtaaaacagccctagactgtatacaaacatatgggcatggctgactccaatacaattttatttataaaaacaaacggctggccagatgttgctcacaggtcacagtttgcaaacccctgatttattctgttcccatatattaatattaagatttaaaattcagagaaaaagaagaacttgcatgtaaagttaatgggagtatgagtatcagtaccaatagcttcatatttcaaagttctggaacaatagaattcaatcctagacttcctgataccacagccagccttctttctagtacactatttgtttttggattaccacatttggtcaacacatgtgttccttgctttacctgtggttatattttggtgccagcatttaggaaaaagattaaaaagtagcatccccaaataatattttcttggattcaaaaaggctggctccaagtagtttattccaagttgtggtcatttccctgcccccatcaaagactattgagattaaaaataacctctaaagaagtatcgccctggaactctgtatgtttggcttgtttacagttgtattgcacagttgtaataattctaaatttaaaaataatagcagttcatatgaaaaatagattcactcttcaacatctacaagagaaaattcttcagtatgagctaatttctgatttcacattactactacagacaaactctcctctcattattttttcttttgctaaatataactagttaggggatctggcaatgaacctttaagcagagctaggagaaaaattccctctttcatcctcattgaatttcaacttgaactaaagaattcagaataaaatacaaaatcaattgtaattgccatttgtaattaactctttgaacttcagtgattgcttattctgtctcaatttctcacgtaaccctaaacaaggagtgtgcccagtcatcagagaactaagtttattgagagtcttgtgtatggttgcaggtttagtctggattttggggctatcaaggaaaaagaaatacagccaccttcttaagtcctttgtgtttaatataaattgaacactataactgccagaaaaaaaattctcaggtcattttctctctcttttttttttttctataaagcacttagtaggaacccagtaaactaatttcccagaagatactcaagctttctccttttcttttccttttaggagacatgcgatgaatttcggagacttttgcaaaatggaaaacttttctgcacaagagaaaatgatcctgtgcgtggcccagatggcaagacccatggcaacaagtgtgccatgtgtaaggcagtcttgtgagtgcacaaagaaaaccactactgtgggatggtggaattggggaagcaatgagccaggcaaataatatgtattgtgtttgtcctttccttacatgtaatagaaacagaaggttatctgtaaagcatttgaaataaatcttttctttataatggccaagattcacagttctagaaataaaataaatacaactaagctattacattctctgttagttctggggtagaccctgccagtagatcacacttccttgataaaattcttaagttatttgctatcaagtggatcctttctctggattatctcgcaactcatgttggaaagaaaacacacagattttaatgtcaaagtccttacctacattgttgaaaataacacattttcagaaaatgaaaagtaggtctttacacaaagtttggaagtacacctagaatatttaagtccttcaatagcatttaccaaacatctacaatgtacaatgtgtataatgtgtataatgattatacaaaggtgaatgaaatagataatcttctcagaaatcatatagtccactgatattagtcacagacgtaaggtaatataatacaaaggagggactgttgaatgaaaaatttgtctgtggtatgttacagtacttcaagaaagggataattaatagaaagttttatggtgggataaaactagaccttataatttggataaaatgtggacatgacagaaagtaatgagaggagaagaagggaacagcaagagtaaggatctaaaattaggaaaaaaacaagtcatttagtttagtcagaacttaccaactttatcaaccttgaatgcacaccagagatttcgaggtcaattctacatgtaatgggaagctgcaaaagttgttcagataggacagtaagtggcataaatattgttcctttaggaagattcatttgttagcagtaaacaggagaaaaagagaaagaaagtactaaacttaagaattgctactcatgtagagggaggagctgcaataaataacccaggaagaggcagctacgcagagcaaggaggtaggctagaaggcgagtggatcaaggtgggggatgctgtgaaggtgaagtcaatgtcatgtggtgacagctatgcaagctgaaggacagtaagcaattagagatgattccactgttttgtgtttgtttttttgtgaaaggtagaaaatccaggagaaagaatacatttggtagagaagataatgattttggggcctcttgaacattaggtattggcgataaacacagctggagatccccagtgaacatttatgaagtgttagttaattgctcaccttgtcttttttttttttttttcttatggagtcccactctgtcgtccacactgaagtgcagtggtgtgatctcagctcactgtaacttctgcctcctgggttcaagtgattctcctgccccagcctccctagtagctggggttacaggcatgtaccaccacgcctggctaattcttgtatttttagtagagacagtgttttgccatgttggccagactggtctcgaactcctgacctcagggatccactcacctcagccttccaaagtgctgagattacaggtgcaaaccaacacacccagctttactcaccttgtcttgtttatggtgatatatatgtggtgttcttttattttaatgagacccttcctggcaaaggactccatataatttatatttttatttttagagaaggcctgcagcatagtagatgttaactcaatgctcgataattctgtacatatgtgatttgttcatataatgagaaactcaaagaaatgcacaccactctctgtaatctattgttccctacctcccactttctaatttccagccagaaagaaaatgaggaaagaaagaggaaagaagaggaagatcagagaaatgctgcaggacatggttccagtggtggtggaggaggaaacactcaggtgagagcaacctctaatttcagtaactggggcgggctcaactccttgacaataggactgtgaatagcgtatatagtctatggtaaaggcagtgctaagtccttgagagaacagagaagtttctccttaaggttgcagggtaagatatcagcacattttcactgctctggggttcatttggatttctttacaccttgaaataattaacaatatgtaatgaccttatcccagtctcctgagccctctttatggtaatctagacctcatatcaataatcgttctcatcagtatcacatgctcttcattttctttcattattctttcttgccttggacagagccactttttttaggtgtcttttctgttgatccaaggcagcatgataggacaaaagagcacaggctttggagtcagattgggttatgattctgctcctactacctggacttgtgagacattgagtaaattacttcctctcactgaattctactttccctgatttagcagtactcttccagggataaaagaaaataatttaggcaaaggtttagcatgtttcttgaggcatttttaagtgtcagcatggcaatgttgcacataaggtcactccttgggtctctgaacacagtttcataaaattgcagtcgccttatttatctttttacaaccttggaatatcaaaaccatgtcttcacttccagatctgacaaaggcccaatatttacctttgataaactctggctattctgtttttttcccatcttttttgctttaggaggctgagttctcccttttaaggaatagccctgttgattagaattgtctgatagacattttgtgtgtcttgttcataacttggtcaaacctaccttccttgacattttgcataactttgggttttcctccagcatttttctctctcttctatctgcactagagacctgcacatttttttctgtataaggccagctaaatattttaagcaatgtgggctttgtgggtcatatgatgtctgctgcaactattttactctgccattgttgtgggaaagaagcaaaaaaataatatctgaataaatgagtgaggatgtgtttcagtaaaactttatgtgtaagaacaggaagcaggaaagatcttccctgtgggctatacaattgaaccttgaacaacatgggtttgaatttcccaggtccacttgtacttaattttttttcaaccaaacttagataaaaaatacaggatttgtgggatgtgaaacctgcatatatggagggctaactttttgtataggtgagttgtacagggccaactgacagacttcagtatacatggattttgatcctggaaccaatcccccaagtgtaccaaggggaaactgtagtttgctgacatttaatatatgctattaaattcagtcatatttataatttccttgtgtagatccttaaaagcaacattagtagccatgacaactcatctcttataattacaacatgggtgattctggtccccttttctctgcagatgccagacctagatgttaggggtttttttgtttgtttgtttgtttgagatggagtctcaccctgtcacccaggctggagtgcaatggagcaatcttggctcaccgcaacttctgcctcctgggttcaaacgattctcctgcctcagcctcccaagtagctgggattacaggcacccgccaccatgcccagctaatttttgtatttttagtagagacagtgtttcaccatgctgtccaggctggtcttgaactcctgacctcatgatccacccatcttggcctcccaaagtgctgggattacaggcatgagccaccgtacccggcaatgttatgtttcttataaagagaggtgaaagaacttctcttactcagactgttaaaacaatttactaagaatacagtagactaagtaatccaggggctcttcgttcttctctgttttcaggacgaatgtgctgagtatcgggaacaaatgaaaaatggaagactcagctgtactcgggagagtgatcctgtacgtgatgctgatggcaaatcgtacaacaatcagtgtaccatgtgtaaagcaaaattgtaagtatttctctcaacaggcatgtctaaaatatagtcacattcctcttgaatgaatggctatttctcatttgctatggctccttccatgcaaattattctttttgctaatttccaaatattctatttttttctcttgcgttctctaaggaacaatgagccttagcaagggcagctaaccaagtggctgatttctattgtattttctattacaattctgtgaactctaagtgctatcatgatagacccttgttctttattgtgccagaatcctaggaagactttgtcacggccatttggaatcattgaccagcacagttgaagaaagctgacttcttgtcatttgcacgggacacacttagtgcataatccagggtcaatatttgttaacaagatgaatattcacttttttctcctccagggaaagagaagcagagagaaaaaatgagtattctcgctccagatcaaatgggactggatcagaatcagggaaggtgagttattttttgggttttggcaagaatcgtctttctgtgagtcagcagttggcgatcaaaactatagaagaaggtgtcaacatgatcaagctagagcttgcccttagaaggtcaggagttaccaagttatcagtgactctcactgataacttgttcagtgaagaaacctaatgccaagtggacatctttaagtctgacactttacaaggcatttttataaattacagtttatttaattatttcaacagcctggtcaaatttggccttttaaccttatttcgtagatagggaaaatgaggttttgcaagtatactgggatttatttttgtttttgcattattttgctgctagtgtaagttactataagcagatgcgtaaaataacacacatttattatcttatatttctggattccataagttttaaatggtctgattgtgataaaaccaagatgttggtaatgccgcattcctttgtggaggctctaggtgaggatctgtttctttgctttctctaacttctagaagctacctgtattccttggcttgtggccacccttaagccagtgatggccagtcaagtccttcttatgctttatcattctcacactgactgtcctgccgctgcctctctctttaatgagtaagaacctttgtgattacatgggccccacttggataatccagggtaacttccccattttaaattcaactgattagcaatcttaattccatattcaaccataattcctccttgccacgtaaagcaacatatttggaggttccaggaattagaacatagacgtctctctctgtgggacattattttgcctatcacagcaaggttacatggctgcctgactcttggaaagaaatcctctgattctcaaatccaatcaaatattatgtaaaaacagcacttccaatataatcttcccatcttttcaggatacatgtgatgagtttagaagccaaatgaaaaatggaaaactcatctgcactcgagaaagtgaccctgtccggggtccagatggcaagacacatggcaataagtgtactatgtgtaaggaaaaactgtgagtatgtttcaaaatgagcttttgactgtgagtcttaaagtacaataatcatttcttaccagtttgggaaaatgacaattgttttagaagcagatctggtaattaatgaggcgtttgttcactttgattgaaatgtttcattgttttccccccagggaaagggaagcagctgaaaaaaaaaagaaagaggatgaagacaggagcaatacaggagaaaggagcaatacaggagaaaggagcaatgacaaagaggtaatagatgttagacacgctaatacctgaattcagttagttcattgtatggtatatttattcaacaaatatttgtgaaatgctgactctgtcccaatcattggtgatataacggtaaacaatgaagtcatggccagatcttgaaaataaatagcatgctcttcagttccccaggagtgactctgatgcaattgtagaaccagtgacaactgtcaaattattgtagttagccagtgaatttcatttttgaattttttctttcctttgagacagggtcttgctgttgctcaggatggtctcgaactcctgagctcaagcaatttgccggagctcaagtctcagcctcccaaagtgctgggattacatgagccatcgcactctgctgtttctgaattttttaaacaaataaatatcaagcaatcagatgccaaaaattacaaagaaaatcagtatcaaaaatttggagtttgaggccaggcacggtggctcaggcctataatcccagcactttgagaagctgaggcgggcagatcacgaggtcaggaaatcgagaccatcctggctagcacggtgaaaccccgtctctactaaaagtacaaaaaaattagccgggcacgatggcgggcgcctatagtcccagctacttaggaggctgaggcaggagaatggcgtgaacctgggaggcgagcttgcagtgagctgagatagcgccactgcacaccagcctgggcgacagagcaagactctgtctcaaaaaaaaaaaaaaaaaaaaaaaaggaaaagaaaaagaagaaaagttggagtttgagataataaattcttgatctggcatttcattgccacctagtgttcagttttggtccttataaatagtattcaacactacaacaccaacacgtagaatattacacagcacaatcttttaatgcaccgacggactccaattagaaaagataaatagcgaaatttccctgggaagatttttcctattagtagggcaacttttcattaagcctgtagtggctaaagaaaatgaaaccttattagtaattatcattatttaaaaatattttgggaatatctgttgtgtgttacggtagatgaaatggctttgagaaaataaccttattgcacaacttcacatgatctctaaaggacatctatttaaaatcttggtaaatttttaattttatgatccttatttaaaaaattttgaacagaaaaatgctatatatatttatatatagaaaatactgagtaaaaaaaaaataaagaaaatatggaggcagggtgtggtaactcactcttttaatcccagtgttttgggagaccagagcaagagaattgcttgagcccaggagttcaaaaccagcctgggcaacatagtgagaccctgtctctacaaaataataataattaaaaaaaaaatagccaggcatgatggtgcacacctgtaactctagctacttgggaggttaaggtgagaggatcacttgagcccatgaattcaaggcagcagtgagctatgatagcattattgcactccagcctgggcaacagagtaagaacttgtcttaaaaaaaaaataaaaatattgagattgtgtgtgagtgtgtgtgtgtgtgtgtgtgtgtcaaatagagaactaccgttttatctacacatgcaacgttaaataaggtttaccaataattatatttaaacctccccaaaatctattcagtggtgatattgttccaattttttagaattcaggaaaacttaagagaagtgaactacacataattaatgaatagaagagccaaagactgaattggagggttgcaatacagtcagaggagtgctattataaaaatatgtggtattgtgagcacctggaaaagaaaatacttccagtaatttgtgaaaatggtggttgtgagacatttaatatgttgataggtatttaattccagagaattttttaaaatgctgcaattaaaagtaaggcctggaattgtttgtttacggacatcacaatttaaagaaagaagggtaagtacaatctaggttactgtgttattttttaaggtaatgtttccatatcaccactttggctctttgggcttacaggaagttccagagacttctgtagctctctgaagattttagtacattctagatcctatctgtagactcggttctattggcttctttttatgatcattatgtttcaatgaacacaaaaggcagctccatatacttatccacacataggagttttattctctgacttgtaaaagcaaataagtaaaaaggtataacctggtggttagcaggtttctgatcacaaattcaacactgactttatttaatagctctgagatttatttttctcatctgtagaatggggatgatgcgtatttatcttataagatttttacaaccactaaaggaaatctattaaaccacacgataaagcacctcgcacaataatttttttttttttttttttggtaaattgtggttgagaaatgaagctgaaagtttacgtgtttttatgttttgccagaagagtgtcgtttagttcattccagggcttttgaagtagacttatgtgtggaatactgagtgcactcatagggagacaggtttggggctctgcctcatagaaaatggtattaaaatgagatgggacagggcactgggggctcatgcctgtaatctcagtgctttgggaggccaatgcgagaggatcacttgaggccaagagtttaagatcagcccaggcaacacagagagactcccgtctctacaaaaaattttaaaatattagccaggcatggtggcacatgcctgtagttctagctacttagcagactgaggtgggagtgttgcttgagcccaggagttggaggctgcaatgagctatgattgcaccactgcactccaggctggacaacagaacaagattatatatatataacaagattatattatatacataacaagattatatatatatatagatagatataatatattatatatatagatatatattatctatctatctatatatataatcttgttatatatatgtaatcttgttctgttgtccagcctggagtgcagtggtgcaatatatgtgtatatatatatatatatatatatatatataatcttgcttgcaatatatatatatatagtttttaaaggaatgggctgctttagtgaaattccattagggcaagacaatcatttgatagagatgcaatggagaagattcaaacttcttaggtagagattgaataaagtgcctttaaaacatatttcttctctgaaatttcacttctctgtttttttcctgtgttatgagtttatatctaatcggtcaatcatgttatcaggtttgaaagattataccatgacagtaacaactttttctgctactgttggtaggatctgtgtcgtgaatttcgaagcatgcagagaaatggaaagcttatctgcaccagagaaaataaccctgttcgaggcccatatggcaagatgcacatcaataaatgtgctatgtgtcagagcatcttgtacgtaaaaaggtttatcaataaatttgatagttgtgcctgtttgctagaaattagtttttgttacttttaaaacctaagatacttggcatcacacattaatgatatgatacctcctctcttttgaagagacaatttccaaagcactttcacaataatttttttattttgatgttgaaaagcataatcatacccagaacctctggggtaggaagaggtagcttatcagctaggtaacctgggacaggccagttcattgtgcagagcctcagttcctcctgagggaaaaatgactgaacaatatagttttgtggagattcaaggacattttaaaaatgtttatgaacttcaaagcattatacctacgtaaataacattcaaggacattttaaaaatgtttatgaacttcaaagcattatacctatgtaaataacaatcaatattgtgagtttggttataatttaattggaaaagtaaaaatgagaattatagcaactttctagatgagagtcttaagtctattatattaaggaaaaataaagaccttttaggatcatatttttctggataagagtatagtaacagcatctatgaaagttgatagcattgccacaaatatattatcatgaaaattccaacaatcagaactgattagcttataaaaatattcttagatttttttttaggtataagaaaacagtgttagatttgctaatgtttagaatcgcagaaatacttggttaaagacaattcagtaacaacccttgaaaaattaccctatctttttttttaattattctgcagtgatcgagaagctaatgaaagaaaaaagaaagatgaagagaaatcaagtagcaagccctcaaataatgcaaaggttatttattaaaggataccaaaataaccattttacttttcaccttcagaattttgcattcttctccagctttgggaataataaatatattaatatcttaacttcaaagaaaattgatttttcttgtcttgtcactttgtatcataacaagatttttgggggtttgggggtttgataccttttttgattttgtagaaaattctctgagagtgtgtgtctattattgttttagtctttcctccttgggagaaatatggattgaaaagtagagggtaacattctttaccaactcaactgcatgcttatctttgacactttaagtgtgaaacaaggctttgggtagcttgctgatgtttattttaataattcaggcaatataaaccaatctaagtctcccttttagcttcccttctgttttcaccagatgattctatcagcattaaagaatcagcagtgtgcatgcgtgatgctttcttttctatttatttttcaagactacaaagaagacatctttattcaattctttaacagtaacaatcacatttgtagagttagatccctgagcaattgtccttttgtcaaaagcatgcttcatggggaaaatggggaaaggaaggatggatgaacgggagaaaaaaacaggaaggtctatcaagtgttgttttatgtttccctacatttttcaggaccagtgcagacaggttcagaatgaagcggaggatgcaaaatttagacaacctgggcgttccttggcctctgttgccaggatgagtacagtgagtctgagcccagagctaagagaggacttcctaaaaccaagtttgaagaaatcactaagccaaaaagggacaaagccatgttcactttccctttctcattttctaggatgagtgcagtgaatttcgaaactatataaggaacaatgaactcatctgccctagagagaatgacccagtgcacggtgctgatggaaagttctatacaaacaagtgctacatgtgcagagctgtcttgtgagtaagaggattctgctccccctgtagctagcaggggaactgcatttttagaaactgctgcttgaataagtttgtatatttatgaaccccatgggattttaaaaataagtctttagaattaaagccctcaaattgagaacacctgatatagtagaaagaacactgagacttggagacaaaaattccgtatgtaagttctaaccaagatgtatactagctgtgtcattaaacaatttgttttcaactttcagcatcataattagaagaaattcttcaagatctttattccacaactagatcagactcaattgagatgcctttaaaaataaatacaaatttttacaccccaaaatatattatatcagaatcttggggctatggaatttgttttttagaaagagtttctaggttattctaaaaagcaaatagaaatggagaccaatggacattataaatgatgatgatgatgatgatgatgatggttgtaaagcacactgtgaacacaacaataatcaaatttctttagcttttcatagtgagtgttctttgagggggaattaccaaatactactcccattttatgttctagaaaatcaaaacttcagaacattaacccacttgtcatctgttaagtgatgaaagttctaaaccagctcctaattgtgtacttttcttaatatgtcatcctggtcactatctcaatgttctgtgattctgttttatttatttatttatttatttatttatttatttattgagacagagtctcactctgttgcccaggttggagtgcaatggtgcgatctcagttcactgcaacctctgcctcctgggttcaagagattctcctgcctcagcctttcgagtagctgggatgataggtgtgcaccaccatgcccagctaatttttgtatttttagtagagatggagtttcaccatgttggccaggctggtctccaactcctgacctcaggtgattcgccagcctgggccttccaaaatgctggggttacaggcgtgaactaccatgcctggcctctgtcacattttatgaggattgcttaacttctcactggaagttataggaactgtttcttattttaaattattttttattttcttctctagtctaacagaagctttggaaagggcaaagcttcaagaaaagccatcccatgttagagcttctcaagaggaagacagcccagactctttcagttctctggtaaggaggactatttctgaaaagctacttatcaatttaattttcttgattttttttgacctgttgctatttgctattttcatagaagggtctgaggtttgctgattcagtgcagcctgaagtcctttgaggactatatgcagtttatgcttggtgagagttctgggatttctcattagtgccttatcctgtgccctttgagattatttgccctgcttcaatttagtacattttgaaatttacaatgtgtgtgtggaataattgtgactaatttcacatatggtaaaatacatagtcaggtgcctcaattctgtaattttagcatacctcttggtattcttagcttcctcacctagcttccgcttatttccctcctccaaccaaatctgtttctacatcctggaactctatgccaagcatgctcacaggtataaatttccgccaattagcaattcgcagtagctaaagcttcttgtttaaaatataggctgagctgggtgcggtggctcatgactataaccccagcactgtgggaggccaagcgggcagatcccttggccccaggagtttgagaccactgtgggcaacatggtgaaactctgtctctagaaaacttacaaaaaaaaaaattagctgggcatggtgccttgtgcctgtagttccagctacttgggaggctgaggtggaaggatggcttgagcccaggtggtcgaggctaccatgagccgtgatagtgccactgcactccagcctgggtgacagaacaggaccccacccttctctcttcctctctctcgtagctgatggtcaccagtaatgtaagtattagtctacattagcatgataagatttactttgtagagccttcacaagatgaggagtagaaaggagcaaagaggatatgagaacatcaagcagattctcagattgggccctaaaaggaagattttagcacctaggctgatgacccagaaaaggagaaagaaaggtatcaaacatgaattttacttcattattcacccaattcaactagggtaatagatgagttacatacatgaaatatgcattaattacatatttctggtaaattgagctccacatcagggatccgaaggcatggagaagagctattaacaaaatatgtttttttttttaaatactaaagtataatagttacatagaagaaatgtacatatgcaagtaaatagctaaatgaaatatcacaaagtgatcatacctgtgatagcagcaagaaataagatatcatcagcagaccagtagccccctcattctccctcataagctacagtctgctttggagctatttcttttggagaaataaatctttcattattcatttttttcatcaagccggcagtccttttgtcagtctacaaatacttactgagcacctgctatttttccaggcattatttatttacttatttatttatttatttattttctgagagggagtcttgctctttcgcccaggccggagtgcagtggcgcgatctcggctcactgcaagctccgcctccgcagttcacgccattctcctgcctcagcctcccgagtagctgggactacaggtgcccgccaccacgctaattttttgtatttttagtagagacggggtttcactgtgttagccaggatggtctcgatctcctgacctcgtgatccgcccgcctcggcctcccaaagtgctgggattataggcgtgagccaccgcgcccggcctccaggcattatttacgtatgctaggttaatagccataaacaaaacagatagcgctcactacatgaagttcatagtatattggaaaagcagatacaataaataatatgaataaatgaaaaaataatgccaaggaggaaataaggcagaaaaaaatggtacagtaaattctgagatggggaggggaggggatacaattttaagtgacatatacagagaataactctctcagaaggtgacatttacatcaagacctaagggtattgattctgtaggtatatctgaggagaacatattccagagagaaaacatagcaaagcgtttagtgttgttgaaatagagctacctcagctgtagaagaggaagtcaggaagctaatgggaggccatgttataaagggttttgtagacaattttaaagactttgcctaatattctgaatgaaggttctgagaagactaatatgatttgatttatgttttaaaggaataactttgcctgatacctattgaaaacactgcagggaggcaagggctggacagctagttagctattgcagttgtctacagaagagatgatgctggtttataccatgttagtagtggtggagctcttgagaggtggtaagatactgggtctgttttgaaggtggagtcaacagaattttttgagttgatgtactatgttaaaaaaatgaagagagagagagagtaaggaacattgtagtaccttttgaacattatagcaccagttacctgaaaaaatacaattgatatacctggttgagtctaacctttgccagggtttcatataagttacttatctaaattctctgtgaatatttgtaccaatatggaactcaccacaatctaaagcaattcatttaggtgtttgaatcatttatcaaaacaaaggaacaagtacacaaatactgcttgactcctccaaaatgagtattagcagatataatactattaaattttctatgtcgtctttgtatctgttttcagtaagtagttttcaaggaatttattaatttcatctatgttgtcaaattttttggcatgtagttatttataacatttctaaattattcttttagtatctacagctcatatagtgatgacctgttatctctaatattggtaatatatgttttcttgactctggtcaattttgcaaatagcttatcaacttattcttttcaagcagctaacttttggctttgttctattttctatttcatcaatttctcctctttattacttattttaaaaaattttctatgctcatcattggctagctccttcagatgaaagtttagatcatccattttagaacctctttcttttctaatatatgtattaaagttataattttcccccaaattactgctttggctgctgggatttgataggttgtattttctttgtgattcatttcatttctaaattctatgattactttgagtcatgagttatttagaactcatccttttacttataaatatatttcttataaatattatatagttgattctttttgttcttccagttggataatttctgtcttttaactggagtacttacttcttaatattctatgtaattactgataccattggatttaagtcttccatcatcctatttgcttttgaatactttttttatattttggctctactttttgcctttttaaaaaactaatcaaggtcttggaattatcattaattattaaactcatacttccaaaacactacgaagagcaaatatgtttcttcttttacatggaaaatatacatatgttttttaccgtggaaaacatactaacaactaaaatttactgaacacttagtatgtgacagatactgcgttaagcatgaacttacatgcattatctgttttaatcccttcaagcagtaatataaagtaaggactactattatttatgattttctggtgagaaaattaaggctgagaaaagttagataagttacttctctagttagtggtagagctaggactcaaaaactcatgcaatttatgagtatttacctctgagtctttcctttctaggctgtatataaccaataccttcacttaaaaaggcgaatattatttctggcatgcctatcattctagatttcttcttatgggcaggtaattgtgtcacatattataaaggatatttgctttcttattgctttgctactccttgtttctttgtttacttaccttgtcaagttaaaaattgccaaatacaggaagttaaatccacctcatatggtgcaaaatcaatctttgagtttgaataacatatatcacactccttttacaaccatttattcaagttggattaaggaactcaagaggttttcttaagcccacccctcttcttgaatgccataaagtacgtctgctttattttttgcttcttcaggattctgagatgtgcaaagactaccgagtattgcccaggataggttatctttgtccaaaggatttaaagcctgtctgtggtgacgatggccaaacctacaacaatccttgcatgctctgtcatgaaaacctgtaagtattcaagttgccccatcatatcttccagtttagaatttctcagctagagtgttaacccatagtaatgcactgatataaattcgaaatgtgttgcaagtaatttattcatcatagaagttaaaaattcaaaatttgtgaattatctttcttatatgtaaaatagaaaagatttaaggctattcctttggtaaattgcttacctacattgttatatgctctactgagaagaagagaaagaaaaaaaatagtggagttacaattgcagaatattggtataatcctgtgtacagtcatgggagtgtgaacatcattcattctgtgtgtagtggagaaaaacagtagagaactactgctatataacccagcccagtgtattatatctaaaaggtcctgtgactataatatagctacatattccccatttctttaaccctgcctcttgaaagaagtagtaccttgcaaaaggaaagtgcactgtacaaaagaaagcccaataaataaatagctgatctgatgtctgctctcatatttatgactatctgggtatctggaggcatattatttcatgattctgaatctcactcccttcattggagaaatggagacagttctctgagctgctgacttcacagatgattgaaaagaactgctagatatgaaaatatttttatcttaagttaaatacaagggattcattttaatactcttattattggctttagttttgttgttgctactctgctcaaatgctgtctgaattttaaaataatttttaaataatttccccttgtctctatatgcatcccttcccttctcctggccaccatttggccagctttcaaggagagaatggtgacaaaccttggttttcccatctcacctgaccccagacctacattgtagtactactttatccttcttaggacactataagcaaggcccagaacatgaggataggactccctgatatcctgctttttaatcctggaaaaatatttaaaagaattcatcttttaggtaaggtatggtagatataggtaaggtatggtaggtatggtatggtaggtatacttcatctataggtaaggtatggtagataaggcactttcagatttcagtcactgaatccctgcaacctgctatggaatgttattatctttattgttcagaaggttaatctgaggctcagagagtccaggtaatttgtttaaagttacaaagctagggagtaaatcagacaggattttgaccttattgatttggatctaaatacagttttcttttttctccactaaactactgttatttctaagacagtagttccttaaattgtcaaagaccaaagattccttagataatatgaagaaagttactcctttcaagaaaatttaaaaaaatgtgatatgaacaatccacacacataatattcataggctcgtggagtacttgaaattcatctgtagaccttataggtttttaagaattaagaaattcccgtttaaggaataaatataactgtccaggaattccattactatatataccttatctccagcccagaaatcctttaattcctctttcttataaatgtcagggcctaaattatccatataattttcttcaacattttcatcaactttatagacccataacaagtgatctttttaagggaaatttagcataagaaactgaaatgatgaaaatattaagaaagcatacctcaggatagtttgtttagctaagggagctgggagtagatattataaagaaggatcaggttatctgaggcaaaaggaaacaatattcatttctaaggttttagagaaagttatatgagagcaatttcaatttaagcaatgctaaaagacaaattgcactgccttgatagataatgagtttcccattaccagaggcaaacaagtacatgtctgattcataatatttctccagtgagaggcattaaaattcgtactccttaagattcattccaactacaaaactcagactgtatcatttgtgtcttgttatatttttccccaggtcgtattattggtactcaatatagtcaaacatctctctgggatctgattctcgcatctataaatgcgagatcacctttagaccagatgatctccaagtttatttccaacattctctatgaatatatcagtgaatgaaatgtgacaggataggtccagggctaggggatgaatctggagcagaagagagacagcctggatgatacctactgaaaatgaaagtagttgaatgcagatcccagatcctccctctaaatacagtttggtttgatacccaagtgtcctgcatgttggtccttatttattttcttattataactgagaacttcctcgttgttgaagcatcctctgatctgttttaggatacgccaaacaaatacacacatccgcagtacagggaagtgtgaggagagcagcaccccaggaaccaccgcagccagcatgcccccgtctgtaagtacataagtagactggcctccatggttacgttgtgaggagcactgggttctggttttgttctcttccactgagtaatggacatttatctggccagagaggtgacactaggtcaggtgacccagaattggtcacattttcactataaggataattaagtaattactgaaataagtggaaataatgtagcagttaatattttaaaatatttaatgggtccattaatagattgtttatgagcaatgtctccaacataacgttacttatttcaggataggttttgttttctgtgatctataataaaaagatgagacagagaccaagagaggtcagagagtgacagagttggatttaaacaatttctatataatgcccatattcttgaactttacattgtattaaattatttcccagcattaaaagttgaccaatttcatttaaactcctgaaaggatgtttcaacgtacgttactgaatttaacattctccctggtggctatttgaatagtcatcctcagggagatggtatgtaacatgaaaaaataggaattttcaaataagagaaaaatgttttgttatgggataaatgtgagtgcaaatttcagtttttgctgtgcttatacgagactcttggcaaatcacataaatactctaaaccaaatatcccaatgacctatgaaaatattcaataaatactgacttttatgcatttggcacagtgtctgaaaaattaatgtcactattattattatgcctaagaccaaagtatgaatttagaaaaagagtcgaaagtatgaactttttctaacagaccatggtatagtgcttatttatttttaataaattattgtcaattgtagtttgataaaattatgtgtaataaacaatattttaatgcattatatttaataaagctatttattattattcacattctctttgctccattccactgccacaaaaagctttggcaataatggaatcagaaactattcagccagatttgaaaatcttagtcaagcaatactagataaggccatattaaaaacgtctgcccaacaatctttgttaagggaaattgtgaaaacaagaatcataagctagagtcttcctagtttcacattagcagctgaaagcaatgtagaggaagccgaggactggaatgaaatcagaagaccttatctttctcatgtgggcttgacaaagttatttaccacccatttaaagacctctactctggttctttaccaggatccataaaaagggagtttaaactttaactctagtccctatattgtgtttgctgtcttattatatagaaattcttagtagttggctcccattttattgacagaatatactgttccccgtcctcacaaactcacctttacatatatctcaggagagaaaggtcaaaatagctttatgccagtccaatagaccacaccttagaccacacttccctgtaactctcatcctgtgtaggcaacttggaaaaactactttataaagaacttgccataggtttatactgataagatgtatttctttaaataatgaagaatgttgccggggcttatcacacagggtgttgtaaaagagtgccgttcttccatttctgagtgtatgctttccactggagttgcatagcaggcattaataatgacagaaattattatgctgttagttaatgaaacaaaaattaacgtgtcctggacacaggtggaacttcagtccctgtgtaagattcaagtgtgtgatctcgggtacagttggtacagactggtcatggcctagcattgttctgatgactagtaaggatgtatatattggggtggaagcctgttgtttgaactttatttctgggtggaagtttctctaagaaagtctggaatctcaagaatagaataagagtccaggcagtcacaagtttcttggaaaagtaggttgagtatcttggaacccactcttttgttactaagtacataatactttctattatgcaataactattatacagtaactactaagatttacataggtctttagagttttatgtacattttctgtttgtactcttacaatagtcatttgattagggcagggatcactgtctttcccattttacagaaaatcatcctgggggaaactgtcacttattaaagtcccttagtataatatcttgggttcaatgtagatatcctgacttcaattccagtgctctactaccattccttagttgtcaggagattctgaaaactaagtgctgttgagaaggcattatctcaattaaaagatgatttgctatattggaaggaaatttctatattaagaaaaatacaaatattattttgtgagataaatgactattcttatctatatctgtcaatttcatgacagattttcaaggattcaggaaaaccgaagcttgctactttcaaaccaaagaaaacctcctggagttgatataggcaatgaagtggagatttgagtttggaatgacagtgctgctcgtgccccaggtggtactagttgaagatgtgcagttatgtgaaagaaaacttcctgaggccctcgccccctttaagattatttttaaatattcatttaatgttttaaaggctgatttcaaatatatggatgagtcaggcaaaggaagacagctgattacattctagtggtctacaacaaactatagtagaaaaacattcgtattacaggaagtgaattcaagttatgacgtaacatgacagtggcaagttactaaacttctctgaagctcaatttcctcatctgcaaaatggtgctaatgacacctacttcttttttatcagcatgaaggctgcatgtaatcaaaggcagaattaagccatgttcatatttgtgtccacctcaacacgtagtacatactaggtgctcaatatttgttgtatcaaactggataaaatgtgaaagtgattttaaattgctacttctttgcagaatgcaggatctatggatttctttgattaagatgcagctataaatatacagcccacatttctgcaatatctctgggttctagcatctaacctacccatcttctcttctaggacgaatgacaggaagattgttgaaagccatgagggaaaaaataaaccccagttctgaatcacctaccttcaccatctgtatatacaaagaattcttcggagcttgtcttatttgctatagaaaacaatacagagcttttgggaatggactcactgattttcagtcttttccatctctttcctcctagactctgtgatctgagggtataaagacatctccaccaagtctgagccctcaaaatgtcctgattacaatgctgtctgtccaactgcctgttcaataaaagtaaactcagcagaacaccct

SEQ ID NO: 670 - DNA, 75835 bp, Homo sapiens
cacactgcctcggttcggcaagtgggtcagttggctggggctcacttggcaacgggacgcgggaacgaggggcgcggacgcaggcccgggaggacgcggcggcgggaacctgggggcgcagggctagggcagcgggcccgacccgcacggctttcctggaaagcgctgcccctcgccgcggcgatgccctcgctgtggagagaaatcctcttggagtcgctgctgggtaagccgaagcccctcgccgcgagttcgcgggtgccagctccccgggccatgtccagagccgtggagccaggccaggttggctgagttcaggtaggaggaaaagggcgctccgtgcccagagtggagatgcttatcgtcccctgggaacttttcctactgaagggaataaaggaaaagacctagattgaagtcttcaagctgagtctgcgaggcgcccgcgagagaccccgtcgcccgagttcccagcagccctgggattgtgcccaaggagcgcgaattctcctcgtgtcggccttgaccccgcgcggccggtaccgtccccaaagccccccacccgtggcctttaagtttaacttaatacagttcagtgctgaactttaaaattcagaaggaaaggggcacccgttttccccaggagctgtaggtggacactgggcggcagctgctgccgtgggctgggcccaggacaagtggccttggtgtcggctgcacacttgggcatttggcgaaaagcatcagactcgagtctcatctgctctctcaccagctttgcaaaatcccgaggacaattttattggtgtaattctgtcggagctgtgtgagtaataaaatcaaagttcccagacaaacatttgggatattgctagaatccccggttcgttacaaaacaaagatccctctggtctgggtggggcgccttcctgagaacttgattttctgggagctggtaattctcgggagtgcttcagactatttttttctggctcagcctgtatctataagttgggagatgtacagtgcctagcattcaataagtacctcaggtgctaggtactcagtgcacttgatctcatttaatcctcccaacaacactgtgaaggggttgaaagtcctattttgctgattaagaaggggaggttggaaagtcagttggtagaaagttcccacgcccagtggttagaccggctacctttggagccaggctgcttagagttagggcaactctgacatttgctacttgtgtaaccttaggtactcacttaactttctgagtctcagtgttttgtttgttgttttgttcttgcttagttagtttttgcatttataagaggggagcggaaatagtacccacctcatagcttatggggctgtataaggaatgagacagatggtacatgttaatacttagcacagaccctagtgcatggcaagtgcccatagcgttaattatcattattgctcaagattatacagcagctgttggcagaggtacaacttacttcagatctgggtattccactacccagcactgcctcataaggattggactgaaaatggtctactcaagggaacgactgctgcctcactcaagtgcttttgggtgtagtctggggttggaggagggagtcctgctgcttgctgcccttttggactctcacaatatttttcattatacaggggacaacttaggtaagaaaattttgtcagtcagggtcctgacgggatgccaaattcaactcagatggtccaaatgaataggacttaataaagagactgtctacagccatatgggcaagggaaaggaacacgcaagggatgttgagagactcacggcagcaggaagccatcctctactggggcctgatgcgaggagtgggagaatatgtacatttcaccagaaatttcacttctgggtatatatcctacagatatactcagtgtcatgtgttacatagtgacatttcacgaggaaattgccattgcttttctgtccatcagtctcttaagcacaacacagtcagtgcagtgagttctgcggatccctacacaggtgtagagctcttgttttgttccatgtcagtggagacaactggaacccagttcaggccagagtcatgaagaagaatgaccagcccaagcggctggagtggagggacaggactgtcgttagaaacaatgttgaagttacactttctctctttaactttttttttttttgtaggatgtgtttcttggtctctctaccatgacctgggaccgatgatctattactttcctttgcaaacactagaactcactgggcttgaaggttttagtatagcatttctttctccaatattcctaacaattactcctttctggaaattggttaacaagaagtggatgctaaccctgctgaggataatcactattggtaagatttaaaagagtttctttaagttgttttttttaagttaaaaatcaagtgagattatgtagactgttctttgaatactaaatatttgaatttaaaaaatcaaagatttctcttttccttaccactgccttagaagagctttagtaattggaagactagactgagagtcaatgtgttttacatttccattgttttttccagactagaaagacctaaaaatcactgcaatgagtaggggaaagacaccttaaagaactgatcagctcttgaatacattgtgtttttctttccaactgtgacataacactcaggagccatttaaaaaagtttgttaaataataattcacaagaaatgtgaaaattatgatgaaaaacaccacagtaagcagtcaaacaagaaactaggaaaaatatttgcaactctttcagccaaagggctaatttctcttatatatagagttcctacaaaccaataataaaaagagaccaacaaatcaatagaaaagggggcacaggatctgatcagttcactggaaaggaaatacaattagttcttaaaaatggaatcaaatgtataggtcataaatcatacacatacagatatgtttatctagagtttgacaagtagattggcaaagaacagctgagtcttactgcactgtgcagtaggggtggggaaacaggcactcatacattgcttgtgcgagtgtccattggcacaacctctatgaagaacaatttagcagtattatcaaaattacaaatatgcatatttcaccagaaattccacttctaggaatatatcctacagatatactcacagtcatgcgttgcttagtgacatttcactaggatgttgccatcgcacaacacagtcagagcagtgagttctgtggatccccacaaaggtatagagctcttgttttgttttgtgtcagtaaagatgaagtcttgctatgttgctcaggctggtctcgaattcctgagctcaagccattctccctggcctcccacagtgctgagattataggtgtgagccactgctcatggcctagagctcttgtttttaaaacaactcaggctcagaaggatagtggtaaaaactcctgaaaagtgtgccctttacaaaattggtgtccataggaattgaaagacatgtcaaatggtcttgaaattttcagctccagaaataacaaatgaagtttcctacccttaactgagtaaatattaattgatttcaactggcattggcttacagtatccttacatgaaccaccgtagctccgagtcttgcaagattcatttccttatcacacttcaggttgattttatgggagtgatctcataggtggtactttcttgtcacctttggtgctgcctatgtgggccttacctatagatccacagactgagtagttactgggacagtttccattacttaagtccatttttggcccagtaacttctggtgatggtaagggatgtgatataaaataagtttggggtagatattgtattttattttgatgcttcctattcccttttcactttcttcctccatgaaaacacatccccttgagcagaagtagatttatatttggaaatatggaataggtagggaacattactcagagttgaggaggaagtggccaatctctgctaagtgctgttccaggtgaccattgagctttgttgttgctaacagaggctaaagtaagccacgatttgtcttaaaactcccttcaaatacttcttaaggacatgaaacaactttgtttttagagtcctgagatattcttatataaatacagagaggatctgagcattacatgccatctcacttctggcacctcagatattttaggttaattactgtgtaattaactatgaaaccagttcatactcctatcaatttagattatttttgatccaccagaaaggctataatcaaaaaagacagacaataataagtgttgacaaggatgtggggaaattggaaccttcacacattactggtagaaatataagaaatataaaatggcacagctgctttggcaaagcgtgatagaagctgttatcatatgatctaacaactctattccttggtatgtacccaagaaaaatggaaacatctgttcacacataaacttgtacacaaatgttcatagcagcattattcatgagagccacaaaatggaaacaacctaaatgcccatcaactgatacatggataaacaaaatgtggtatatacatgcaatggaatattatatagctatgagaaataatgaaacactgatacatgctacaacctggatgcaccctgaaaacgttatgctaagggaaagaaggcagtcacaaaaggccacatattgtacaatttaatatgaagtgcccagaataggaaaaattcgcagagacagaaaatagattagtggttgccagaggctagggcatgtggagagaagggaatgagaagtgacctgctaatggggatggggtttctttttggggtgatgaaattgttctggaattagataatggtgattgttgcacgactttatgagtatactaaaaaccattgaattgtatattttaacatggtgacttttatgatatgtgaattgtatttcaataaaaattttaaatacatatataaaattatacatcaactctgtcttcctgagtataaagatggtatcagataacatgcatcaaatgcagatcacggagttccaatccatacttgccagaaatgcttagctctccctattttgtttgtaggcagcatagcctccttccaggctccaaatgccaaacttcgactgatggttcttgcgcttggggtgtcttcctcactgatagtgcaagctgtgacttggtggtcaggaagtcatttgcaaaggtatggttaatgtttcatgtacttatagacaaacaagtataaccagttaccaaagggaaacctggggccaggagttccaggttatagtttttaccttccatatggctttgtcaaagtctccttttttttccttttcccaaaacaaggacatgaatacttgccatcaatctcaataaggttttgaaaactaaagaattatagcaagttgctgaagttgctatatagaggctaaatcacattcattattgcaaattaccaataagactatttcagctacttattctatgaaactgaaattcatgatggacatagtacattgagtccacataaaaagtgtttaaaaatacttttgcacttacaggtacctcagaatttggggattcattttaggacagattgttcttgttgttctacgcatatggtatacttcactaaacccaatctggagttatcagatgtccaacaaagtgatactgacattaagtgccatagccacacttgatcgtattggcacaggtaatactgtaacttaggaattttctctttgcagagcttacctttcctatgtgaatgttgcacatcttggaaagaaaatctataaaagtagtctttctgcattatatctatatttcagctttttcttcctctgaaataataattggtgcagccagtgggctatttgctaagcaggaggcacattttccttgcctgtacagacagagggtgaaaataaaataccattactggtttgtagcactgtggcagtgggagacgagaaccaggcctcatatcccagctggcattcagctctgtcttcctccttctttcccctggtcagagctctctaggatgggattctccatcctccacctccacactgacctcagtacatctgtaacactaaggaaagtttctgtcacgtatggctgtcactggaactccctgggttttttttcccagaggtctgaagctccaaatctaagaattgaaaagataagaaaccttgcatatgcatactgactttccaatcacctgtctctcccaggggccagctttctccgagacagaaacatgcccagcttagagtttgtttcataaaccaacccgagactcttctaaaaagaagggagaggtattagtggattctagttaacgtgctcctagctttttgtgtaactctcagtgagtcactgttcttctgtaactacaaggtgaaatctcacagactaatggaagtttagagggtattggctcaccaaaaagtgcttgtataattccccctgtggcccctagtttggcatgaaatgagaatagagggaaattatgtcagtaaattggccttgtgatgttaatagtagaagacttagaactctgtctggtcccctaacttatgttttacattcatatctagaggcagagactcgggcagcccattttgccggtacagcctgataaagatctgaacttcagggtactgtttacatctcctgacttttcttctatctggcctctgttttaaatgtatgtgacccagttcctggctggcagtcccttcctccatttctgctctgtgccttcctttataaaactgactgttcaccctgcaccttctcagcctatctgagcataccaagtattttttgtagtttcctttgaagatttgttgggtcctgggtgggggtggagtcacccactgtaatacactgcattttactcagcaaattcagtttagatggctctttttcctcaaaactctccgctgagcccccagacccctggcctcccttctgtcaccaccgccttctcccattccatcccatccccatagctctcggctctgcccctcctcactctgatcctgttaatgtcagagaagctttcttgggaaattagactgccagccatactgtcagaccctaagaccttccttctgtcctgtagagggctggatggggtcacaaagcatctgcccaataggctctctctgtttctacgaagaagtcctcctgctggcatcttctccagttgttacagttttgtgtgtgaagtcattgctgtgatgaattggacctcttggttaaacagtaccaaagagctacactgcctaagctccaatcccaggttcctaggttatctttactagctgtgtgaacttggaaaggctacctgatctctctgtgtctgttttcttgtttttgagatggagtttcactcttgttgcccgggctggagtgcagtgtcacgatctcagcgcactgcaacccctgcctcccaggttcaagcgattctcctgactcagcctcccgagtagctgggattacaggcgtctgccaccgtgcccggctaactttttttttttgtatttttagtagagacagggtttcaccatgttggccaggctggtttcaaactcctgacctcaggtgatccacctgccttggcctcccaaagtgctgggattacaggctcgagccactgcatctggccctgttttctaatttgtaaaataggattaatagtagagcctacctcataaagttgtgaaagttaaatgagttaatataaagttaatatacagggcttggaagaggggttggtgcacagtggctgcccagtcaatgcactaatattactctgcacccacagagggttagatgagagccctgttctttgggaggaagcagcttgtgtactggaaatgttccactcaatttgtacaacatttgttcacaaacacaaacactttttctgcaatgcgttagcttcacatgaagcaaataattttctgcattttcacctgttgaattccaaaatgccttttctcccttaaaccattccttatctggcctgcatggaattatgtctcccactaaatagctgtcagcatgtttagcttcatattgtagttgcatgtctcatctcctcttccgaagtaagcttcttgaagccaaataccatttcttccttgctaaaagtctgctaaatatagagcgcaaatttccatataactaaactttttccatatatgtatttttaaattctagatggtgactgcagtaaacctgaagaaaagaagactggtgaggtagccacggggatggcctctagacccaactggctgctggcaggggctgcttttggtagccttgtgttcctcacccactgggtttttggagaagtctctcttgtttccagatgggcagtgagtgggcatccacatccagggccagatcctaacccatttgggtgagtttgggtttggaagcaatcacaaaatcggcagttatgcctggaggaagcaatgcctcctttgtcagacagctaggtctgtgctagccagatatttcataccactctccctagatatcagaatgtggcatgaaattattgtgtgctctggagagaagggcactagaagggtcttttcctctgtgcagaaggattgctgaaaagtagatgtgggaggcccaatggttgtgcacagctaagtaagaggttcccagagctccagcataggcatctcgaggaatgcctgcacagaagagcattctcagtggtgggagaggagcagcattccctggccatttcctccagaccctctggttatggttatgggcatttagtaggataagaccacagtcccctgaggagactaggttggctgcctggggcacagatctctattctcagcaaaggagggcagccccaggagatccctgcatcttctggtactttcttgttccagctgtgggacagggtcacacagggagttagtagtctggagtcaagtgttggtccttgtgtttggtcctttttaactctctctctgctcttcctgacacatcttttctcttgtaactggctccatctcttcttgcaaaaaaattggaggaattcttaaaagatctgcctccgatatcttttctctcttgtagtgctgaattcttacaattgaaggcatgcagctgcctactggatctttccccagcagggatctgggcatatcccacaggcttgtcaacctcagcttgtccaaatctgaactcagtatttcccagtcctccacgcatgttcttcttcccccattcccaggtccattttgtctgtccacctcatcatccaaacctgagaccaagagtttgcccagaattctccatcttcctcattttctccaactcagttctatgacttctcttagattaaccccttcttctctatccctaagttcatctgccttagtggagtcctcaccattttttcattcaggctattactgttgtctcctaattgtctctctttagcagaatcttctccacatggttccagaatgatctctgtaaaatgcaaatctgattccaccactcctttactgataacctctcagcagttcccccccaccaatacctggtggcccccaattctcccatatgaggcaggatctggcccccctacttacctttccaaatgctttctgatcttatcctcctgcttcacctgagtcgaacccacttgcgcttctctggaagtgccagactgttcctgtcccccctctgcctgggcttgcttttctgccttgatgtcctggcaagccctactcccttcaaaacccagcacaaacattttctctgtgaattattctgttattatcacaggggatcctcctttatgccacatactataatactttgagtcaatcaatttttatatatgtgttatatatgtgtacacacacacacacacacacacacacacacacatatatatatgtatctgttagaaactttatattctgtattacagattttaaaaaatgtttttcttcctgtctagacactaagtcccttgagggcagggaatgggaaaaggaatgaatgttgattacttactctgtgtcaggtcctgaacaaggacttttgaaaatattatttcatttagagtctgtatcttcttccatatctgggaggaaggcagagaagaaagaaaggaacaaaaggccagagaggaaggaagaagtttattcctatgtgttaaagcttagtttccaaagttacctgtgaaaacaagcataagttttgtggcagagtaaaggaagaactttaatggtaaatggtgagtcctggtaaccaggagaaactcaccattcaactctgggccaatcatattacatccctggccttgctttactcacaagaagaatgtaactaaacttcagggggaaactttctcacatatataaaatcagcatttgcttttcagacatttcctaatcctgtatgttagaatgagacactgaagacggaactgcaactcacaagaccagcatttcccaaactgtgttctgtgagatgctggtttcttgagatgttaatggttactctgagaaaaagaaaatgcttctacatcaaataggttgaggaaatagtgcatttcaatctccctttctttgtgcttcacaatgcacatcagcatattagagacttttgcaggtttcctaaagttatttgaacatggaattcttctttagaacatctattaatatctgacagaataggtgtgtttctcagaaccagcttgagaaatgttgcattaggccatcatcatgaatagctgggactacaggcacctgacactacacctggctaacttaaaacttttttttttttttgtagaggcaaggtctcactattttttccaggctgctctcaaactcctgacctcaaacaatcctcccacctctgcctcccaaagtgctggtattactgtcatgagtcactgtgcctggccctatctgcattatttattaatggtgtttattatatgtttcccccactggaatgtgagctctatgggagaaagggatcgttgttcattgatgcatcccaaacacctagaatggagcctggcacatagtgggcactcaaaaatatttgttgttgatttgggagtagaaaaagatccacactgtccttcatggcctcttctcatatttggtcttctgtagccccagggtcattcttacacaggtaggagcaggcagtaatgtggctaacagcctcatcccagagcctgaggacaattttagattcttagtcctatgtgggctactgtgtatgacctcaagcaggttacttacataccctttcccccagaattctcctctgcaaaatggggataatattagcatttatcttacaggcacatgagaattaaatgaataataattacaggggaaaatcttaaaatagtgcctggtatgtagtgcatgctatggttttgagcttaatttatgtgacagctacttaaatgagtcctatattctagctattattgtttctgggtttccttctaaagtttagtcaaatttcttttttcctcctcttgcaactttttgccaaaatagcaacagaataaaatagtttgtggttgttttaaaagacacacagctatcagttatttatcaaactgacgctggtcttgggaaggccgagactctaggcaagagcagtattgaggtagaggaaagaaagaaaaaaaagcaaactaaatagaaaccattccaatgacctttgctttttgttcttggcagaatcatttaaaatgttactgaccaacatggactgtactttaatagtctgagaaagcttggttactgtgtttacatgataagttggcagatatcattgatctcatggcagaggttttattccttctctgttctgaatgtgtataatattggcttccagtgggctctcatgatctcactggttgtttcacacacgttatctcttatatgtacccagaggtgggaggtatatttctattttatattcgggatgatgaaatattactaatgtcacatgtcttagagcatgtcctttttcacagaggtgcagtactgctgtgcttggcaagtggattgatgcttccatcttgtttgtggtttcgtggtactggtttgatctggtgggttacaggtatgtggaatttacctgcagatagaacacgactgagcttggttatccagtttgtttgcaagcatgcgcaactcgactgaaagtagatacaaccatacaaatatgtactgtggccaaatgggctgttgtaaacagcaactataatgcagatgtcaccaaggtcaccggtgactacctgctctgagttcctgcttcctcctacctccgcctccccctcctcctgtggctgtgctgctttcctggactacactgccataatactacctactcccaaaaatacataaacaaggcacatgtgttaagtagcagatttataaaaattcttgatttttaattaaagtatattattttatttgtataaacttatgggttacaagtgagattgactgattgataacttttaagttcaggggtacatgtgcaggtttgttacataagtaaattcgtgcaatgggggtttgttgtacagattattttgttacccaggtaataagcctagtacccgttattcttcctgatcctctctctcctcctacctgcctctggtggaccccagtgtctgttgttcccctctttgtgtccatgtgctctcatcattcagctcccatttaatgataacatgcagcatttggttttctgttcctgcattagtttgctaaggatgatggcctccagctccatctgtgttcctgcaaaggatatgatctcattcttttttatggctgcatagtattccatggtgtatattaccacattttctttatccagtttaccattgatgggcatttaggttgattccatgtctttgctactgtgaatagcactgcaataaacatacgcgtgcatgtgtctttatggtagaacaatttatattcctttgggtacatacccagtaatgggattgctaggtcaaatggtaattctgttttgaggaattgccacactgatttccacaaatgttagactaatttacactctcaccagcagtgtataggtgcatagattgggtagtggtcaagtcagagttcttaggctgtccctcacctgatggatacagtgaacccataagtaattctcatcagtagcagattttactgaggagatgagggctgtgcatggccatgttgccagttgccagacctctttcactcttcaagattccttgcttttccgtgtttcaaaaatgccatttagagttccatgatgaagctccatttccctttctcctttacatgtaacaggggagctcccagccttccacccagctgtagggtccatgtctgcttactcaaagacctgacccatctcttcccagttacaccctttaggaccccagaagtatcagtgaagacaatcatgttttgggctgccctcttccctctcccctagtctttgtgaagaggagggagcattgaacttattttcctataacagaattatgccagccctcctcctttcccttaaaaggcaatatttaatgattatagtcaggttttctgactctaagtaaaaaaaaaaccactttattatatagcaaatactatatttggtttatgtgaggagagatgagatgttgttaatacatgttaattaagttggtgattcagagtggtactctaggtgctgtgtgtgggtttgagagactgtatcagtaatagaagatttaggatgacaacatagcaagtgaatttctgtacaccgtaagtgccgtcacatttgcatggaaatgtatgtgtaatccagatacgtggctaaatcgatgaggttggccaggtcctcttcctcctggagctatgtgaacatactgttgcagtcttgttgagctgtttgtattgcttgtgtattttttgataggcattgtatttggagcctgtggaggtttgtgtgtacctaagagtaatctttcttctcatcagagagtttatttgtgagattcctcaggaaaagggccaggaaagtttgtcagtgctgagtttgcattaagcatatacagtagcttcttaatctgcatataacttggaaaaggaaaaagaaatgcattgagcgtttgttcagcatttatatcatgccttttcacataaagtataagcaaagtgcttattgggcaggtagttaacagcttcattttaacctgaagaacacagagaaatagactgttagttaaagaacaggaaagctgtgaacctaccgtcttatgcttatttccccagacaagtaaggtcatatccttgagagtcaaacctaatctagttttgttgtctctctggagtattaaatagtagctttaaagactctaagaaaagcagatttaaggcttctagaaggctgcttgcagtagaagaaagcagggccataattcaccagcttcatcttcctttctgatcacttactcacctgcaataagttggagctcaagcttaattatctggaggtggtgcccacttttcactgtgattcatctctggaaaccacacaataatgcaagctgtggccaaagaaatcctgttttcccattgcacagtttatgttgacaatcccaactggagactcagcatgaaattaattatggcagtgactgaacaatttcatacaagcaaagatacaggtgctttaaatgttgatagcagttaaattagtaaagccagagttctatttttaaaaaaagtctagatatagtaaacatattgataggaccccattgtactatagtgtccagataattttactatatggaaaacttcatttattgaaaacttacatgtcagttattataattgttattgaaatagttaactattacttctgcttgatgtctttgatgttgtacagatttgggggagattattggagggcctcaaacaaaagcagttaaggaatacagttaaatgaaaaaggtaaagtgactaacagtgcgtatcatatactgtcattggtgtacaaaaaggaagggaaatgcatgcacatatgtatttctttgtatgtgtagggtatctctggaaggatgcaatggtaagtgcttacactggattggttgccttcactaaggggaacaaatgggttacgggtcagaaagtcccttttgtagcatttgaattgtaattttgaatttataacctatttaaacagtacaattttggtggatttaaaatatagagcctatttaaaaatagaaataaaaatgataacagtcaagataaatttgagagatgttttcattccctctagataattctctgtagtaaggagaacaatattattctaacgtctttagattagaatatcaaattcgggatcattcttttaaaaacagtcattgtaagccgtaagtaagaaaaattcaacctcactaacagtcaaataagtgcaatttaaaatgtcatagcattttcgaccttaatttggtaaagatttttggtattattacatatatttggtaaagatttttaccaaattaaagatgaaattttggcaggatgtgagaggtgtcaagacttggcaagttttctgcaggaagcaaagacaagtattaggtttcctgaaagctgggtataaggtttcctgaaagttgctttcaggaaagcaactggtcacaagtcatgactttaaaatacttatgccccttgacataagagttgtgttgctaggaatctgttttaaggaaataataggtaatgtggtaagggatcattgacaaaaaaagatgttcatcacactgttgttttaaaagcttgacataggaaccttcacaaatggccagcaataggaaaatgcttacttatattgtggtgtatttatccagtgaagtattatatgtacattaaaatgttttagaaaaaaattatttacactagtaaatgttcctgatataatgtttcataaatagcagcatatagtctttaatatgtggtacaattccatttatgtaaaaatacttctgtatatacacagaagagacttagaaatacacagaaatattggctgtggttatctccgtcttagacaatccttaattgcttcttttcagttctgtatttttaaaatttctaaagcaaataggcattacagttgttttattttaaaatgaaaaaattccattgagaatctaggtatttgaaatctccctatggagttaaactccatgggttgtagaggaccttggaatctagttctcatgctcatctgagagatgttctttttgaagtggggagaaataggcagtcaggcaggtggcattgccctgtgatggtgcaatggaatgtattgatgaacttattgagctatggggcattaagatgctgactggggccactttctgcttcccactcctttctggagttcttggccgaagtagtgaagagcctgctctagctacccttgaagggtgggtcccaattatacaacatggattggaatgtttcaaaaatgccatattttctatggaaaggggttatattgatggtcccaagatggagtggaccctgcagtgctatttcaaagctgatttcacaaggattgggggaaaggttatgtgatctcagcattggctcaataaactaacatttacagagtgcctgctgtggatcaggcagaatgcatagctcctgacacctagcaggctgttgggtaatgaatgaactgattgcagaattgctaaagcagtgagcctacaaatgctatgtcttctcttggggctgtgtggttggaaaagtcaatgtacctcttgtaggacaggtggtagcatttagatggacagaaattccttagaagccccttaacagaggtgttctagaaaccacactctacctgttttctaatgtcctgcatctgattggttaaatgtaatatttttggacatatttttggtattgcagaaattttagtttttattgctgttaggatcttaacagcaattacctaaaaatacccttttcactcctcctgccctttctgaggaaatagcagtgaactgagatttactagatccacattctacctccagttgagacaataactggctgtgtgacattaggcaaatcacattaaccttgtcagatcttagttttctcatctgtctggagattggatcagtatacccctaaggtctgttctggtcctaaaggctataaattggtcatcctctaagctcgactgctttcctgtctgattcttttctctctcacaaacaggaacagcttcagctgcggggctcctttacctgcacacatgggcagctgctgtgtctggctgtgtcttcgccatctttactgcatccatgtggccccaaacacttggacaccttattaactcagggacaaaccctgggaaaaccatgaccattgccatgatattttatcttctagaaatatttttctgtgcctggtgcacagcttttaagtttgtcccaggaggtgtctacgctagagaaagatcagatgtgcttttgggtgagtacatttgaaaggtctggattaaaataattgctcaaaaatatccttatggactgaccaggatttagcactttatgtaactggtggaaataagcaggatgatctagctttcttggtaaaatagactctcttgattaaaacacaaaacctggagtgatgtctaaattataaattaaaatcaaatgtattaatttaccagcgcatttctgtaatacttattactacaaaggtcttttaaattaattagttgtgaaaagattcagtccatactaaagcgtaaacaatgtaacacttgtgttatacgatgcgttaggaaaaggtatgatcatgatactcatgctgccacttcagtggttggctcgtaaatatacatggggattgtgattttttggggttcccctgaattttatttatgaatgttttttgagatgaggtcttactctggcagtgatgtgatcacagctcactgcagccttgagctcctgggctcaagcgatccttctacctctgcctcccaagtagttgggtctactaggtgtgggccaccacactccactaatttaaaaaattttttgtagagacaggggtcttgctatgttgcacaggctggtcttgaactcctggcctcaagtgatcctcctgccttggcttcccaaagtgctaggattacaggtgtgagccaccacacctagactctattatttttatttaccatatttgtaacaaaaaattcatatatcttagtgtaaatggtaaatctccaagtcatagaacaaatatatttaccattttagtggttatgaatttgcataccaaaattataatttaataaacttagctcagtttaatattttaaaaattgattcacataccaaaattataatttcataaacttagttcaattttaatattttaaaaattggcttctggcaataatacaattattggtgtatactaggcatacataaatcgaatgttgtgaatcattttagtttacataattttagcttaagtaacatgtcaaatacttctacaaagtgtttgaaagatgaggagaaaaaacatgttaataagggatctacttgtttgtttgttcacttattcattaaaaatattaacacgatttcactggttgtctacattttgaaaaaaaatgatcatgtaccttatgttccaggaacagtgccagatactgaagattatttttacacatttttatctgtataaatttgtggggtacaattgcaattttgttacatgcataggttgcatagtggttaagtcagggcatttagagtatccatcaccctgacagggtacattgtatccattaatcaatttctcatcattgccccctttcccaccctctcactcttctggtctactttatctaccactcccagctgctgaaatattaaaaacacccactgtccttgcctacctggagctttagttgaatgggggaaacatcatatataaaacgagacaaatacttaagaaattacagttgtgtgagtgctactcaggagaagtgaaggcttctattagggttctgttttttttttttcttttttttttttttgagacagggtcttgttctgttcctccagctggagtgcagtggtgcagtcatagctccctgtatccttgagctcccccctcaacctcccaagtagctgggtctccaggcacacaccaccatgcctggctgattatgttgttttttgtagagatggggtctcactttgttgcccaggctggcgtcgaactcctgggcttacgcaattctcttgcctcagcctcccaaggtgctgggattacatctacctgggttctgttacagttcccctggtgccctgacagacatccgactactctgcacattttgccatatgcttttctaccccacgagctagacatctgtcaggagaggctggtttgaaagacatattttaaaattacatgaaatatttttgaattaacttggagaatttggtatttctggtaaatactcaagctttcatctaatgagagaaacacattgctgcatttcctccgtggtaaccttggctttgcaaactttgtatttcttctgatttatttcaggtgtgtgtactctctcctgctttgttttcttgtccaatgccctgctttttttcttataccagcttgcttagggatctgccatgagaaaaaaacaaatgaaagtaagagctattccatgcatgagtttgtttctttagaattttatgaacgatgagttttttttttagtttcttctcactacttatggaattgtagaaacagtgcataattacagcttcatacaactaagaactttaaagaaaaataagagtgatgttatttgatgaggccacaaaagccaagaaatgttggtaatattcagagtggcttttaatacaactgagttgaaaagaatatttattatatcagaatttagttataaatttatttcctggattcctcctgctatttcctggaaaattggacaccgctgtttttgcttggcttctgacttttacttgacatttcttaaatgccttaatttcttaatttccatatggcagcatatctctgtttccattcttagtatgtatggttttagatgaagtaagtaaactttaagtgtaagctagtttgttgcatatcccaatttagctccactttattggctggcctgttggcacactgtgatttccagcatgcatcctctgtgaggcctctgtgcccagaaaactcacatcctggggcagaattatcacaagcactgccatattaagagcctacgtatgatccattgtgatcctcaacctggtgcacggaagggctcttattgcatccctatgggagctcagaagacttcactgtcccctgcccaatcaacagtcagtcatgaacacgttcagcaacctaacaactaggaaatactcaagaaattcaaagaaatatgtatcgggaaaaggctggggtcctgtcatttaaagcacgattcctagaaccctacctgatattttccagttatcaaaagcactactagagtaattgtttaggttctgagataaattaaatcagtacatgaatttccagggtatgttcctttcaaggaactctcagctgctggaatacaacattggaaggatttttggatcagactataacatattctttctttctcttataacagggacaatgatgttaattatcgggctgaatatgctatttggtcctaagaaaaaccttgacttgcttcttcaaacaaaaaacagttctaaagtgcttttcagaaagagtgaaaaatacatgaaactttgtaagtatagttttacattcttaaaaaaaattaattatataaaattctaaacgtatgaaattaaagagtataatgatccctcatgtatccttcatcctgtttcagcaattctcaacattttgccatgttgttaatagctatcttctctagtttttttaaaaaattatactttaagttctagggtacatgtgcacaacgtgcaggtttgttacataggtatacatgtgccatgttggtttgctggacccatcaactcgtcatttacattaggtattcctcctaatgctatccctcccccctcaccccaccccacagcaggccccagtgtgtgatgttccccgccctgtgtccgtgtgttctcattgtttaattcccacctatgagtgagaacatgtggtgtttggtttgttgtccttgtgatagtttgctgagaatgatgtttccagcttcattcatgcccctgcaaaggacatgaactcattttttatggctgcctagtattccatggtgtatatgtgccacattttcttaatccagtctatcattgatggacatttgggttggttccaagtctttgctattgtgaatagtgctgtaataaacatacgtgtgcatgtatctttatagtagcatgatttataatcctttgggtacatacccagtaatgggatggctgggtcaaatggtatttctagttctagatccttgaggaatcaccacactgttttccacaatggttgaacttatttacactcccaccaacagtataaaagcgttcctatttctccatatcctctccagcatctgttgtttcctgagtttttaatgatcaccattctaactggtgtgagatggtatcccattgtggttttgatttgcatttctctgatgcccagtgatgatgagcattttttcatgtgtatgttggctgcataaatgtcttctttggagaagtgtctgttcatatcctttgcccactctttgatggagtcgtttgttttttttttcttgtaaatttgtttaagttctttgtagattctggatattagccctttgtcacatggatagattgcaaaaattttgtcccattctgtaggtttcctgttcactctgatggtagtttcttttgctgtgcagaagctcttcagtttaattagatcccatttgtcaattttggcttttgttgcgttgcttttggtgttttagtcatgaagtctttgtctatgcctatgtcctgaatggtattgcctaggttttcttctagcgcttttatggttttaggtctaatatttaagtctttaatccatcctgaattaatttttgtacaaagtgcaaggaagaaatccagtttcagctttctccatatggctagccagttttcccagcaccatttgttaaatagggaaccctttcctcctttcttgtttttgtcaggtttgtcaaagatcagatggttgtagatgtgaggtgttatttctgaggcctctgttctgttcaattggtctatatatctgttttggtatgagtaccatgctgttttggttactgtagacttgtagtatagtttgaagtcaggtagcctgatgcctccagctttgttctttttgcctaggattgtcctggctatgtgggctcttttttggttctatatgaactttaaagtagttttttccaattctgtgaagaaagtcattggtgacttgatggggatggcatttaatctataaattaccttgagcagtatggccattttcatgatattgattcttcctatccatgagcatggaatattcttccatttgtttgtgtcctcttttatttcattgagcagtggtttgtagttctccttgaagaggtccttcacatctcttttaagttggattcctaggtattttattctctttgtagcaattgtgaatggaagttcactcatgatttggctctctgtttgtctgttattggtgtataggaatggttgggatttttgcacactgattttgtatcctgagactttgctgaagttgtttatcagcttaaggagattttgggctgaaatgatggggttttctaaatatacagtcatgtcatctgcaaacagggacaatttgacttcctcttttcctaactgaatgcactttattcccttctcctgcctgattgccctggccagaacttccaacactgtgttgaataggagtggtgagagagggcatacttgtcttgtgctggttttcaaacggaatgcttccagtttttgcccattcggtatgatattgactgtgggtttgtcataaagggctcttattattttcagatatattccattaatacctagtttattgagggtttttagcatgaagcactgttgaattttgtcgaaggccttttctgcatctattgagataatcacgtggtttttgtctttggttctgtttatgtgatggattatgtttattggcttgcatatgttgaacccaccttgcatcccagggatgaagctaacttgatcttggtggataagctttttgatgtgctgctggatttggtttgccagtattttattgaggattttcacagtgatgtatatcagggatattggtttaaagttctctttttttgttgtgtctctgccaagctttggtatcaggatgatgctggtctcataaaatgagttagggaggattccctctttttctattgattggaatagttttagaaggtatgttaccagctcttctttgtacctgtggtagaattcggctgtgaatccttctggtcctggactttttttggttggtaggctgttaattattgcctcaatttcagagcttgttgttggtctattcagagattcaacttcttcctagtttagtcttgggagggtgtatgtgtacaggaatttatcaatgtcttctagattttctagtttatttgcatagaggtgtttatagtattctctgatggtagtttgtatttctgtgggattgaaggtgatatccctttatcattttttatcatgtctatttgattcttctctcttttcttctttattagtcttgctagtgatctatcaattttgttaatcttttcaaaaaaccacctcctggattcattgatttttttgaaggatttttgtgtctctatctcctttcgttctgctctgatcttagttatttcttgccttctgctagcttttgaatttgctggctcttgcttctctagctcttttaattgtgatgttagggtgtcgattttagatctttcctgctgtctgttttgggcatttagttctataaatttccctctacacactgctttaaatgtgtcccagagattcttgtacattgtgtctttgttctcattggtttcaaagaacatctttatttctgccttcatttcattatttacccagtagtcattcaggagcaggttgttcggtttccaggtagttgtgtggttttgggtgagtttcttaatcctgaattctaatttcattgcactgtgatctaagagacagtttgttatgattttggttcttttatgtttgctgaggagtgctttacttccatttatgtggtcaattttggaataagtgtgatgtggttctgagaaaaatgtatattctgttgatttggggtggagagttctgtagatgtctattagttccgcttggtgcagagctgagttcaagtcctggatatccttgttaaccttctgtctcattgatatgtctaatattgacagtggggtattaaagtctcctattattattgtgtaggagtctaagtctctttgtaggtctctaaggacttgctttatgaatctgggtgctcctgtattaggtgcatatatatttaggatagttagctcttcttgttgaattgatccctttactattatgtaatggccttctttgtctcttttgatctatgttggtttaaagcctgttgtatcagagactaggattgcaacccctgctttttttttgctttccatttgcttggtagatcttcctccatccctttattttgagcccatgtgtgtgtgcatgcaagatgggtctcctgaatacagcacagtaatgggtcttgactatccaatttgccagtctgtgtctgggcatttagcccatttacatttaaggtgaatattgttatgtgtgaatttgatcctatcattatgatgttagctggttattcgcccattaattggtgcagtttcttcatagcatcgacggtccttacaatttggcatgtttttgcatggtactggttggcgtgtttttgcaggtaccggttgttcctgtccatgtttagtgcttccttcaggagctcttttagggcaggcctggtggtggcaaaatctctcagcatttgcttgtctgtaaagtattttatttctccttcacttatgaagcttagttataaaattctgggttgaaaattcttttctttaagaatgttgaatattggtctccactctcttctggcttgtagggtttctgacaaaagatccgctgttagtctgatgggcttccctttttgggtaacccaacatttctctctggctgcccttaacattttttcctttatttcaaccttggtgaatctgacagtcatgtgtcttggggttgctcttcttgaggaatatctttgtggtgttctctgtatttcctgaatttgaatgttggcttgccttgctaggttggggaagttcttctggataatatcctgaagagtgttttccaacttggttccattctccccgtcactttcaggtacaccaatcaaacctagatttggtcttttcacatagttccaaagttcttggaggatttgttcatttcttttcactcttttttctctaaacttgtcttctgactttatttcattaatttgatcttcaatcactgatatcctccttccacttgatcaaatcagctattgaagcttgtgcatgaatcacgaagttcttgtgccattgttttcaactccatcaggtcatttagggtcttctctacacgtttattctagttagccattcgtctaacatttttcaaggtttttggcttccttgcaatgggttagaacaagctcctttagctcggagaagtttgttattagccaccttctgaagcttacttctgtcaactcatcaaagtcattctccgtccagctttgttccattgctggtgaggagctgtgatcctttggaggagaagaggcactctggtttttagaatttttggcttttctgatctggtttctccccatctttgtggttttatctatctttggtctttgatgttggtgacctgcagatggagttttggtgtggatgtcctttttgttgatgctgatgctattcctttctgtttgttagttttccttctaacagtcaggtcctttagctgcaggtctgttggagtttgctggaggtccactccagacgtttgcctgggtatcaccagtggaggctgcagaataggaaatattgcagaatagtaaatattgctgcctgatccttcatctggaagctttgtcctagattggcacccacctgtatgaggtgtctgttagcccctactgggaggtgtctcccagttaggctacatgggggtcagggacctacatgaggaggcagtctgtctgttctcagagctcaaatgccgtgctgggagaaccactgctctcttcagagctgtcagacagggacgtttaagtctgcagaagtttctcctgccttttgttcagctatgcctggcccacagagatggagtccatagaggcagtagaccttgctgagctgtggtgggctccaccctgttccagcttcctggctgctttgtttacttactctagcctcagcaatggcagatgcccctcccccaaccaggctgcgccttggaggttgatctcagactgctgcactagcagtgagcaaggctccctgtgtgaggtacccacccagccaggcacaggatggtatctcctgttctgccggttgctaagaccatgggaaaaacacagtattttggcgggagtgtcctgtttttccaggtacagtctgtcatggcttgccttggctaggaaagggaaatcctctggccccttgcacttcccgggtgaggtgatgccacgccctacttcagatcaccctccatgggctgtgcccactgtgcaaccagttccaatgagatgaaccaggtacctcagttggaaatgcagaaatcgcctgtcttctgtgtcgatcatgctgggagctgcagaacagagctgttcctattcgtccatctatttctctacttttttttttgtactttaaagcaaatctctgatatcatgccatttccaccataaatactctgtattggttttatttcacttctaacatagataagagaattcaacatgcagaatttccaaaatgatttgttctaatggttgagactatttactccatttcttgttttccttttttggggagattatgttaatgtttgggatgctgatgaactaaaatctcaaacatgaaattagtttactattcaatatagtaaactcatgtaaaatagactggattaaataaaaatgtactgaatgtatttaatgtgaagacagcgtgttaagtagttgttaagtaggattcaaagatgtgaataatggtctccaccttcaaggacttggtgctttacaaaggagacaaaatattatagtgtaaagatataaaaaacaattaagaagctgtataagttctctatgtatttccaaaagaaatatcacaaaacagaccattatataaaaaccttcatatatgtttcatcttaatttaaaagattatatttggccaggtgcagtggttcacttctgtaatcccagcactttgaaaggccaaggcaggaggattgcttggggccaggagttcgagaccagcataagcaatgtagtgagaccccatctctacaaaaaatttaaaaatcagccatttgtggtggtgcacctgcagtcccagtagtctcagctactagggagggcgagggtgaagtgggaggatcttttgagcctgggaggtcaaggctgcagtgatggtgccactgcacttcagcatggatgacagaatgagactctgactcaaaaaaaaaaaaaaaaagagagaagaaaagattctatttaaacttagggagaaatgagattttttttgtgtgttttcttatgttttggtatatcccttgaaacaaataactagcagtttttgtttttaatcctgacaatctttgtctttttttttgttgttggtaagaaccacaattctttaattcacttatcaaatcgaggcatttggaacagtttatttacagttatttagtcatttttgtgtgattaaaaaaagacaagtttcttagagcaattttaggttcataggaaaattatatggaaagcgtggagatttttccatatgcctcatgcccccacatacatacagcaccccccactatcaaaattactcaccagaatgatacatttgttaaaataaatgaacctacattgatacatcattgtcacccaaaggccatagtttacattagggttcacttttagctttgtacagtttaggagttttgacaaatgtataattacatagatccctcagtgcggtatcatacagaatactttctctgccctaaacatcccctgtgcctcacctaatcatcgattcctcctccaaacccctggcaaccactaatgttttactgttttcattgttttgcattttccagaatgtcaatttttgtcttttaagggtttaatctatttttaccatgatttctgaatgtatatttatctaatgtgatcatcttacttttctttttcattttccactttttctaggtatgttttttcctttttctttttgatatttttttcattgattagggttttttttttcccttatgcccctcctccccactcctctttctagtttggaaattatactttcaatatctattcttttagtagttggttgtttttctcttagcacattgaagatattattctcctgtcttctgctgttgagaagtcagctgtcagtgtaattgtttttccttggaaaataatctgtcttttctctttggcagctcttaagatttttctgtgttttggtgttccgtagtttcactgtgatatatctggatgcagattttttcctccatcttgcttgatagtcttcaggctttatgaatctgaagagtcatgtcttttattatttctggaaaattctcaacattgtttctgcaaatattgcttctttcccattctttctctttctttttgactccaattagatatgtgttggactttcttattctgttttccattgctgttaacctctttcatattttctgcctctatgttttgggctgccccttgaactaactctctattcagctttgtctaatttgattgtctttgagtttctaatttcaattattataattatctttttatttctagaactctatttgatttcttttcaaaattttctgattatttattttagtctcatgttccctagtcatacttttgaataccctcttttatttctgtaaatataataagcatacttgttttatattctgattcagagagttccaacatctgtctctttgtgggcttgattctgcagggtgtttttttctttgtttcctgctcatggaaacttgttttcttgtgtgttttgtgacttatttttactttaagctcatggtccttggaacatttttaggggaaattcttgaaatctgggtttaaagagtggttgatgtacacatgtcacacatgaaaattaaccgaagaactacacatttcccctttgcacaaaatcattggccaataaattcaataattttataaaccttgttattttaaaacaaatttaggtgttttttttccctagtgccatgtgtttattccctcccatgtgagtggttcgcatacagagcacacacaggagtgggcaccatggaagagggcagcattcctggcttctgatgggaggatcttggcctcatggtgtaagaagggagaggatggtttatctcctgccttcactggggcctaggggacccaggagcaaattccaccctttccatctctcagccaaggagaagccaccttggtgacgtttagttccaaccattatagtaagcggagaagggattggcctggtctcaaccattacagggtgaagatataaacagtaaaggaaggtacagtttggatgaggccacaaaagagggcagatgacaccatcagaagcatgtgcaggggaggggcagttactgggcttctgggctgcttagtccattcaccttatctgtgatgacctttgcctgctcgaaaacaaccttctcagtgatgccagcttcccttgcatctagcttcttcccaatgcaggtgattactccaagtccctctgccagagcacgggccactttctgctcaatcagttcatctgactccccaaagacatgccttctctccgagtgccccaggactacccacgtagctctgcagtctttgattatgccagggctgatctccccagtaaaggccccattagtcactttgtagcagttctgcgcaggcacagcaatcttgggatctagcttctgctgggtgaagtcgatataggcagttgggggagagcaaaccacctcagcgtcggctggcaccttggtcacgttcagtgtcaatgagctccccaagactcttcttccacccattcatcttccaggtcctccaagaagaacttcctggagggtgccatggcactggagctgaggcactgaaggtcagtgtcagcaaatttattttattttatttattttaaaaaaacccaattatttcttttttctgtttagttctgtggctgcttgttggtgtgggattgttgggattaggactacggcataaagcctatgagagaaaactgggcaaagtggtaagtaattaaaaaccttgaaatagaattttatatggtatatatatgtgcatatatttgtacaatttaccattctgattgaacctggatctgatgacttcagagccctgggccctatctccttaacccttatgtgccagactgataagatagtgggattattttatgaagttgggttcttggaataggataggcccatacactagaggcaaattgttgatgattttgttttatggagttatttctgccattcatgatttaacatatctgaactatgtgtattagtttgttcttgcactgccataaagaaatacttgagaccgggtaatttataaagaagaattttaattatcccatggttctacaggctgttcagaaagcatggaggtatctgttctacttctggggaggcctcaggaaacttgcaatcatagtgaaaggcaaacagggagctagttatcttatgtggtggagcaggaacaagagagagagggagtaggtgctacacattttttttttttttatttgatggagtctcactctgccgcccggctggagtgcagtggtgcgatcttggctcactgcaacctctgcctactgggttcaagcaattcccctgcctcagcctcctgagtagctgggactataggcggtgtgccaccatgcccggctaatttttttttttgtattttagtagagacgggtttcaccatgttggccaggatggtcttgatttcctgaccttgtgatccgcctgcctcccaaagtgctgggattacaggcataagccaccatgcctggcaggtgctactcactttaaaacaaccagatctcatgagaactcactctttcactattacaacaacaccaaagggggtgttttatcatttatttatttatttatttattagagaacagtaccgagggtgtggtgctaaaccattcatgagaattccacccccatgatctggtcacccccaggccccaactccaacactagaggttaaaattcaacatgagatttggtagggacacagattcaaaccatgtcactatgaaataagcaactgttttatattggattttctgtacttcttggtagatattgctgaatacagcaatgtgagattctttaggaaaactcttacagataattcttgattttgcacattatgggtagcttatgccttgacaggtagtaaaacttttcttgtctctttctttcctctcttgctatctgcagttttaaatgttttaatatccttttctcttttagaacagtgggcagaaataagaataagtaattgaatgttgtgctttctatctgatctgataaaaaatctagtgtgtttcataatgcagtcagagttacagttttggttaaaatagaaattgttgagggttgactttgaattttagcaatctgtactagcgggaacatttttcattttgaataaaaagctacactgagaacacagaccatgcttctcttcttggtctttgtacttccagtaacttacagagtgcttgccaggtattcagaactaagtaactatttcttaataagtagataatagtagaccatcattacatgctcctttaactgtcggtcattattattgcaacataatgtccatcagaaaaggatacctaatgtcatccaggaattctttttggaaggagttatttgaattggatttaatacctgttcttttggtcatttgctcattcattcatttggctaatgattaccaaatgtttctttattacctggtgccagtgatacagatataaacaagttggacaagaacctgccctgccagagtttgcattctagtaggggagaattatagtatttagagaacaaataaagaaatggtctccttttagatcaagctgccatgaaggaaacaggattgtagaatggagggtaactgggtatgggggattagagaaaactgtctgaggaggtgacatttgagatgaaatttgcaagttgagaaaaaagttgtgaggcctgggatgttggcagaaggaacacatataaaggactgagggagaacgacacctggtgtgtttgagggacatcagggtgactggcatggctgaagctcggtgaagagtagtagaagatgacgtggagaggctggggagggccataccagggccttgtagaacacagtgagaagtgctgcttttattttttatttattttcattttattattagtattatttttaatgtcaatagttttttttttaatgttttagatggaatctcacactctgtaacccaggctggggtgcagtggcatgatctcgtttccctgcaacctctgccttctgggttgaagcgattctcttgcctcagcctccagagcagctgggattacaggcgcacaccaccatgcccagctaatttttgtatttttagcagagacaggatttcaccatgatgggcaggctggtctcaaactcctgacctcaagttatctgcctgccttgacctcccaaagtgctgggattacagacgtgagccaccgcacctagccattgtcaattgtttttgggcaggtggtttttggttatgtggataagttctttagaggtgatttctgagattttagtgcacccgtcacccaagcagtgtacactgcacccaatatgtagtcttattttgtgatcacgtttttttcaataggtttttggggaatgggtgctgtttggttacgtgaatatgttatttagtggtgatttctgagattttggtgcagtcatcacctgagcagtttaactgtacccaatttgtagtcttttattcctcactccctcccaccctttaataagcaactgagtctcctgagtctccaaagttcattgtatcattcttacacctttgcatcctcatagcttagctcccacttacgtgcaagaatatataatatttggttttccattcccgagtcacttcacttagagtaatggtctccaattccatccaggttgttgcaaatgccattattttattcattttttatggctgaatagtattccattacacacacacacacacacacacacacacacacatatatatatataaatcatattttctttatccacttgttgattgatgggcatttgggctggtactatatttttgaaatgtcaaattgtgctgctgtaaacatgtatgtgtgagtatctttttcatataatgacttctcttcctctgggtagatacccaggagtgtgattgctggatcaaattgtagatctatttttagttctttaaggaatctccacactgttttccacagtggttgtactagtttaccttcccacagacagtgtaaaagtgttccttttcactacatccatgccaacatttattagtttttgattttttgattatggccattcttgcaggagtaaggtagtatcacattgtggttttgatcaggcatttccctgatcattagtgatgttgagcatttttccatatgttttttggccatttgtgtatcttcttttgagaattgtctattcatgtccttagctcactttttgatgggattttttttttcttgctgatttgtttgaattccttgtagcttctggatattagtcctttgtcagatgtatagatagcaaagatttccccctactttgtgagttgtctgtttagtctgctgattatttcttttgctgtgcagaagtttttagtttaattaagctccatctatttatctttggttttgttgcatttgtttttgggttcttggtcatgaaggctttgcctaagccaattttaaaagagtttttccaatgtcgtattctagaatttttatggtttcaggtgttagatctaagtctttgatccatcttgagttgatttttgtataaggtgagagatgaggatccagttttattcttctacatgtggcttgtcaattatcttagcactatttgttgaatagaatgtccttttccactttatgtttttgtttgctatgtcaaagatcagttgactgtaatcatttggcttatttctgggttctctactctgttccattggtctatatgcctttttttataccagtaccatgctgtttttgtgactagggctttatagtgtattttgaagttggataatgtaatgcctttgatttattatttttacttagtcttgctttggctatgcagactctttttttgttccatatgaattttaggatttttttccagttctgtgaagaatgatggtggtattttaatgggaattgcattgaatttgtagattgcttttggcagtagggttattttcacaatattgattctacccatccatgagcatggatatgtttgcatttgtttgtgtcatctaagatttctttcagcagtgttttgtaattttccttgtagaggtctttcacctccttggttaagtatattcctaaatattttattttatttattttttcagctattgtaaaaggggttgaattcttgatttgattatcactgatcacagttggtgtatagcagggctattaatttgtgtacactaattttgtatcttgaaactttgctgaattcatttaccagttctaggagctttttggtggagtctttggggttttccaggtataccattatgtcatctgcaaacagcgacaatttgacttcctctttatcagtttgataccctttatttttttctcttgttcaatgtgctggctagaactttcagtactatgttgaatataatggtgaaagtgggcatccttgtcttgttccaggtctcaggggaatgccttcaacttttccctattcagtataatgttggccgtgggtttataataaatggcttttattaccttaaggtgtgacctttctatgccgattttgctgagggttttaatcataaagcgacgctggatattgtcaactgctttttctgtgtctattgagatgatcatgtgatttttgttttaaattctgtttatgtggtgtatcacatttattgacttactgatgttaaaccatccctgcatccctgatatgaaacccacttgatcatggtggattatctttttgatatgctggtggattcagtttgctagtattatgttgaggatttttgcatctatattcatcagagatattggtctgtagttttcttttttgttacatcctttgctagttttggtattagggtgatactggcttcatagaatgatttagaaaggatcccctctttctctatcttttggaatagtgtcagtaggattggtaccaattcttctttgaatgtctgatagaattcagctgtgaatctgtctgttcctggacttttttttgttagcaattttaaattgccatttcaatctggctgcttttcattggtttgttcagagtttctattttttcctggtttaatctaggagggctatatatttccagaaatttatccatctcctctaggttttctagtttatgtatataaagatgttcatggtagcattgaatgatcttttgcatttctgtggtatccgttgtagtattgtctgttttgtttctaattgaacttattctttacttgggttatctcactaatagtctatcaattttatatgtcttttcaaagagacagctttttgtttcatttatcttttgtatttttgtttgtttgtttcaatatcatttaattctgctctgatttttattatttcttttcttgtgctgggtttgggtttggtttgttcttgtttctctagttccttgagttgtgaccttaggttctctatttgtgctgtttcaaactttttgatacaggcatttaatgctgtgaactttcttcttagtactgcctttgttgtatcccagaggttttgataggttgtgtcactattatcattcagttcaaagaatttttaaatttccatctgatttcattgtggacacaatgatcattcaagagcaggttatttaatttctatatatttgcatggttttgaaggttccttttgaagttgatttccaatttttatttttattttttgagatggagtttctctcttgtcacccaggctggagtgcaatggcacaatctcggctcactgcaacctctacctcccaggttcaagtgattctcctgcctcaccctcccaagtagctgggattacaggcatgcaccaccacatccagctaaattttgtatttttagtagagatggggtttcgccccatgttggtccggctggtcttgaactcctgacctcaggtgatccacctgccttggcctccaaaaatgctgggattacaggcatgagccactgcacccggttgatttctaattttattccattgtggtccgagagatagtacttgctataatttcattttcttaaatttgttgacacttgttttatggcctatcatatggtctatcttggagaatggtgcatgtgctgatgaatagaatgtatattctgcagttgttgggtagaatgttctgtaaatatctgttaagtccatttgttctagggtattgtttaagtgtttctttgttgactttctatcttgatgacctctctagtgctgtcagtgcagtactggagtccccactgttactgtgctgctatctatctcatttcttaggtctaatagtaattgttttataaatttgggggttccagtgttaggtgcatatatatttagggttgtgatattttcctgttggactagtccttttatcgttatgtaatgtccttctttgtcttttttaactgctgttgttttaaagtttgttttgtctgatataaaaatagcaactcctgctcacttttggtgtccatttgcatggaatatcttttccacccctttaccttaagtttaggtgagtccttaggtgtcagatgagtcttttgaagacagcaggaacttggttggtaaattcttaccagttctgcattctatatcttttaaatggagcatttaggacatttacatttaatgttagtattgagacgtgaggtactattctattcattgtgcaatttgttgcctgaataccttgggttttctttcattttgttgttgtttttttaaggttctgtgagatttatgctttatggagattctattttggtgtatttcaagtatttgtttcaagatttagagctccttttagcagttcttgtagtgctggcttggtagtggcaaattctcttagcatttgtttgtctgttaatgactgtatctttccttcatttatgaaagcttagtcttgctggctacaaaattcttggctgataattttttggtttaaggaggctaaagataggaccctaatctattctagcttgtagggtttttgctgagatatctgctgttaatctgataggtttttctttataggttacctgatatttttgcctcatacctcttaagattctttttttttgtcttgattttagataacctgatgactatgtgcctaggtagtgatctttttgcaatgtatttcccaagtgttttttgagcttcttgtatttggttgtctagatctctagcaaggctagggaagttctcctcaattattccctcaaatctgtttccaaacttttagatttttcttcttccttgggaatactaattattcataggtttggtcatttaacataatcctgaacttcttggaggctttgtttatcttttaaattttttttcctttgtctttgtcagattgggttaattcaaaagccttgtcttcaacctttgaagttttttcttctatttgttcaattctattgctgagattttccagtgcattttgcccttctctaagcgtgtccatttctagaagttgtgattgttttttatttatcctacctatttcactggagatttttccattcatatcctgtatcatttttttttttatttctttaagtctgactttacctttttctggtgcctccttgattggcttaatagtcaaccttctgaattctttttctggcaattcagtgatttcatcttggtttggatccattgctggtgagctagtgtgatcttttgggggtgttaaagatccttgttttgccatattaatagaattgtgtttctggttccttctcatttgtgtagactatgtcagagggaagatctgggactcaagtgctgctcttcagattcttttctcccatagggtgctcccctgatgtggtgctctccccttttccccagggatgggactttctgagagctgaactgcagtgattatttcttttctggatctagctacccagcagagctactgggctctgggctggtacttgggagtatctgcaaaaaatcctatgatgtgatccatcttcaaatctcttggccatggataccagcacttgctccagtcgaggtagcagaggagtgaagcatactctgagagggtcattggttgtatttttgttaagtgtgctggttttgttggcctccagccagggtgtggcactttcaagagcacatcagctgtggtagtataggcaggatcaggtggtgggtggggccatggaactcccccaaaattatgtcctttttcttcagctaccagggccagtagagaaagaccatcaggtaggggcagggttaggtgtgtctgagctcagactctcgttgggctgggccggctgtagctgctgtgggagatgggtgtgtggatcctaggccaatggagttatgtttccaggagaattattgctgcctctgctgtctcacacaggtttccagagaagtgggagaaagccggcagccacaggcctcacccagctctcatgcaacccacagcatgaaaggctggtctcactccaaccgtgcccccacaacagcactgagtttatgcccaggcagccggtgagcagggctaggaacttgccccaggctacaagcctcccagctgagaaagcaagccaactcatagttccttggctgtcccatggaccctgcagcaacaatacacttccttcaaagggtctgtggattcccttggctttcttggcatgttcctgtggtagttcttggagcaaaagttcatggtgtgggtctccgtgtgctgctctctctgttgaagtgggagctgcaagttagttttgcctcctatttgtcattttcctgccatccccaatatgtagtcttttatcctttaccccctcccacccatccctccaagtccccaaagttcattgtataactcatgcctttgcatcctcatagcttagctcccacttacaagtaagaacatacgatatttggttttccattcctgagttacttcacttagaataacggcattcagacccatccaagttgctgcaaaagacattattttgttccttttcatggctgagtagtatcccatggtgtacatatatactacattttctttatccagtcattggtcgatgggcacttaagttggttccatatctttgcaattgtgaattgtgctgctgtaaacatgtgtgtccaagtgtcttcttaacataatgccttctttccttttgggtagatccccagtagtgggattgctggatcaaatggtagttctccttttagttctttaaggaatctctaaactgttttccattgtgattgtaccaatttacattctcatgctgattttattttacttgcaatggaagccactctagtgcctcaagcaggagagtgaagaaaaatgatatatgtcaatttggctgctctgtgaaaaatggattataaggggatgagaacggatgcaaggagataagttctgaggcttcttcagctgtctcatagagagatgatggtgatctttgctggtgtaatggaagtagagttggagataaatggatagacttagaatatattttgaaagtagaaccgataggattggctgagagggtagatgttgttgggtgaggagaaggaaggaatcaaggagacttctatgtttttggtttgagcaactggatgaagggaggtggcatttcctgagaagaatgaaggaataacatattttggagtgatgacatctagaattaattacagatgaatagttgtaagaaaaaggatagcatgataaatataatatgtctcttgaaatctctgttgatggttctcctttctttaccaggcagtcattagatttttttctgtttttaccgttttaaaaattatttaaatttttttgtcagtacatagtaggtgtatatatttttagggtgcatgggatgttttgataaaggcatgcaatgtgaaataagcatattttggagaatgggatatccatcccctcaagcatttatcccttgggttacaaacaattcaattacattctttattttaaaatatacgattaagttattattgactatagtcaccttattgtactatcaaatagtaggtcttattcttctgattttttttgacccattaaccattgccacctccctccctgagttccccactaccctagtaggtaatcatttgagatggatacttagggttgggcagcgcattatctgactcactcacgacctaagagaggaccttgtaaagggggctgtgctcctgggccttgacctttccagtacagcaagggtgttacatcattcataactaggttaaaataggctgaccacttcttcaatatgttgaaggcccctctgtatccctctgtgtgatttatttcccatgcaagagtaaacactatcctgagtattgtgactttttttagcactttcatgaattcctttttattgttactatatatgacagatccctagacaatatttttttctatatgacatctgatgtatctattttgcaacatactttttttttaaatttaaaatcatctttctgagattcctccttgtggacctatgtagccctaattcatttattagggctgtgtagtgttccattccacatagcaccatttgtttattcattttcctgttgatggacagccaggctgtttctaactttttactgttataagcagtgcttattacaaaactcacttttcaaacatccctcctaacttccaaacttaagctagaagttcacagaagactaatttgagaatgccatatagcaaatatctccttattttcatggattaaatgtgggaaaatgtctaaggaaattcctttgctgaaataagaaatttggtagagaggagtggagaaaagtgggtcactgaaactgccattgttcacagtcatcctaaactaccattaaaacaattcctcaggcaccaaccaaagaggtctctgctgccatctggcctttcaggtttggatatgacaatgaagggtggtctagtctagaaagatcagctcacctgctcaatgaaacaggtaagtcttcctggaattagttccaggttttgagaaactattattgttacttttattttcagcagggtcataagccataacttaatgcaggtattagattaaatttatgaccagcagatgatcataaactcacctcaaaaatgctttactttggcacgcagctgcagggggactgagcttctgtaaccactcctgtctttgtttgagagcaattaattcagttgattctgagcaactcctcatactgagtatctttaggggattcatgttgtgtttttgttcttagggatgcctctgctagtagcttctgtcacctggggacccactgttggggaccagaagacttggatcaaaaggcagaatgggttgtagggaaaagaaagagagatcagactgttactgtgtctatgtagaaaaggaagacataagaaattccattttgatctgtactaagaaaattgttttgccttgagatgctgttaatctgtaactttagccctaatcctgtgctcacagaaacatgtgctgtatggaatcaaggtttaagggatctagggctgtgcaggatgtgccttgttaacaatatgtttacaggcattatgcttggtaaaagtcatcgccattctccattctcgattaaccaggggcacaatgcactgcggaaagccacaggggcctctgcccaagaaagcttgggtattgtccaaggtttccccccactgagactgcctgagatatggcctcatgagaagggaaagacctgactgtcccccagcccggcacccgtaaagggtctgtgctgaggaggattagtaaaagaggaaggcctcttgcagttgagataagaggaaggcctccatctcctgcatgtccctgggaatggaatgtcttggtgtaaaatccaattatacatttgttctattctgagataggagaaaaccgccctgtggctggaggtgagatatgctggcagcaatgctgctcagttactctttgctacactgagatgtttgggtggagagaagcataaatctggcctacttacacatccgggcacagtaacttcccttgaacttatttgtaacacagattcctttgctcacgttttcctgccgaccttctccccactatcaccttgttctcctgctgcattccccttgctgagatagtgaaaatagtaatcaataaatacagagggaactcagtgactggggccagtgcaggtcctctgtatgctgagcaccggtcccctgggcccactgttctttctctatactttgtctctgtgtctcattttttttctcagtctctcatcccacctgacaagaaatacccacaggtgtggaggggctggcccccttcatgggtcagagggaggttgatttgtgaagcaaattgctttcaacaggcctagggccgatttgatttgtttcagtgctccggggtgctcatttttgtgtgaagcatctttgaaatctgagagtgtttttggtttgtagaccaactacgggtgtatggagcaggataagtaaaggactaacctgttctggttattcttaatgataagcgtgcctcctgagacatatgagtgtctatatggatgtaataccactaagacatttttttgccccttagcccttttttagtctgattacaggcttccaaggcacacctggtcaagatctaataaagccaatcaacttagttctgggtcagtactatggagctgtttgtgctggaataaaatgctatggtgcaccattctcttgtttctgaacataaattggatatttgagaaatgcattaagattatttgaaattttgggaatgatgttgagcacatttgaaaatttttatccttcttggtagttcctggaggtgtttcatgttttaattgcattctaaacgtggggaaattcctttagagctcagatttgagccacttctctctagtgactcactaataattactttgtttttgggtttatcagtaaagaaaaaaaggttaagggtcaagagtaaagtgttgctaattgttttttgccttgctgtgattcatcactgtatgctacttttttttttctgaacaggtgcagatttcataacaattttggagagtgatgcttctaagccctatatggggaacaatgacttaaccatgtggctaggggaaaagttgggtttctatacagactttggtccaagcacaaggtatcacacttgggggtgagtataccttgggagttaatcccgaagatagtcatgaaaggctaggctgcataggcttggagtggcaagttgatattgtaatatctttggtgaatgtgccccagtgatgcttcttgggggatgaggaggtgctggagatatgcacattctgtaatttttcaaatggtttttctgtggctggatatttccagttcttcagcattataaaccaatcaatctaggagctgaggttgcagcaccaagcatgtctggcctggatgctgtcctcatggagcttaccttccagtgtaagacagaaaatcaacatgtacacaaaaaaataaataaggtacttcacaatcatgataagcgctgtgtagaaaagaaaccactgagggagaataagtgggtgggcagtggccatggaaatgctactataggtagggtggtcaggaaggtctctgcaaagatatcatggtgagcaggacccaggaccagccttgggaagagctgagggaacagtcagggtgaagactgaggcaggatccatcttggtgtgcctggagcatggggggccaaagagcaactggtaagaaaggaagtcaaggatgggaacctgatcatagagagctccattttatccagttgtgattggaagccactggaggattttaaacaggatagtgatctggaagaacagattctcaggggcaagagtgggagccaggaggcagagatgataggtggaatagcacagatgagagatgacaatgggaacagtggagatggtgagaagaggacaaactcaggaactattttagaatagaaccaacagaacttacaatagtttagatgtcaggggaggggaaggaagaatcaagggtgatgtctaggtttttgacctgagtacccgctaagagatgataccctttaatggaatgggaaccatcaggagacctttaggtttgtgctaagtgtgagataccccaagacagtcaagtcatgcccagtaggcagttgggtatggcctggagggctgagaaggacagaccaggctggagatgtaccttcagctatcatcgtatagagatagacctgtctcagagactccatgaaggtgacagagaatgcgtctagctatggaagagaagcctgccaaggactgagctctgtggcttagagtgaggtggaatgccttttcatatgcctataggacagtttttcatttctaattttgtaagttgttactccatgttctagctggcaagattgtaccttcccatatgtgttgattaatattagaattgtttatgcaaatgtgttgccagagtaactgcaaatacaatgggttttttgtattactaatgctgcccttttcatgtgtccatagcacttattaaaacagagttgatggtgtttccttagtgacacagtgagacatgctatcagatgaaatgatctgacaaatggactgccatataagtctctgccgcattgctttgaatgtcccttggtgggatgtgtgcagtgggacacatccctttttaatgcatttgcttagtcccagtgcatggtagaatgggactgacaatgatgcccatgtctcttttcattccaatacaggattatggctttgtcaagatacccaattgtgaaatctgagcatcaccttcttccgtcaccagagggcgagatcgcaccagccatcacattgaccgttaacatttcgggcaagctggtggattttgtcgtgacacactttgggaaccacgagtgggtttctttggcccacctaatattacacaaatgccaagaaatgttattaacaatgtactttgatttctatgaaatcacctttctcattttcttcttttttacctcccaaagtatttctccctgcgttgctggttttaaaaatcagacagaagcatttaagatgcaggcagccgttagtgctggtgtagggacaggccgtgttagtctgcatttactgagctgtacagtcaattccctgtgcaggggctgtccaaagtgcattactgtgtttgctcttcactctgtgtagggtaagcactcttagagccccgttttgcaggtaaagaaactaggcttagagaggtcagacaacccatccaaccaggagcaagcacacagccagggcataggcagtcccaaacccagggttacaagtgcttgcaaccacacaataaaccagacaacagaaaaagaaatttccttttcctgcaggattactgctacaaatggaagtactgttgggatttgaggttgttaaatgacatctcttctctccctcatgttttcacaaacaacagataggcagaggaatctggaagagggagatcaaaatatcactttgaatactgataagcctatttggacaacctggcttaagtgcccatatggacttgtgaatacatgcctaaatatacacgaaactgactccccctaaatggtgggcctaccctgcttgccctggcaagctctctccttgatggaaagaagaggacggaaaacagcctgtctgcaaactggcagcttccaaggagaatagaaaagaaggatttgagacaagcacgtgaagttaatttcaagattattgaattagaaaagtcctcccaaaaagtaaagaatggggagagaggccagtgatggttttctaaagaagtccctctacacgcaacatgaagagtggggaatgagttttatccccaaagaataacatttacaaccagtgacagtactgaataaatcatgaataatcccagcaatatattgtaaaagcaaacataaaagtatgtaacttatacttgaccatactaaaccacaataatttaaacatgaatataaagagctatgtgctatgacattcacatgcaagctttgcctgcattaatgacatgaggccacagaactttaaagagacatactttaggaaaacaacgttgttgtactataagttttatttaaacaaattggtgtgtgtgccactcttatttccctggttacctcactgtttctaacactattatgtgaatccgtgaaagcatatttgaatattttcttaaaaaactcagatcataaataatataaataaaccatccaaatataattaatatgaaccatttatgaaccagactcttgcttacctccttagaaataagaagagtgtttggaggatggatgatatagatggttcatatctcttaaaaaagctgtttgaagaaatgctttctttttttcccagtgattttcatgtagcaagtacaggcattcagaaatcattcccatgaccttatgttgtacttaacattgggtttatctttaaaaaaaataatactttcatgtttaaaggttgcaagttctcaacctaagaaacagtttaactccttcccttttttcctttgcctttttccccgtctcctttaactctctccaatatatcccaaaatgtaaagaataggtttgaaaaggaagagaaagctaaaagagagccctaggaatatgcttggaaaagaggagggaaggattgccttttctcactttctgttaaccacctacttaaagctctctggataacaccatatcctttacttgctgtcttgctcatttgattcaataataatgacaacaatagcagtaacaataatagtgaacacttattgatgatacataactccaggaatgaaggcagtgtaatttaatgattaagagcatgggattccagaacctggaatcagacaatctggtttgaaatctaattcattaactagctgtgtatcctttgctgagtttcttaactaccttgagctttagttttctcatctgtaaatcagtgcaatagtcctacctatttcatggggttcttgtgcccatattacctcatgcaaagtacatgaatgtagtaagtgctcaattaacactggccattactaaaccaaatcagacaactatgaatataaggtatattgggcagcttaaaaaataatccatttgtcaaacatgaatcaagcatctgacatgtcccaagcacacagctagactcattccttgctttaggaaccactgctctgagccactccccagaagtactgtctgggacactgtagcctcccaacaagcgacataggaaagttaacaccttgaataatttgtgacgtgatcacgacatgttttatttgtctttgttttctacagtactagatacacaaattcttactgtgaataaatatttagagatttcgttttccagtgattatggcatataaatgtgaaaatcctattaggaatgaataatttctaatgcttgtgcatgttattagctgattcaacaagattttaaaaagtactgactgcacaaatatgtcttttacaaccactaaataggaaatagcagcattttttagaagtcactcaggcaaacaccataatgaaaattgatattattttaggtaattaactgagccactaatcaccatttaaagaaatctataacatgcatcatatacaaagaggagagaacacagaatccatagtctgacactatgtgacacagaacctatgttctagatttggttccgtggcggttaaccttggtaagttccagttcttgtgtctctggaaatgggataaaattctcttttccagcttactttatagggttattggaccaacaaaatattaacagataagaaaacataaagcatatgtgagctctctctctttctgtcttgacctctttccttatacatatactttttacttttattactctcactaggtaagatttatctcctgagaaaatgtaaaaccaaattcacagattacttccagttagaatatattggattggaatccaatatattctactaaaatatattggattgaaaacactgcctgtggttagtagctttggaattttctggatctggatttgaatccttgttgtaggtatcagaaggaatagaattccctgcagacctaatgaaagaactacttaacaagatgctggagggacccatggaacaaataagagaggctgaggcactcagacactagttaacagtggggaatcattacctgccttaaggccgaaggaacaggcagagaaaacagtgttcccagagcccagtgagacccagaaccaggacaagggaccacctggcatagaatgcagctactgccagagggactggggaaggaatccctgaatgttgctcttctcccaacgtttaatctcccattgatgcctccgattggccaaacctaactggaaaccagcagagaaggaagtccaggagatgaaatctgcaggggtcagcctctcagggcatagagaaaggacagaggatgaatgtgggctggggaaatgaaaaataaccataggcatattagcctcatttaaaaatagagctaccacctgccttctgttgtgagaattcagtagcaaaggggtttaacaaatggccgtccttttcactcttttatttcttgagacatcttttaatagccctcagctatttttatccaattcagtcctgtcttgagatcctaactcaacaaggtttctccagtcttctcagtgcttggtgatcttctatttttctttgtcattttcccccttaacactcatgtattagctacctttctatgtaaatacctgtgtttgactactgcctatctgttctgggcaccattccttgctcttactctcagctatgcattgcagagaactgcatttcccacagtcccttgccttctggcttctgggtaggtttagccaatgggaggcactagtgcaaggttggagggagtagagaagcgagtgtatttctctccttctctctctgcttcctctggtgtctctgggaggagctgagtctcttctgcggctccagctcttctttgtatggtcccagctcctctgggaagcctcctccattgctacatctcccactagtcggtgctggcttctggactctgataatatcacctcctcttgttttccctgtagctgtagaggtggtactggtttcttattgttattaatctctgattgcctcattgactcctatctggcttcccatcgcctagctaaccaattccctatattaagttcactttgtttgaaacatctagggtgtttctgttttcctggctggatcatgtaaaatatgatgtcctattttcccctaaactccccagaagcttgatgtacccacctaagtatctcagttataggtttacagtgcttagcataataaaagcaccatgttcagctggtgtttgagcaggagagccaaggaggctttcagaaagtgttcagttgggctgggcgcagtggctcacgcctgtaatcccagcactttgggaaacaaggtgggtggattgcttgaggccaggaattcaagaccagcctgcccaacatgcaaaatgctgtctctactaaaaatacaaaaattaagttgggcatggtagtgtgcacctgtcatgccagttactcaggaggctgaggcaggagaattgcatgaatgcgggaggtggaggttccagtgagccgagattgtgccattgcactccagtccgggtgtcagtgtgagactctgtctcaaaaaaaaaaaaaagtgttcagttgaaggagcttaggttacataagcctgatgggctctgtgaatgtcaggattcttcatcttaccagtattcctggctctttttacttttttaaactactaattctttagctgtaatactgatggtgagttatcacgttagtgatttcatttcttctgatgaaaagttgaacaatgctgtatttagagtagatctttaaattgacttgactccaaatgacttgtgaagaaaggtcatgttcttagccaaatgtctgtcagcctattcatttgaagtgctgtatctaggtcttgttcatttgtataatgttaagacagttgcccgagtaggaatgactctgggcttcttcactatatgcagatagtctttggcaacttaggtacctaaggctttttaaagtttgttttacaaatacaataaagggtcatatttttacattttttagagatgacctcgacaggaaactgcaggctattgctgtttcaaaactactgaaaagtagctctaatcaagtgatatttctgggatatatcacttcagcacctggctccagagattatctacagctcactgaacatggcaatgtgaaggtaacataatcttaataggatttctaatttattaagtaaaacatttctttttctttcatgtttttaaaaaaaccaacctcacctaaaaatttcatgtgcagtctatctactgctgcctagaaaatcaccacaaaacatgtgagcttaaaacaacagcaatcatctatttgctcatgaatctccaatgtggacagggctcaatgggggtagctcatctctgttccatgcagggtcaactaggtgtctcaaccaaggactggaggatctacttcataggtgatttataggtcgcaagttgtgctttaggcttgggaccctggttcctcgccatgggctacttaggcttcctccctgcatggtgctggctttcaatagtgaaaatcccaagagaaccagaaaaaatctgttttgctttgtatggcatagccttgtaagtcatatactgttacttccactgtcatcacaattctgatcacattaaattcttgatgggaggaatatcaaaaacacaagataagaatactaatggaaagtgagattttgttgtagccatgtttagaaaacacaatctgccacattatgaaagttaattatggggctgggtgcggtggctcacgcctgtaataacagcactttgggaggctgaggcgggcggatcacgaggtcaggagatcgagaccatcctggttaacatggtgaaaccccgtctctactaaaaatacaaaaaattagccgggcatggtggcaggtgcctgtagtcccagctactcgggaggctgaggcaggagaatggcaggaatctgagacgtagagcttgcagtgagctgagatcgcaccactacactccagcctgggtgacagagcgagactctgtctcaaaaaaatatataaataaattaaataaataaataaataaataataaataaataaaaattaaaaaaagaattgagagtaaaacaaaatgaaatgccacacagagagaatggctaattagccaacagggccccagcagatgacactgaattactctaccttttcaggtctgaaacacttgaatttgtcagtgtaccagaatataatcatgttctggggaactgccacacaaatcaaattctcaggagactgatatatatatatatatatatatatatactgatgtatatatatactgatatatatatactgatgtatatatatactgatatatatatacacactgatatatatatatactgatatatatatacacttatatatatatatatatactataatgccaaatgaattaatttagaatgagaaatatgattgttatgtttagttatgccctatgcagatgtcttggtccctttcattccattttcaacttcatgtcttgagataatatctgcagagaaaaaatcttatccgtcttatgttgattttactactttaactcttcttagggtgtaacattatttacagagtttggatgacaggttaaagagcatggcatgatgagaattttctgcatgtgacagaaaataacagagagtgtatttctttttttttctgatttttttaaaattttattattattatactttaagttttagggtacatgtgcacaatgtgcaggtttgttacatatgtatacatgtgccatgttggtatgctgcacccattaactcgtcatttaacattaggtatatctcctaatgctatccctcccccgtccccacaccccacaacagtctccagagtgtgatgttccccttcctgtgtccatgtgttctcattgttcagttcccaccaatgagtgagaacatgcggtgtttggttttttctccttgcgatagtttgctgagaatgatggtttccagtttcatccatgtccctacaaaggacatgaattcatcattttttatggctgcatagtattccatggtgtatatgtgccacattttcttaatccagtctatcattgttggacatttgggttggttccaagtctttgctattgtgaatagtgccgcaataaacatacgtgtgcatgtgtcttaatagcagcatgatttataatcctttgggtatatacccagtaatggggtggctgggtcaaatggtatttctagttctagattcctgaggaatcgccacactgacttccacaatggttgaactagtttacagtcccaccaacagtgtaaaagtgttcctatttctccacatcctctccagcacctgtcgtttcctgactttttaatgatagccattctaactggtgtgagatggtatctcattgtggttttgatttgcatttctctgatggccagtgatgagcattttttcatgtgtcttttggctgcataaatgtcttcttttgagaagtgtctgttcatatccttggcccactttttgatggggttgtttgtttttttcttgtaaatttgtttgagttcattgtagattctggatattagccctttgtcagatgagtaggttttgaaaattttctcccattctgtaggttgcctgttcactctgatggtagtttcctttgctgtgcagaagctctttagtttaattagatcccatttgtcaattttggcttttgttgccattgcttttggtgttttagacatgaagtccttgcccatgcctatgtcctgaatggtattgcctaggttttcttctagggtttttatggttttaggtctaacattgaagtctttaatccatcttgaattaatttttgtataagatgtaaggaagggatccagtttcagctttctgcatatggttagccagttttcccagcaccatttattaaacagggaatcctttccccatggcttgtttttgtcaggtttgtcaaagatcagatagttgtaaatatgtggcattatttctgagggctctgttctcttccattgatctatatctctgttttggtaccagtaccatgctgttttggttactgtagccttgtagtatagtttgaagtcaggtagcatgatgcttccagctttgttcttttggcttaggattgacttggcaatgcgggctcttttttggttccatatgaactttaaagtagttttttccaattctgtgaagaaagtcattggtagcctgatggggatgacattgaatgtataaattaccttgggcagtgtggccattttcacgatattgattcttcctacccatgagcatggaatgttcttccatttgtttgtatcctcttttatttccttgagcagtggtttgtagttctccttgaagaggtccttcacatcccttgtaagttggattcctaagtattttattctctttgaagcaattgtgaatgggagttcactcatgatttggctctctgtttgtctattattggtgtataagaatgcttgtggtttttgtacattgattttgtatcctgagactttgctgaagttgctcatccgcttaaggagatgtatttctttatgtaaaagtgtgggcaggtgaatcagcactggaatggcactgtgtggtgtttggaatctgtgttctaccttgtggttccatttgacaaggactctgttcccaaaccagcagcctttaagttctagttagcaggatagaggaagggataaagaaggggccaagagcatatgccagttcctctgaaggcaagtcccagaaactgatctgtaacacttctacttatatttcactggcagaaatttagtctaatggccatactttgctgtacagaaagttgagaggtgcaatgtttagtcctgatggccatattcacagctaaaataccataattttggaagaagggtaaggcagatattaggaagatgagttagtctctgcattttttggatagacagaaattagagtgttaaaacaacagccgtcatctatttgctcatgaatctggacttcagacagggctcaatggggatagttcatgtctgctccatgcaggatcagctaggaggctcaactagggactggaggacctactcagtagatgagtcacaggtggcaaattggtgctttgggctgtggacccgggttcctcaccatgggctacttgggcctcctctctgccttgcagctgatttccaatagtgagtatcccaagagaacaagaaaaagcctgtattgccttgtataacttagccttggagccacagatggatccctgatttctgggtctggtcagagggattatgatactgacatttatttttatagagaatacaaaagaaagaaatgttttacaaggaagatgagttcagctttgggctgagtttgaggcatttgtgggacattaatggagatgtccaataggcaggtgcatatacagatctggaatccagaagggcagtgagaactagagttatagattaaggagtggccaccatgtagggaagcgttgaagccatggaagtgagtggtattgctagtaattagagaagtgcaaattagagtgctagagttagagaagtgcagaaggaagaccaaataaagccctgatgaagtcacattgaatgtggctatcatgggggtgtaggtgaaggaagagaagacagattatttcaggaaagggagtaaggagatttcagaagaggaaaacctggaaagtgtgtaatcacagagactgtatcagttatttatcactgtgtaacaaaccacctcaaaacgtagtggcttaaaacagtaataattgaatattctcatgattctttgggttgactgggtggatttctgttcttgcctgggttctcctatgcagtcatctgatggcttacttatggcaggagggtctaagatagccccacacaggcgtctgggccctggtgctggacctctctctcttctcatggtctgtcattatttactagcctagatgatgctgcatttaccagctgtgtgaccttggggaaagttacttagcctttctgggcctcaagttccacatctgcaaagtggtgagagtgatatctatggaatcatagggttgtttgatgatgaaatagaagataacatctgcaaagccctcagacttacatgacatatattatgtgtgtctggctgtatgttgaaaatcaaataagagaaacgcgtaagtacatggtctatgaagcacaaacgaatattagacaagatgaaatttggcaagtctatgtaaaaatggcatcctaatagggcattcttatatggtgtgtgtgcatgtgcacgtgagtgtgtgtgagggatgtacatggtattaaggaaggagaatttgatttgattttcatctaatcctctcttggtttccactgtcgtgatcaaaagctgtgtcaaaattggtagtggattcttatattgctttctctaggaggaagtttattaatgtggagaagagttttaatcatcaatgcttggatgaacagatttttctcttaaagaaatgagtatttaaattctgcagtcttaaaactttatagcatctttatttttaaaatttttttgcaagtcttacagcatctttaaaaaatctgataaacaaaatgatagttaaatagatttatttatcatttatttatctatttaattattcccaatactaaagttttctattttcccaagacaaaccggaacagtgcttctttatttccttcatcaacattttaaatttaatttaaaacatttattataatttttatgtatacaaaaggtatatgtatgtgtgtattataaacaacaataaagattaatagacatccatgtgtctaccactaagcttaagaaaaaaatgaagaattatataataaattgtgatgtattcttttagtgatctaaaaatgtgtttttaattaaatgttaatagtaaaattcagaagtggtgaaaagtcaggtatattttttatttataagatatttaaacagaataaaatggagatttctttcttcagaataaacacctcatatttatagttttcccaacacatgatagaaaagaatatgtttctgttctctttctttgatgaataataaccctggtcccaagccctcaacatcaaaaagactcatgattgctccccagatgttcttatttccatgattcaatttaagaaacacagatggaacacctgctcaatgccaggttttatgctaagtgacaggttggacaaaagtgattaagattccctctgtgcaggtgtgggaggatggagacatagaaacagatacctggcacgatggcataactagtgtgtgtaaagtactgtacaggatgaccaatgaaggtgcagtcagtgctgctggggatgagagacttggaaagctgccaggagtcaggggctattttgtaatcgttgatttatctgagtcactctccagacctccttcctctttgttttcttagcatgtggtacagaagctagataggcgcacagtaggtgctcaataaatatatgtagaatgagcaaataatttggaccaaaaaagatcagtaggagccaggaagagaaaacagcatgtacaaagagatatttatcatgtagctcacacattttttggcaatgtggaatagagctttgctttttatgctttaaacattctcctctctgctctttattaggatatcgacagcactgatcatgacagatggtgtgaatacattatgtatcgagggctgatcaggtgagcacaggggtttgattttgtttttaatctattattaatgtgatcttttgggtctgtctgagaaggaaaaagaactttatggaagcaattaatttttgttgctttttataaaaagcaatcaatgtttataaacattgatttgactatacagtttaacatctttttcaaggcatagtctcataatttacaaaagtagaaatagctaagcaaattaagtttaattatataagagggtactgtgtaggctattaggcatggtgaatatgtagctgtcaacacatgggaggaatggcaccatttttgaatgtatgggttagtggaaacatcacaggccattggatgagaaagtcctgggcttgagttccagccttgccagcttctaatcaataatcctgggtaagttaactaatttgatggggccattactatactgtagtgagctctataggtaaattgtatttaaaaaatatcattccacataaaaatattacccgagtatatcacatacatgcgtatgtgtgtgtatgatatacttggataatacatatttggatacatagagtcatgtgctgcttaatgatatttttgttcaataacagaccacatctacaatggtagttgataagattataatatcatacttttattgtaccttttctatgtttagatacacaaatacttaccatggtgttacagttgtctacaatattcagtacagttacatgcagtacaggtttgtagcctaggagcaataggccataccatatagcttaggtgtgtagtaggctataccatccaggcttgtgtaagtatgcactatgatgtccacacaatgacaaaatcgccttatgacacatttctttcttttttttaaatatatttttattttttaaatcgacacataataattgtacacatttattgggggggtacaatgtggtattccaatacttgtatgtatactgatcaaatcattataatttgcatatcaattaccttaaacatttatcatttctttgttgtaagaatattcaaaatcctcttttctatttgaaatatatagtacattgttgtaacctactgtgaatagaatataagaacttattcctcctaactgtaacattgtacccattgactaacatctccccatctctcccttctccctgttctcccccattgctggtaaccactattctactctcaacttcttttttatttgtttatttatttatttattattattatactgtaagttttagggtacatgtgcacaatctacatttcttagaatgcattcttgttgttaagtgacacatgactgtatacatacatatgtgatccaaaataatacagctgagattttaaaattcaaatatgtagctgtataaatcagttttgaaggcagtatttgtatcaataaagcaaggaacagtttaatgccaaaaaagagggactaaccattcattcattcattcattcattcattcatttatccaataagtgtttactaaatcctctttatgtactgggtgttgttctcgggagtgggaatataataggaaaaaaacaaaatccttgactgtggtagaacttacatcgcagtggaaggaaacataaaataagcagataagaaatgacaagctatgacaggtggagatatgcatgatgaaagaaaaataataaatccaggtgagaaggcagggtgtgtgggggtggctgtggtaggttataaaaagtgggtgaggaatgatggagtgaaatcttggcagcacctcaagtggaaggagggaccccacctgtgcataccctgaggaagagcacttcaggcaggggaggcggggaaagtttgagaggaggatgctggatgttgcggggtaagagcaaggaggccagtgtcgctggagtagagtgagagaagtgatgtgagtatggcaggtggtggtagatgatgtacacagtgagttgattcacaggttcctctacatacaaagttcttccacagagggaacatgctggagaccttccctgaaacactcaagggttctcctgttaggacagaatctgtctggaggtatttgacctgagccctctaactgccatcttggggacaatgtggggagccctggtgtgggctcctaggactgacttccctgagccttagtcttttctccatatagagcagttcatcaccaaaaggcatcttggcattgcctgcctgaagataggggccgacgttaatggatctctttaagtaaccttatcttctaagatctgtggcctacatttatgagagaaaatggttgctttctgggatgatatagaatcatggattcaactcctctcccagtggggatatggcttgtttggttatgaattatagtccagtgaaagcaaattgttagtttctcttgctctagactccatttgccattcaacaagtatcgatctagcagaatggatgccaggcaatagggataaagctgtaaacaaaacagagaaggatctctatgctggtggagggaggatggacaaaaatcatgataaataattgcaggatgatctattttagaagatgatgagagtggtgggaaaaactaagcaggggaaggagcttccagaatatggaggtggggtgcaattgtaagtagggagctgggtaggtcttactaagaagatgacatttcagccaagattggaaggagggagccatttggccacctggcagaagatacctcctggtagagggctgagctagtgcaaaagccccagtgcaggagtgctgcatatgtttgaggaaaagtgaggttagtggggctggagagggttggggtggagtggggtgaggggcggccgaggagggaaggagagagtgtgtgggcaggcagggaagagaacagatcttgtaaggatctagggatccttagcaagcactttggacattattaagtaaaatagtgaccttactcgttcttggacaactccatggagccatatgcttactgaggtgggccaaggaggcccttgagatgctaagattgttttggtttacaccactaactcagaaactctaaaaggagcatcacatgcccaaatagctgtggaacagatagcttgactataatttggtgtttccaaagtgttacggtaggagagaaggtgctgaagggtgagttttgttaagtattttatatctaagattgaaaacactgtttctgtttaaatatttgttaaagcaattgtttaaatgagatatcggaaattctagaaaacgacttttcatataggctgaaataggtttaatttcaagttttaaaaaatgttgggaaccaaggaacagtggtatttatagtaactggtacccataatagctcattgttgggctctgaaacctttattacctctccttaggagaatgggatggcagagtttatatatatatacacactctgtgtgtgtatatatatatacactctgtgtgtatcactctgtgtgtatatatatatacactctgtatatatatacacacacatacatgtacatataaagtatatatataaaatatgatatcatatatatatttatttatgtatgaatttaatactctgtgacataacaaaataccatagacttggtggtctaaacaacagaaattaattttcttgcagttctgtagattctaagaccaagattaaggtaccagcagggttggtgtctggttaggactgtccccttgggttgccgataactgccttcttgccatgtgcccacatggcctttccttgggttgtgcctgcagagagagagtgagctctctggtgtctcttcttataaagccattaatcctttaggatcaggccccccctgcacttatgacctcatttaaccttaattatttccttagaagatatgtctccaaatatggccacactgggggttagagcttcaacaaatgaattttggggggaacacaaaataggaaggtaattttaaaaattcccacattaatgaagttaggaactagggtttttcagtttctgtccacaaaactaattttgtaagccttcatctcaatcaccaaattcaatgccctacatgtagtaggtattaggtgcttaataaatacttattggacaacaatgggagatcctctgttttaatggaagatttggattgtcagattcttcagtttcaaggcttttggtgtatttttgaaggcagtgtctgttaaatgggtcagaactttgatcttagagatttgggaataaataacctagatttgctaaagacagtgacctagaattacacagaagtgcacagatttaggacttgagcccagacaatgcattaagctgtctgacagctcagagtcacatctgatgttcagtcacagctctacttacctttcccaatgggcagacttgctgcttctgctggtcctgctctgggtttctgtttctattttgcatggagttacaggcataggctttgttttaagtttttctcttctcctgccactcaggtccaagcccccatcatcttttacctaagttattgcagtggcctcataacttgtctccctgctttgaccctttccctgaaggtgattctctacctggtagctgtcacagacctctgcttcaaacccctctgatggattcttatctcactctaaaaaaaaaaacagcaacaacaacaacaacagcaacaacaacaacaaactgaggtcttcatagtggcctgtgaggaaggctttgcatgttccctcttatgcacttcactccggtcatggtggagttggcccgcaaaacaccaagcatatttccacctcaggacctttgcatttgtggttccccttccctaaacaccattcctccagtatctgtatggcttgatccctcccttcgttgaattttttgctatagtgtcactttattgcagaggtatgccctgaccatccaccataatatagcaacctctcctactcatcactgcctgtccttcttacactgcattcaccccagtgcttacttatctatcactacctgacttattgtaaacatacatatgtgtttaatgcatccttccctactagaatgaaagttccatgagggcaaggacttcattttattcacgacttattccccaacacccagaacagtgcctgcatgtagtaggcactccatatatatacatatgtgcttcattgaataaatgaatgactgaagctgacctaagtctttttttctggaagagcacaatgtaataaaataaaatgaattctttgttgttcatggttccccgtgttttccacgagcttctcaaataagaactctttgcataatgtctacaaagtgcattgaatttccccaggaattgaaagctctaagccaaaacgggatatggaattttttcagatatataaaatctttgatttcagacttgaaagtaggctgaaaatatgcatgtggcatttggatttttaaaggtaagaaagaaggtgaacacccctgtcattctgaagagttcctgttattaactcaaaacatgattgtgtgggaggcaatttgtatggctagaatattcattagtataaaaaaagtaaagtaaggttgctaagaatagttacttaattaaatctatgtacatattctttattcatttatatcataaaagcaatattttgccaatatttagattaacaatttaagttaattccagttgtgatatacagagtagagttagaagtgggaaactggtttaataacaaaggggtatcacttggatctcgttagatttctatacaataataaaactgttacaaaccatttctgtttctgctacaggttgggttatgcaagaatctcccatgctgaactgagtgattcagaaattcagatggcaaaatttaggatccctgatgaccccactaattatagagacaaccagaaagtggtcatagaccacagagaagtttctgagaaaattcattttaatcccaggtgagttcctttatgctgtagttccagttatgagctactgcatccctctatggaacctacatattacctcaaaatgagctagaaattatattttgtcctagaggtttattccaggtaagggagactgtgacaaagatgataaaatctggtttgggttgaagttacggtgcttgctttctggaatcaagaaatatgttgtaacctcaggttaaaaaagttcacagcatcatcatcatcattatcatcatgaacatcatcaccatcatcatcactgtcacctccacgatagctagtatttgaatgctcctatgtcccagaccctgttataggtgctttttgtgttgtctcaattaatccttattggttggtcctcttattatccccttttaatagatgaggaagctcaagcttaagaacatgaagtaacttcactggggtcacatggctagtgagtgatggaactaataagtggggagacagcctattagcatcgttgggttgctggtattctcagctctggctgcacattagattcacctggacagcttttaaaaaataccactgcctgggccccaccccagaccaatttatcaggacctcctggggtggtatctgggctgtggaatttaaaaaattatttccaggttattctaatgtgcagttaggattgagactgtggatgatggataattcatttacatcacatgtgaaaaattcattaccatgtgaaatacaatttttttttgagatggagtcttgctctgtcacccaggctggagtgcagtggcatgatctcagctcactgcaacctctgcctcctgggttaaagcaattctcctgtctcagcctcctgagtagctgggactacaggtgcacgccctgatgcctggctaatttttgtatttttagtaaagacagggtttcactatattggtcaggctggtctcgaaagcctgacctcaggtgacccacctgcctctgcctcccaaagggctgggattacaggtgtgagccaccgtgcccggccttgttttgtttttaaaagagaaatctatttgcagcaaaacatatgagttggagtatgtgctcttttctctcccatgactggataatgagaggaaacttctacataaagccaaagacagaacatatcgtatacattattattatttgacatttctaccgcttttaccagctaataaacatttctcatttttttgggggaaaaaagaaatttctccattctctttttcttctttgtccctccttacaacaagaaaaaattgtaccaaagtgtaggtgatgaatatgaggagagttatcaccaagtctagatttgttccaattcctgtattgatcttgccctgtgtaagtgtaatgtgactaggaaaccgcgggccttagggtcatctgtctggttcaaatcctcactcttgccagtgaacagcttggtaactgtgggccagttgcttaacctctctgagcctcaagtgcctcatctaaaaatgggaaaaatagtagtggctacttcctaaggctatgtgaggtatgaatggcacaaaaagtttttagaatagtgcatagtgagtgcttattgtttaacagtagctgcaatagcaacattagtatttgcagtagtaatggtagaagtaaaatagaaggattccctccttttgctgattgagatggtttcttaaatggaagctaaaaaatcagagaagaaaaggattttcttgtgtcgttattcttcacatagcaggagtgcggagaaatccaaataaaatatttttggctaaccacaactgcagattgatccaaaccaactgtgaagggagctagatttgctttcccactcagtttaattacgaaaatagtaaaggcataaatagaaggcatgccttaattttaaaactgtgatgagaatatttaagcaattttcaaatatacaagtaatattaatcacaccttagcaattttcacatatacaatacattattattaactatagtcacaatgctttacaatagatctccagaaatttttcatcctgtctaattgaaactttgtatcatttcaccaacatcttctcaaccctcatctcccccagcccctgccaaccaccattctactctttgcttccatgagttcaattttttcagattctacatataaatgagataatgaagtatttacctttctgtgcctggattacttcacttagcatgatgtcctctaggttcatccatgttgttgcaaatgacaagatttcctcttttcaggctgaatactattccatacatatgtatgtttgtgtatagctgcattttctttatccattcatctgtcaatgggcacttaggttaattatatttcttggctatagtgaaaaatgctgcagtgaatgtaggagtacagatatttcttcaacattaatttctttcctttggatgtataccaagaagtgggattgctggatcatatggtagttctatttttaatttttaaaggaactttggtaatgttttccataatatggctatactaatttacattcccacaacagtgaacaagggttccttttgctgtacatctcctgccagcatttgctgtcttttgcctttttggtactagccattttaacaggtgtgaggtaatgtctcattgcgcttttaatttgtatttctttgattagtgatgagcatttcttcacatactagctggccacttggatgtcttcttttgagaaatatttttcatgtcctttgctcatttaaaaaaatcagtttgctttcttgctattaagttttttgagttccctatatgttttggatattagccgtttatcatatataggttgaacatctcaagtaaaaaaatccaaaatctgaaatgctccaaaattcaaaactttttgagcactgacacagtgctctaaggaaatgcttggggcatttcagattttgtacttttggatttgggatgctcaaacagtaagtataatgcaaatattccaaaaatgaatccaaaatctgaaatacttctggtcccagtgattttggataaagaatactcaacctatatagtttgtaaatatattctctcatcccataggttgtctcttcagtctgttgattgttttctttgctatatagaagcttgttagttcgatagaatcccatttgtctatttttgctattgtttcctgtgctttagggatcatatttaaaaaatcattgcccagaccaatgttgaaggtttttcttgatgttttcttctagtagtttcacagtttcaagcccaaaaatctttaatctattttgagttgatttttgtatatggtatgaggtaagagtccaatttcagtcttctgcatgtggatacccagttcccccaacattgcttattgaaaaggttgtcctttccccattgtgtgtttggggtacctttgtcaaagatcaattgactgtaaatgtgtggatttatttctaggctctctattctgttctattgatctatatatctgtttttatgccagtaccatactgttttaattactacaggtttgtagtgtattttggaatctggtagcgtgatgcctccagctttgttctttttgctcgtgattgcttaggctgcttgaggtgttttgtggtcttatacaaattttagggttgatttttctattcctgtgaaaaatgtcattggaattttgataaggattacattgaatctgcagattgcttttggtagtatgaatattttaacaatattgattattccaattcatgaacaccagatgtgtttccattaatttgtggtcttcaatttctttcatcattattttgtggttttcagtgtacaggtgtttcacctccttggttaaatttattcctaagtattttttgatgctattgtaaatgggattgttttcttgatttctttttcagatagttcattggtagtacatagaaatgctactgatttttgtatgccgcttttgtatcctgcaaatttactgaatttattaattctaacagtttttcagtttttttcagtggagtttttagggatatatatatatatataatcatgtcacctgcaaatagggacaatttaactttttcctttccaatttagatgtattttattccttttacttgcttaattgctctagctaggactttcagtactgtgttgaatagaagtgctgagagtgggcatccttctcttgatcctgatcccagagaaaaagctttcaacttttaatcactgagtatgatgttagctgtgggttgtcatatatggcctttgttatgatgaggtctatttctgctatgcctaatttgttgagagtttttatcatgaaaagatgttgaatttttcagatgctttttctgcatctattgagatgatcatatgatttttgtcttttaccctgttaatacattgtatcatatttattgatttgcatatatttaactatccttgcatcccaaggaaaaatcccccttgatcagggtgtatgatccttttaaggtactgttgaattcagtttgcaggtattttgttaaggattttctacatgtgtgttcattagggatattggcttatcattttcttgtagcatccttgtctggctttggtatcaggctaataatggcctcataaactgaatttgcaggtgttccctcctcttcaattatgaaagagtttgagaaggatgggcattaatttttctttcatttttttttttttttgagatagagtctcactcttgtcacccatgctggaatgcaatggcacgatctcagcttactgcaacttccacctcccaggttgaagcaattctcctgcctcagcctcctgagtagctgcgattataggcgcctaccaccacacccagctaatttttgtacttttggtagagatagggtttcgccatgttggccaggctggtctttggtcttgaactcctgacctcaggtgatctgcctgccttggcctcccaaggtgctgggattacaggcatgagccactatggtcaatctaatttttctttttttcttttttttttttttattatactctaagttttagggtacatgtgcacattgtgcaggttagttacatatgtatacatgtgccatgctggtgcgctgcacccactactgtgtcatctagcattaggtatatctcccaatgctatccctcccccctcccccgaccccaccacagtccccagagtgtgatattccccttcctgtgtccatgtgatctcattgttcaattcccacctatgagtgagaatatgcggtgtttggttttttgttcttgcgatagtttactgagaatgatggtttccaatttcatccatgtccctacaaaggatatgaactcatcatttttctttagatgttttgtagaattcaccagtgaggcaattgggtctgggctttttgcttctgaggaggattttgattaccagttcaattttcttatgcattattgaactgttcagattttgaatttcttcatgagtcagtcttggtagattgttactatgaactggtccatttctttcttttaggctatccaattttttggcatattattgctcatagtagtcacttatgattatttgtgtttctgtggtatcagttgtaacatctccacactgatttataattttattaatttgattttctctttttttcttagtaagtctagctaacactttatccattttatcttttcaaaaaaccaactcttagtttcatatttttttttatttttctatcatctatttcattatttttttctctaatatttattatttacttccttttgttgacttcaggctttgttctttttctactcccacaggtataaagttaggttgtttgatgtctttattttttcttaaggtaggtgtttattgctacaaaattcccttttaaaaccgtgtttgctacatcctgtaagttttggtacattgtgtttccatttttatttgtctcaacataatttaaatctttccttttgatttcttctttgatccattgtctgtttaggaaagttttgtttaatttctacatatttgtgaattttccaattttcctcttattaatttataatttaactattgttgttggaaaggctactcaaaatgatttcagtattcttgaatttgttaaggcttgttttgtggcctaacataagatttgtcctggagaatgttccatgaacatgtgaacccccaaaatctgagacagttctcagtcaatttaggaagtttattttgccaaagttaaggatgcacacctgtgacacagcctcaggaggtcctgacgacatgtgcctaaggtggtcagagtacagcttggttttatatattttagggagacatgagacatcaatcaacatacataagatgaacattggttcagtccgggaaggcaggacaactggaagcaaaggcaggacatctcgaagcagaaaggaggctttcagttcatatgtaagagacaaatggttgcattcttttgagtttctgattagcctctctgaaagaggcagtaaatatgcatttatctcagtgagcagagggatgacttcaaatagaatgggaggcaggtttgccctaagcggttcccagcttgacttttccctctagcttagtgattttggggtcccaagatttattttcctttcatttgcacttgaaaagaatgtatactctgcggctgttgggtgaaatgctctctatgtatgttaggtcgatttggtctatagtgttgttcaagtctactgtttccttgttgattttctatttgaatgatttatccattgttggaagtgggttattggagtcccctactactattgtattgctgtctagttctcccttcagttctgttaatattttcttcatatatttaggtgctctgatggtgggtgcacatatatttataattattatattatattgatgaattgagcactttagtataatgaccttctttgtctcttctgacagtttttgacttaaagtctactttgtctaagtagagccatcccacatctcttttggttatcatttgcatggaatatctttccaaaccttcgctttcagtctatgtatatcctcaaagctaaagtgagttttttttataggcagcaatttcttataacttatttttttcactctgtcttttgattagagaatttaatccatttacatttaaagtaattactgatagttaaggacttagtattgccatttaaagaattgttttctgactgttttacagttccttcattctattcttcctcttttcccttatgatttgatgagttttttggtaacagtatgctttgattgctttctctttatcatctgtgtatctactataggttttttatttgtagatactatgagtcttacataaaacataactatttattttaagctgaaaacaactttgtctgctgcatataaaaactgagatttagcttttcctcccactacattttatgttattgatgtcacaattcatgtattttatatatcatgtacccattaacaaatttttgtagatatagttattttaatatttatcttttaacttttacactggagttaaaaatgatgctgcatcagcattaaagtattaatgttttctgaatttgattctattattacctttacaataagttttatactttcatatgtgttcacatttttaatgtcctttcatttcaacttgaaaaactcccattagcatttctcataaagtgcatctaatgatgatgaactcctgcagcttttgtctctttgggaaagtccttacctttccttgtccctgaaggacagccttgctacatagtattcttggtaggcagttgctttcttttagcactttgaatacatcatctcaatttcttttggcctgcaaggtttctactgagaaacacactgatagtcttataggtgttcccttgaatgttttttctctttgcttttctcttgttgcctgcaaaattttctttttgtctttgatttttgaaaatttgattataatgtgtcttggtagcactctctttatatttaatatatttgggagttatttgggcttcatggatctgcatgtgaatcttcctctccaaatttggaaagttcagctgctttttttaaaataagctttctctccctttttccttctttctctgcttcttctgaaacaccaataaggtttacttaatgatgacctataatttctgtaggctatctccactttttcattcttttttctatgactctggttgggtaattttgaatgaccagactttgagctctctgattgttctccttgattgagtctgctgttgaatctctttattgaatttttcagtttagttatgatgttccttagctctagaatttctgtttggttcttttttgtgatttctatctctttattgaacttttcattctgtttatgtactcttttttcttattttgtttagttgtccatctgtgttctcttgtagctcacttagcttcaagatgattattttgaatttttcattatgctgtttttcattagcatcagttacttgtgctttatttgttcctttggtagtatcatgtttccttgattatttatgatctttatggacatgccctggtatctgtacatttgaaaaagtgggcatctcttctagtctttacagattggcttggcagggaatgcctttaccagttggctggtccaaagattctcagtgggctatctagctgggctcatgggtggacttatgctagagttcttgggccaacttgcttggtgcctggatcagcaagtggataggctttgtgcctgggtctctgggggccagcctggtgctggggtccattgggatgggcctggagcctgtgtcaatagggactggacttgaagtctgggtccatgagagccaacctgattcctggggtagatgtgtggggttaggccttcagcctgagtctgcaggagccaccctggtgctggaatgaacctggtgcctggatccattgggatagatctggaacctgggcccatggagcctaggcctcctatgttaaactcagtgctggggtctcctccataggtgtcctatgggcctgtactctggaattggtggagcaggcctagattctgttacctgggctgcagggactggtctggagctcgggtgggttaaagcctgggttcacagggccagtctagaacctggaactggcaatgctgtcctggtgcctggggttataaggggtggcctggagctggttgcataggggccagcctagcaccaggttgggcttggagcctgggtctgtgggtattgctctggaggccaggtccatgggcactggagtcagggaccacagggctggcctggagctggggtaggcataaaggctgggtccatgtgttctggcctggaatctggggcttttgggggtggcccgaaactgatgccagtctggagccttgggtggggatggagcctgaatttgctagggccggcttagggactggggttgttggggctggcctggtgtttaggtgggcctggaagcttggtctgtgggtgccagcctggtgccaatgttcattggcctggacctggtgctggagtctgtggcaaagttgggtgcttacttcactcattttaccctatgcagagagtatctatctctctacttactatgctacctagtcttgggggaggagtgatagaagtaatgtgaagttgtccttcttacccttctcaatgagacttttcttatttctctaatacattcaaatgctataatctctcatctgaaatctttagctcttgtgaagatatttttgtgcatggatagttgttcaaatggatgtttctacagggacaagcactggaaagtcctattttgccatcttgctgacacaactcttatatatatctatacatcacacaattatccttcttttgtaaatgtatgacacatatatgtatgtgcgtatatctgtgtgtatatgtgtgtttttgttctatttgctaatctgattctttcatccaaatagtatattatgaacttcattccataataaagtattcttcttaaaatatgttttaatcattgcataatatttcattgtatggatgcaccaacatttagctaatcgattttgttatttttgcatatttattattttattattataaaaagtcttctaaggaattcttatctgtttgagcataaccttgattacttccttagggtctagctctagaagtgaaatagcagaatcaaaggtgatgttaaatttgatattccttgttattattcttttaagatgacaaaggaagcaggtctcctgtctcttacattatagaggttagatattatggttgcttatgaagaaaaggaaggaagtggcctcttatgtgcaagtcttagctttcttcctagtgtcttttgtattctatcatatcaaccagagctgtataattaaatagttattcatgtgcaaagagttaatctgcagcacattaacacatgtagacaatttagaagttctgccaaaatagatttttatatgcataaatgtaacatgaatagcatttcaggcttaatggcccctttgcctataagagaatattattcaaactcaagatgaaagagaaaatctggacttatttttcagcaatgctagccaataattcttaaacagatgtgcttttggaattatccataaccatggaaagaggactttgggggttaaaattttagtttgcctttcctatatgcatgaatcttttttatttattcatttgctattttattttatgattgaaattttacataagaacatacctttctgaatggtttttacatgccaataactttttatttattttttatttttttagatttggatcctacaaagaaggacacaattatgaaaacaaccatcattttcatatgaatactcccaaatactttttatgaaacatttaaaacaagaagttattggctgggaaaatctaagaaaaaaagtatgtaagataaaaagaagagattaatgaaagtgggaaaatacacatgaagaacctcaacttaaaaaacacatggtatctatgcagtgggaaattacctccatttgtaaactatgttgcttaataaaaacatttctctaaatt

SEQ ID NO: 671 - DNA, 55701 bp, Homo sapiens
actacaaaagtagcgcgggcctgagaactccttccagaagttctccagggcttccgcagagcgactttttcgctgcctgtgagctgcagcgcgggagagctcgggctcgcgcggaccccagcgcctggcaggctgacagcgctctctcgccccaggtgcccgcgcgcgtggtgagcagctgcaccaggtggcgtccggggtggggtcaatgaagcgcagcctgaggaagatgtggcgccctggagaaaagaaggagccccagggcgttgtctatgaggatgtgccggacgacacggaggatttcaaggaatcgcttaaggtactctgggggctcgcgggtctggaggggttccgacgtgcgggcgggggtcggctggaggtttccttgggggcagcccttggtttggagaaagcgtgggggttgcaagctttggggtgtgtgcacaatccaagaggtgaccctactaatgacgcgcccacacagcgcctgctttatctattttgtttgcttgtttgtccaaccgaattcttgctcctggacgggcaactgcagtccagggaaacctactcaaaaagtatctgtatcatctggcacaagatcgggcagctgcctaaaatcaggacaatttggaatgtgtgccgtttcacttggacctttccgtagattttgtttagaaccaaatagccgaatgactgtatctggtagtcgttggataactatttaagagttctgggggttgagaagccttctggtctaacagagtgaaacagataaaccaattgtctgcacttagagcgttgcagaaaatgtccccaataaaacggaggcaggagtggcaaattccttctccaggggtaggagcttcaggaaacgctgtgggggaggtgaccttttgaagatgggtgagtgacctgaggctctaggatgggcacttctattacttatgcagttatcggacctaaaggcagcactagctactacctgatggcttagtctaagggatagaggctgttgggtgctcagagcccaccactggatttcatcagattgtcagcaggagaaaggggctcttttaaaatgttgagacatcattaaaaaggtctctccaaaccctcatcacaaatctctttcgacagagggaccatgttaacagtttcttaagaattttccaggttaaaaaaaatgcttacacaaaaacacacatgctaatagatcttgttttatttgcaaagttaagaactcacagatttccactctgatttactcacaaaatgtatttttgaatacatttcaaattggcacttgtagatttacctcactctttttaccagcttcataatattccactgtatgactagatcatgatttatttaaccagtgttgcactgatggacacttaagctgttttgtgtttgttttgttttgctgttacacatgtgacagagtatgtctgtgagtttagatgtagcttctctgtctgtctgtcccttggtacctttatggatatgtctgtatgtcaaagtcctagcagggtcaagaggtatgtacagctttaattttggtagaaattgacaaattgctctctaagcaggttgcaggaattggcactattgccaattgtgtgtgtgagtcaggcatgtatagttaatcacacacaccaagtagccaggcctcccaaggtgagtctgttgacatgtccggtttggccacagacattttttgtccttcttaatgttagcatgataactgtggtcttttggcttactccagagaactgagtcataaatagatttcaaccactggaatagtatctttacaattaatatggtacaggaagaaattttaaatttctaaaatcacccatgtggttttattttctagcgatatttgccgaaggatttcttagcagcgagtctcaaaattatttgtcttcgtgtttctaatagtctttatttagatttatcatctacgtagagcaacttatgttttttaagccttttagaagctacatagagtttgtagattgaaggattatatcttttatttcattaactgtagtagttccatatcattttgtaaaaatctcttgttgaacccatgacaaagaaacatatataacactatgaagggttttttaacctctagagggtttttggttgtttcctaatttaaaagaaaagctgtataacatattttctccagcacatacacagtatctcaggaacactaacaaaactgaaggatcacagaaaacttacaagatgagaaatgtggaaaaagaaccattggactgatgcttttagccttttccaattattttctttcaagatagtgaatagtttagcatttgactttctattttttatctctcaccttagtttccaaccttttggccacattgctacttatatgtatttcattaaagcaacctaaaacagatgtatttgatatatctgttttaaagggtttagttagaattagcttatctaaaagtgatctagtctattatgttctgaatctaatcacatagttcagattccaaaagaatctgaagtgaccctgtgacaacatgaaactacattaaatgaatatatattttgtctaaatgacatccttggcttactttcagaactttaaaaaatcttttcaaagcctgacaacgtcaggtactgattgagatgatctagtacgtctgatatgctcatgtaaagtatttagatgctgttttgttattgtgaattcaatagtgccttgtgagcatctgaacctagtactccctctaaagagtgtggaactgggtttgtgttgacagcacatcgctgaacagacatcccaaactgctctttccggcactagggagtgggcagcataatccctttattacgcaaagagcatatcaaattcaagtaccaaaatgcttccaaatagatttaggccaacactttctttgataggatgagacatggaaaaagatcctatttctgcaagaagcccattttaaatttattactgaatatgtgtaaatttggaagtggttggatgctcattgtcatatcctgtagtcactaaagttatatgtagcttatatggaatttaattttttttagttaaaaagtaacacatctcaagagactaccatagaagagtgacttgttaggtactattctgtaataacaaaagcaaaaactaaagttcaaaagtttaagaaattaagttttattattccaacctgacatttgctgaataaatcctaatattctaaatcctttcttagttatattaaggatacattaaataccttaatacttcattttcactgatagcttttcttttcagtagtgagaaatgctctagttttcttcaaaatgacaaactggagtttggacatatattatcatgtggcatatgagactagttatggtcaatggtagaattgaagcaagtatctgaatcatttggggaagatttctgcatttcctttacaatgaggaagaacggcctttatttctaagcatatatgaatgagttcatgataaaaaaatttatttcatgtgttgatcaatcttggggcattttctcaaaccttctttgtgtccgtaaacattttgtgtatttcaagaaaaatatttacctcatataagcatgatagatagttttggataataataagttctttcaggctataaaatgattatagccataagttttgcatatgcttgtttggtataatggtgtttaaatacctctaggtggtttttgaaggaagtgcatatggattacaaaactttaataagcaaaagaaattaaaaagatgtgacgatatggacaccttcttcttgcattatgctgcagcagaaggccaaattgagctaatggagaagatcaccagagattcctctttggaaggtaacaaaatattacaattcatcttccagaaatcattcatcccattcaattaactagaaagaatggaaggaagtgatttttaagggtaattagtgctaattataaagagcctatatatttcacttagaattgtgggttttcctacacaccagcactcctcaacttcttctactgaaatactgcaaagcatattacagagatctaggacaccccacaacaagcacagacttcatttgaatttttaggtagattgtaagaatgcatgtacattttatgtattcctttatactatttccattgaggttattttacatttaaattatcatcattaaataaaattgacacctcaagaaggtgtaccatactcccacagtgatgttttccagatgccagccttgtacactctaccttgtttaggaaattcaactgcagacaatgaaggaggtggatgccacagagatgaaggcagtgaagtggtgtgataagacctttgctatataagataattctgtcaatattgtggaagatggattagaagtggaagccaagctaaaaagctattttggtagtaaagagaggataagagttcaccagggttgtgaggctacaaaaaggagacagggagaggttcaagagatattggtgtataaagtcaatagtgctcgacagcaaaataaatgggaagagaaagggcagggagttagaactgactttgaaattcttaaatttaggagattaggctaataatttaatcatcccccaaaaggaagaatatgagaaaacagaaaggaagtgagtgcgaaggtatgagatttggtcacagtgagtttcaaaggcccaggggacatccagttggaaatatccagcacacaacagaaatgtagaaggaaagggcctgccctacaggagcgtgattgcacaggaagtcactgagacagtggaaatgtgtgaaaatcccttaggggatcacaaaattgctagcaaaggtagctaagagtagagtaccaacatcaagagacagatggcagaggaaaagccagaaaaagatgaagatagtgaaaatacacatgccatgggtgaagttacggggacagaagagttagaaggagcccttgccacaaagagatcaagtaggaaggagatcaagataaagcccctacattagaagggtccagtgacctctataaaaataaaaatgatttctgaaaagggatgaggataaaagccaaattcaagttatttaattagtgaatgggagtttgtaagtatagatccctgtttaagttttgcgccaaatggaatgatgaatggagtgattcttcttgatcagacagaacggtcaagagatgtgtgtgtgtgggtgtgtacatgcatgtgtgtgtgtattgtttagaatgaaacacttagatgaatgaaaggaaatagtggagagacacattttaaaaaggagagaaacagaaaacatggctatatggttccaagtaccatgtaccgtagatggtctccaaatcatatttatgagcaaatactttttctcctttcctggacgtaaagatatactgccaccaatttacaaggcttataaagcagacagccatgtctattttagaatagctataggactttgcaggatgaaaagacatattacttatatgctgagctcacggggtacatagtaccatatatggtattgcagaaatatgtggaaaccacttgtggcatcaggggcttaagctcaaattctagtcctgtggtttattagtagtgtgtcttttttctcgttaacattttttgaatcattgctacaggccaggcactctgctgtgatctttaaagacatgacttagtattattgtcccagtaacattgcaacatcacaaggtctctctctctctcgttctcttctctctctctctctccctgtgtgtgtgtgtaggtatatgaatatatgttttttttttaattttttttttaccaagtttgaatacaagaaagctgaggttcagagaagtatggtaactttcatacttccttactagctctgtgatgttggcaagacttttaacctctctggacctcaacatcttcctccttctgaaaatttgtcatggtgttactttgcaggctattggaggcttgaatgaaataatggtcatgtgaacttagcagagtgcctgggacatagttcttgcttttatataatcccaatattttattacaatcccaaaactcatatagataaaaacatatagcaataggaggatctatttcttattaatgctacctatagaaatttaactcaattcataaagtcactctcatgcttctatatattcccactaggttcccattaaatgtttcgttagaactgaagctgtgtttttagtttccataaaaagatgcagctgatttcatttgcacttggcactgagttttatagtgtataggcactcaggaggtgttgaatacagtctaagcaaaatttaatccatattctggtttctttttctagtgctgcatgaaatggatgattatggaaatacccctctgcattgtgctgtagaaaaaaaccaaattgaaagcgttaagtttcttctcagcagaggagcaaacccaaatctccgaaacttcaacatgatggctcctctccacatagctgtgcagggcatgaataatgaggtgatgaaggtaaggctactggccggctccaaagggcctgaccggcggtgcaggtgctgggacccagatccagctctctctgcttgcaccaggatgagcaccttctaagcttccatggcaaacaaaatgcaattattacatttgctttacttctcactaactaatgatgatgatgatgattagttttgactttattgaatagttcttatttaccgggcattttcatgagagctttgtgtgtgtttgtttattgaattctcatctaagcaaacccactatgaagtaattccactagtattcttatttcatagctgagtacactgaggtgccaaaagaatttgaataacttggctaacatcacaccacaagtaaaaatgcaagactaaggaattttgttttcatctttatgttttcagatttaggctttatcacttttacctgactgatttaatgactaaaaggaggaaggtaatgagagactcagtgaaaacagaaaacataattatgattctctatttttgttagaatggatggcctgtcagacagattagttagcagaagacataaggataccactgggaaacatcctattggttttcaaggtgtaagagtaagttcggtcaaatagaggaaaccctggaaaattgctaaagggtaagaattaggccatggtttttaaactacatctcagagtctctcaaacaccctagaacacaaacatgcctaaaggatgaagaatgcaatttacaaatggagcatgttccagaagttcatttctaaggtaggctatttggaacttataataagttttctggtagaaacaatatccaaagagttccatgagtttcaggctccctttagcccagaaaactttctctcagccctctgaggctttggctcctttaagtctggcataaaaggtttgagaggagccactttctgctttcctactgtaccttgtatgtggctctattaaaatccttaacacgtgatattggaatcaaatgttcatgtgcttttcttccctactggctaattatccttgagggaagaggtgtgtcttactaattcaagtatctcttattcctcagcactgtgctggtaaatgatggctgttgaatgaatgaatgaatgagtaaatgggagttctggctgactgagaaggggagagctgaagtctcagtacctatgagatgggtcagggtggctccctgaagaggttactagaaagtcctctggcaacaagctgttatttttttattcattattcatgagccaagtgctatttctgtatcatctgggttgggccactagtgactacagggactcccgcagagatatcaaatatttcctcatggagctctgtgctccctctgaaggctcttttcaagaacacatacctattaacttaatattggccgtgaaagtgtggtttgggaattgaagataggtaactgttgaaagactattgttaattagaaagcagaaatctccagaccaacaaatacagaaaggtaggtatcacatagaaatggaaaataaagctcccaactgattcataaactcagtgatagacataaaacaaattttcctggtgacaccaggacaagcagaaaaatagagttctaagtaaaattgactctcctttatttggtcttaccaaccacaactatgtgtaaaaatattttcagactcctctggttcaccagagatgacaggaatagaaggaggagaaggttttttggaatgtctcccctcatgcttgcaaacagcaatcttttctacgtgcctctcccagttatgcccatggtccggcctgtaaacacccagcccctgccagtttagaagctgctccattgactgctccactgaccgtccctcaaaccttcctctgctgcctataatggttgtaaagtaaaaaactgtcatccacgcatcacttcaagttcttgcacaatgatttatggtatgcataatattccctgggacacattggcctggggatcagggggtggttttgtttctcagtagcctgcagaccttagtccttggggctttaattcaaactatccagttgtttgacccttccatgaggctttccagattctcaaccaagggacctgtggagggctcacctccaaaccttccagacttgcctggtcatgactgaatttgaagtaggtgcacagtttagttgctctctctgggatccctgccacatataactgaacacagctatacctttatgatctatgattctaagagggcaaagagagaaaagcctcttcttgtagactttggtagctattttccatgtgaaactagagtttcttaagaacagaatgcgatgatgcctaaagtccatggaaggaatcttatgttctcatttcccttaatccgtcaatcatttctccacctattcttatgtactaaaatctgagtttaattttcctttatgagcagagctaattaataaacctaattcatttgctgacactcacaagggatacgttctgttaacaagaggctctggtaggaggttgcatacttttttcaaagaagtcaagatttttaagaaacagctgatttaatgaattcttttaacattatttaattataaggacatgtcatcatttatcatagtctttctgcaggaggaaaagcctccagtaggccaattcaaagatttgatgagacatttatatgagataattttgttacattgaatataaaataaagactagtcaaagacctatagatgcttgggcagtaatcagatggcagtcaaccaggtgaggaggtaacagatcttcaatgaaattccatcagaaaaattgcttgatcattttatcaggatgctaatttcttacattgtagagaaagtttccattccaggccaagtttgaattaattgggttacaccacacaaaactctgaagagaatagagtgtccactgacatgtcccaaaattcttgcaatccaggtaaaagaaaaataactggaggagaaaaaaaatcccttcctgctttttctccctccctccttctttctctctcttttactctcttccttcttccctacctctcttccccctccaccatgagcactttctaatggctccacaaatttattttcctgaaaatattagttaacataacttcacttactacaagtcagaagtattaagtgaagctatgataactagtatctataattcttattttatttataattccagaactcagtattgccttgattgttgtgatgttgaaatcatgattatttcatctaatggggaaattagttagtacccacaatgtgcaagattttgtgccagattgtgtgagagaaggatgaataaaagataaacagacatggtccctggtatttgaaaacttaaactctagtggaaggcaagtaccttatttggaaatctgcaaaaattttgacaattattctcccctttttttaggtcttgcttgagcatagaactattgatgttaatttggaaggagaaaatggaaacacagctgtgatcattgcgtgcaccacaaataatagcgaagcattgcagattttggtttgtatatttgtcatatctgtctgctttctttatcttttcatgaatacaacatggattattattatttacaaaatctcttaagtttttctccttagaaaaatataaaatacaaaaactaggtcaggaaaaaagtttttctatgtgtttttgtatatgtactccctgcttaagaggatctgagattgcttatagaagactaatagtaaagcagtaaagaaaatttcgagaaaatcaaagtgaaaagaaaatacaggcaggaaaagttgagatgaagctggtggtcaggctagaatgcaaaatacaaagtataatggcctggatgttataaagatggatcaaatgtatgattctgagcttctgaatagtcaaaggaaagatgaatatagtcagttgcagacttatttggcccataagagaaaagtcaaaggaaacacagctcccaagacctgaagaaattattgtcattgggtctcaaaaacagagccctgtatgatgtaatgacaaaggttcttagccacatgcctgagagtagagccagccttgtctctggtgaggcttcctggcgtggtccagtgaagcgatggagatgatggagatgatggagatgattgtctacatgacttcctcagtgctccatctgagtgtgctgttagaatgccggcaaatagacttttttcaaatattcgttagttacttgtatgttatctaggccagcatctgtatttttaccacttgattttgcctcttcaccatctcagagaataagaaaatgcaattaaataatttaaaaatatttacctaatgtttaaatgtgccatacaaatatgttttagcacctttactagatggacttagagataggtacatactctaagctgtcatgattggaccacaaagagaataaatgataaagagaataaaaataagttaactaacactcaaaccaagaatttaggaaaagagccttaaattaaccacaagaaaattggaataaagaaaagtattgttgaaaatactacagaaaacaatatatttttaaagtctggtttccttgcaagtttaatttatgtgtatactgtatgataatattgttcaaaaaagcttttacttaacaatattctttaatatatgattttacagagtacatcttcaatttctggactctctacatatatatatatattatatatatataatttctggactattatgtatagagtaaactgatactacctctaaaagctgagattacaggtggtattggcttcttcacacttttctactttttcacaataatttcttgtagtaattagaggtacttaaaactgaaggctaatgatttacagagaatggtagtttaaaatgattggatcacatgaaaacataatataacattcagttcttctaacatctttttagttaggaaacttcattagtgaaaatatttgattatcatggcttaacaagagtagtggcacattcatttattaattttgcataaataaagggaaaagaatctaggatatatcactttatttgcataagaaactgaaaatagttatggaagtcatgataatgtcttcaaaaatctcattaatcccattgaaaaatgtgttgactttattgctgtggtatcaagatagatgttgtgtctacattgttacttctttggaagatataaaatatctctatttcagaatcttagtctacttcaaaattaccttcttgcctagatttcataacatatgaagctctctatgtacttttacatagacatataatagtaaaatgatatgggagaggcacataaattctcatccacccttgcgatttggggtttaactggtgtcatttttcattttgtcttttcttccagcttaaaaaaggagctaagccatgtaaatcaaataaatggggatgtttccctattcaccaagctgcattttcaggttccaaagaatgcatggaaataatactaaggtttggtgagttgaggcttttctatgttatatactataaataagtctattttggtggatgctattaatttgatttttttttttcttttgagatggagtctcactctgtcacccaggctggagtgcagtggtgtgatctcagctcactgcaacttcagccttccaggttcaagtgattctcctgcctcagcctcctgagtaacaggactataggtgcatgccaccatgcccatctaattttttgtatttttagtagggatggggtttcaccgtgttggccaggctggtctcgatctcctgacctcgtgatcctcccaccatgacctctcaaagtgctgggattacaggtgtgagccaccacacccggcctaatttgaaaaatatttaacagaattaaacacaagcttttatgtgtctcggtgccctttcattgtttttttacctttgttcatattttttaacaaaaaacctccctattatttattttatatatttgttatgttgaatgttattttcttctcaaggtgaagagcatgggtacagtagacagttgcacattaactttatgaataatgggaaagccacccctctccacctggctgtgcaaaatggtgacttggaaatgatcaaaatgtgcctggacaatggtgcacaaatagacccagtggaggtaactcttcatattctatataacacttttatcttagagttgtcataaacatataaaatgctttatagctcttttacagttaatttagattgaaatacatacaagaaatacatatttccttctgcttctgcagaagcagaacaagagaatatcccaagtttcaatctatgtaaagaattttcagagctccccaaaacaattgcagacacaaatatagatacaacaaagactatatatctagtgcagttgccattaaagaagttaaggcctaccctcagaagatgataatgttcagccaggaacattaaagcccaatcatgaatgtatttggctttagtcctactcagaagagttatcatttttaaattaaggaccacttaactaatttctaagaatatgtatgtgaacgtgttgactgtgtttgggatctgaccttatggcaggcatctctgaccaaaagtggagagttctggccctttttccttcaatgtctgagttttgggtggcaacaagctcccctccaagatactgcaaaggcctgtattttctgtaggaagagaagattggatattaatctcatgtggcttctggaaacttcataaaaactcagaaaagctaacactgccttttaactttttctatattgtcccttcaatatggaaatgaagagctgccaatggtggtatggggtctgaagtcacttcctacactgaatgcttacagcaatgaatgggacattgttctcatgttccctggggaaaagaatggcatccagacagtaatggtggaagtgtatgccaagagttgttatattagaaggaagcacaattgtcagctacaatttgtttgtggatgcttttctttgcaggtccataaaatcaaggaatatctatcacatttcagatgattaatggtgatcagcctgatagatattccttgattttatgaacctgggaagaaaaagctcacagctgaatataagttatattctttcattgagatttaaacattgattctagcattaaaaccctttacagaagggaaggtgcacagccattcattttgctgccacccagggagccactgagattgttaaactgatgatatcgtcctattctggtagcgtggatattgttaacacaaccgatggatgtcatgagaccatgcttcacaggcaagtttcctacctatcattctgtatacagatttttcatcttcatgagtgaaattagacattgcaaggagcagttagcactaatgctagcaaagattttgtggttcaaaggaaaagggcaaagataacaaagaccctgtggatcaaccggaatcgcgtatgttccttgggaatgggagtagaatgttaaagaaatttcacaaaataaaatcacctgtggcatattctgattcaagtccagtggatgtaggctcaagattaattttctatgtgctaaagaagtctacatacacggtcttccaagccatttctaatctgttccaatttctcatatttattttatccccatttttagtgataaaaatggagcagatacatatggatatgtcacccccacactaatccctcctgctcaccaacaattatagataaatggtttcaaaagatatagttttaggaaattataaccaagtttccaaaaacaataacaaatttatttgaagtttaacagaaacgcacatcaggcaaagtgtattaagccataggcttacttgtagactggaaattcaattcttttggaaagacaagtatcagatgctacccatgtgagtgaaagaggtatctgagatgagccttcactctcttggtctcttccacacacacgtgcacacacacacaagcacacacagtcagagctgccaatatattttcaataggcaactggacctggaattctacagtatctcttagaaaaaaaaaaaaaagaaactatagctaccaatataagatctgtttctaataaatgcacgcagcaaaccaccaggcacaataggatatgtgtgaatggaaaggaactccctcttagaatgaatttgcaacctaaaatttaatagcataaaactagtaaaaaactacgaagttgaccaaagacaaatttacttccaagaaaatagaaataatagggcattccaaaaagaattttaaaataaagatatttgagaccttcaaaaatttaaaggaaggaataatcagttatataaaactaaatatatgaagataacgtaagattgtgaaaaacagattgtcgtatatgaatccaggattggtgatatgaaaataattcagtaaaaaataagttaaaaaagccattgaaataaaatgaaaactcaatagatagactaacctctagaccagaaattctcaaactgttgcacattagaatcacgtgggtagctcacaaaatcccagtgccaatttataacctagaagatatgaaaatctttaagatgaatctcaggaattaaagaaaaaaactctttgattccaatgtttcaccaatttacaaacccaatgatttggttattgttaaatgtatctttagaacacagccttaatatattaatatgcataatgagaaattatcttaggaaaatggggccttaatgttagaatttattcccttataattactaaatataattaatatattttaaatataatgcaacctcttgtcaatcaaattaacaaactgattctgaaatttatgtataaaaggccaaaaatagctgagagaagcttgaaacaaagaaatgagatttgcgataggaaacacaaagctttaagtcattagtattaacatttgttatggtgttgcttatgactgcctgtgagatgataccaaaatgttttcagttctctccataattatttttggcttcataaaaactcagaaaagctaacactgccttttaacttttgccaaagagaagccccccaaagaggggcttttgaacctgcaagtgaatttgagggacaccttacatgtagctgttctattccccaggatcatagcaataccagtgatttccttgtcttttctatcttgggacagacgttactactcacttcaaacatctttacggtgattttacaagataaaataggtttcttaaaggatgaggaagaaaatatgatgtatttggtgttctcctattattattactttgaaaatgctaccctaatcagaatcaaattataaattttgaaagcttactaattctctaacattctatcatgttattttatgattagttaaattcactttccgaatatagtagctttattaaatacattttatttacatcaatagtactttaattataatgtttataattctgttttttcagagcttcattgtttgatcaccatgagctagcagactatttaatttcagtggtaactattccttttactggtttatttttattactatttataatttaagaaatcgtataattacataatatggattttcaaaaatgaagcaaattttgatttcttgcttatcagcaaaaagtatacaaaatgatgattgacatacttggaagcagagtatattgcatatgaatacgtaacagccaaactattacagttagaagtgtcaaagcgtaatttggatatccatatcagtgtttttagtgcaggaagttggcaggtacattgcaaggaaagctgttcccatggcctgtaagagggtcttccgggagtgtgagcttgggcggtgccccttcttcagccctggtggctttaaggtggaggcaggacaggcagcacggggggaaactcctatcccagatgcctcagtgccacctttaaaaactgaggagttgaaaaatattgtcaaagatttattacaagtgaaagcatgaagcatgagatctttttcactctgggaagtggaatcagtcagcttttgagttgaattttaatatgccctttatacggatgaatgtatggtgaatttacgtaagctgcaccatatcagcaatgacggatttccatttgtagtattgaacgtgtgtgtgttgtcaatcataactattgaaattatgataattacagagaagagtgctggggagactcattatatgccataaactatgcattatatgccataaaccataaaccatagtcatgcatggtttcctgcaaaggctgccatctcttcaccaggcaagagaactgtggcagagcctcactgaccgtggagcttgccaaggggatgctgcccccattgtcatctatattcattgggccccaaaagaacaaagaaatattcacgtttggattttaagctattttttattaccctatataaaatacaggattatttccatgaaattttaaaaggcctttgatttcttgtcatatcaaatattataatatgtaatggttaacattgacttattcatttaaaaatatatgtttaatgtgatttttaaatataaattttcttaaataaatgtttggctaaagttttactttagaatttgagtgatttcgattcaattatttcagttcatctatttccaataaaataggatttttaaaaaaagtgaatggtgttttgtaaatgtttcttaaatcatatatgtaatgaatttgggagagttttaaaattatagacatttaaaaattatttcttgcagtggaaactaaacttgatctaagtaaaaagatattatttttatggttcaagcggtaacaagagctattgccaggtgtaagtaaaaagcctaatatgtgagaataatttcttgttgaaattataaacgaatttcttgatttctgatgatacaacatatgaactatgggaaactttcaaataattctataactagtcgtatggttcagtgctagccataatatagacactctgtatcaatgaattaccattagttagagattacaatatattatgatttatctgtttctaagctctttgttgaatggtttgtttgatttttagggagcagatattaataagatcgattctgaaggacgctctccacttatattagcaactgcttctgcatcttggaatattgtaaatttgctactctctaaaggtaccaagagggaacaagccaagtcttttgaagtgccactcaatttggttggatgaacattcactgtgtgccaaatgaacattcattgtgtgccaccatctattgtgtgccaggccctgggccaggtgttgtgaatttaaaaataaacagaacagttttcatgtctagaataattttctgtccagtaagggagcatacttaaaaagataatttcagaacaatagtagagaacatttataaagcaattgttatatcccaggcatttgctgaacatttaattaactgtctttcaatgtatcagtcctgtgtggtgtaggtactataactttccctgttttagattctaacctgggcctctgataacaaaggagcgaggtgtccttctctgctatcttcttctttcttgatctctaatgtgtctatacttacattttatgctttaaaaggtaaggcttcatgtatttatgtaatgcatcacatattttctaccccacttacacatacagacacacacacacacagagagtaagttaaacctgattttaaatatgtttagttttctcatctaaacacaatttcctgtaaactaaaggtcgacaatatttttagtcaaatttttttttgctaagttgaaaatccacgtaaacattgctttaaataaatgaatagaatttatatttacatagtgtttttttttaggtgcccaagtagacataaaagataattttggacgtaattttctgcatttaactgtacagcaaccttatggattaaaaaatctgcgacctgaatttatgcaggtaatgtatatctgtggattgccattaactgagttgggttcaacagaaaataaactaattttgtttattataatttttgttattatataaactgattctggaattttaaaaatgttttaaaataaagatgacatatttgactatttagttacaacatggtgatggtggtggtggtgatgattatgacaatgataattaattgtagtgagactgagttttttaacttacaaagaaacttaatatgcagtcatctatgataaagataacatccttaattagtttgattttcttcattctttgaccattatgatttgcatatcagtggaaaagccaaatataagaatgaattatcaatactccaccatcaattaagaaaaattactcagcatacttgactttctgaggagaggttgaaagcattatttttatatttatattcaccagctaatacttactgagtgactagcacatgtatgtgaaatacatcatatttttatcatcaatagatttcaatattgccagtatttaataatcaaaatatatatgtgtttgaatatttaaaaaataacaaaatattaattgataggcttaagcttctcatttatcattcattttttatttactatacatataaaacataaaataaacctaatgtttacatcccatccattttacctaacagaacatattaacatgaagctgttgggtgttatttgggggtgggaggaaataagaggaggggcagagggaagggccatgatcaaatatatttgaaaaatgctgagttaaaaatgttaagtacattttcctattggcatgatctctcagatcctttaatacagtaatgtacactaatatggtaatgtacactaaatgaagacagagcattcaacttcattcatatttatattactctcaaatcctttaggttatttacaattttggccccaaggaatacatattgacccttgttggaaaatattttcctacagaatagtttgaaaaccatcatattagcataatagcagagttatttgtatgatattaattttttcctatagatgcaacagatcaaagagctggtaatggatgaagacaacgatgggtgtactcctctacattatgcatgtagacaggggggccctggttctgtaaataacctacttggctttaatgtgtccattcattccaaaagcaaagataagaaatcacctctgcattttgcagccaggtaagggtcagtctagcaatgtatgaacatgtcttctttctgtttaatatttgccttgaaaatatgaaacctaattttttccaagttatgggcgtatcaatacctgtcagaggctcctacaagacataagtgatacgaggcttctgaatgaaggtgaccttcatggaatgactcctctccatctggcagcaaagaatggacatgataaagtagttcagcttcttctgaaaaaaggtgcattgtttctcaggtgaggatatatgattggagtgtttatataatttctttaattagccattttcaggctatcttttcattatatttttaattatgaggtctaactttatatctcactaagtacttttatccaatttattttttcatcaaaacatatgtaacttctaaaaatactgaaagggaagtcagtattatttccaactgacaaagactttgaagtttatagcgttgaagaaccttgttcaagaatattctgttcacagaataattggctttgtgcagtctttctcagaacctttctttgaaacatagtttctcatattttacctcatcatgctgccatattcctatatagatacaaaactgtggttgtgtatgtgtgtatgcacgtacacacacacacaaaacatacaagttcaaatactctacttttcattcaatctgatgaatggtaggcataaaaagttccctttaagtgacaacaggagatggtaaaaatttctgaattttattatacttaaatgaactcaagtacaagaaacaaagttaaaatatgtaagtataataaaatatgtggcataattaaatgatattgtgataagaaagaaaaaacctggaaatgttttacagaggtttttcatttgatatcttaccatagcagtagcaaagagcttattaggctaatgttcaaaaacacatttccttaccataatattgatgccagcaaattggtgctacagctacatgaatgaatgttttgctcagttttttctggtttacaaagaaacaccaagcaactgacctgcaaaggggaccgaagtagacccaggccagacagttgttgcttaattacatcataactgaaatagcaacatggctcttgcaccctaaaacatctgctcactagcactgaaattaaatagtgtcaagaatttttttctgtctaatttgaaaaaagatagctaatatgacaaggctttgttgtatttacatcttgaatttctgtggaaaaggataaacatttttcaaagcaattgagtaagcatttttcagagcacaagagggaagctttttagatttaaactcttagaataataactgacactaagctaagcatcttatagccatgtatcatattactagtagtattaccaataactattgaccacaaagactaacattacttcataaaaaaattttgatacagtgttcattgaaagaataaaacaagatttaaattgatgtgtatcagttcattatagctttaaaaaaattaggtatgacacagacatgctaagcgtacttctcctaccccaaagtgtttggtaatgtgtttatatactttcatattttaaaccactaagtaaaaaacgtgtatgaatcacattagaaataggtcatttaagatcattgagcttggaattagctcatttattataaatgttttataaatatttagttgccagatctcaataatgctttttgttgtcatcagatttacctagaataagccaagtggcatcccatcccgcatttcatctgttaagtgtatgcacacatcttttcttaactctttaccagtgaccacaatggctggacagctttgcatcatgcgtccatgggcgggtacactcagaccatgaaggtcattcttgatactaatttgaagtgcacagatcgcctggatgaagacggggtatgtactgcggtcctcatgcttacccaaaatctcaatatagcagaaacttccaacattgccagaaaactctcctagacaccttttaccttccttgctctattcccagccttttgttgggtgtttagcaagtggattcttgaggtgaagtatgaatcaaaaggcaacagaattgggagaataccaaggggtgggtgaatgttggggaaacctccagtctcacagagcagcgaggtccacaggccaatgaaatttgatggtaaagcgtttactccctggtaggtccagagaaatgaaggcaggggtgagttttcattaagataagtgttattttgaagtgtattgatttgaaatgctgccctttattgtgctattatgtctttccttcctttggggagagtaacttttgaaatgtacgtttgttcataaaatgatggggatagaagactgttgttgcctttttcaaaaaaaaaaagtctttaagtggagaaactaaaaatgggcaaacttataacagtctctgattttaaaaaacatttacaagcttgtgaagccccaaatctgtaagccactgttctacaaatgatcaatctcaggaggattttcttctgtgttcaacccaacatctttaccctgaaagcttgtcctttgtccttgtggaatcatcccattgcaaaagcaacacaaaacaaatgccttggaattcattctctctctctctctctctctctctctctctctctctttctctatctctcacacacacacacacacacacacacacacagatccacttcccacacatgcacacacaccatgctagaactataaactcattattttgaagcttgattctgaacaccagttttaagtgctatgtattttggtattaaatagtgtcgctaatgtcttttaagcagttaagcagtgaaataagacagattagacactgtcaccacgttttctgtgtctgtttttcttcaaaagaacactgcacttcactttgctgcaagggaaggccacgccaaagccgttgcgcttcttctgagccacaatgctgacatagtcctgaacaagcagcaggcctcctttttgcaccttgcacttcacaataagaggaaggaggttgttcttacgatcatcaggagcaaaaggtacactgtcttcctgtccactgtcatttagtgttctctggtgttgggatgatttgaagtctgagacaaaataagagaaaagaaatgattttcagccattaatcaaaatttaaaatatcagttgtttacatcaattttttaaaggttttttattttttatttttatttatttatttttagaaaaggtctagctctgtcgcacaggctggagtgcagtggtgtgatctctgttcactgcaacctccgcctcccgggcttcagcaattctcatgcctcagcctcctgagtagctgggactataggcatgagccagcatgcccagctaatttttgtatttttcattgagacgtggtttcaccttgttagccaagctggtctcaaactcctgggctcaagtgattcgcccacctcggcctcccaaagtattggcattacagacatgagccactgtgcctggccatttttatttttaatttgtgtgggtaaatagtaggtgtgtatatgtatcaggtacatgagatgctttgatacagccatgcaatgcatgataatcacatcatggagcatttatcatttgtgttacaaacaatccaattatactccttcagttatttctaaatgtctacctaaatttataaatgaattcttttggatgacaacaggcacattgcttaacctctctgatctttagtttatatttcttaaaaaataaaatgtgggcacataaaaccaagcttcacatcactcttgtgagactccaggggttcaggtgttggtgggtttctaaaccatactccaaggaattttagtgatgaagttagaggatagttagtctcacttctcataatatctttataatatcactttctaaaataatcactgatagttatgcacgagggcccagtgtcacctagtagtggacacagagcgaacaatctcatattcaaggcacatcaagcctgtgtttttgagcatgggcagtctaaaaaatctccgactgatcatccctttaaagcacttttaatgaaagtgttcaatccaaacttttcttttgataatgtagatatactagatgggttttactgatagagtttaacagaaaattagataagatcttggagataatgggccattctttgcctcctgccatagatttagttcctccttggtatggtaagcaccgtcttaccctgttcagttggatggtgatgaagaaaatgggcaaaatctggaatgttctggcagaggctatgcttatcaatgcactttacatgtgttaatttgtagtttaactcaatacaggatgtacacatgtattagttattaaatatgggaccagtactacactgatggtgtaggcatgtgaatgtggaatctctacccaacgtggtcagctctgtaagtactgaccatttcataacttcaggagaaaaagaagatatagtcccagcttctttgaatggcatttagataaagagacagaacaatgattataatagccatcctgaaatttgcccacattcctaatgtccattaatgggcaaggatcctattactgagttgatcttgctttacatgttggttccattggaaccaagggtgagcattgcatttcatgaatatgcttaagtttaggtttcccctaaagaaataatcttgagtttcagctgttgtacagaacagaaggatgaagacctgtgcttatcttacttatttattttttacagatgggatgaatgtcttaagattttcagtcataattctccaggcaataaatgtccaattacagaaatgatagaatacctccctgaatgcatgaaggtaaattctctaaaacaaaattcttcccgggtttatgcttgacatatgttgttgtaatcacaacctaataataataatttccagctttaaacaaagcttctcattttccataggctgtaagggaaatgagacaataactatttaaggaaggccttcttggattaaagaatcctattagttattatatgtaatagagaataatatggtaaaatattttttatttaaataatctacacctgtaacagagactacaaactggtgtttgttggctggtaaagcttttgtatatgtttcgcttggcatgcatgctattgttgtttcaaatgtgcatgaattgctaatgtttgaaaccaggatgctttccttaaggtatctggtttcttccagttatattttcctccaaatatctagcttctcataagaatgagatcttgtacctgggcctgccttctcacaaggcaggaattgctgggctcagcaccagctgcttcccatggatgggacaatcactctcctatttaaaaacatggatgaagctggaaaccatcattctgagcaaactgtcacaaggacagaaaaccaaacgccacatgttctcactcataggtgggaattgaacaatgagaacacttggacacagggtggggaacatcacacaccggggcctgtcgtggggtggggggagaggggagtgatagcattaggataaatacctaatgtaaatgacaagttaatgggtgcagcaaaccaacatggctcatgtatacatgtaacaaacctgcacgttgtgcataccctagaacttaaggtatggtaaaaaaataaaaattaaaaaaaaaaataaaataaaatgccccacctctcccttttgtatattgggctccagtgcctagttgtcacatattgtcattcttatgcaattgctttccttatagtagagaagtattgaattatgactttatccaaactgtgaagataaaagcttgcccaagtatagccaacatctcaagaacaatggaaaaaagctcttatgcctggcatggttctttcatttacattacttgcctggcttctgtgggttcttaaacatgtgaccccttttgctacgttaaatacacactagcatatgaccggacaccccagacaagacaaacatgcacaaattgttgagcagatgagtattaaaggatgcaaataagcaatctgggaaagttgggatttgagggttgggacagacagaataaccaagaaaggcagaatgacttcagatgtcatgcaaaggaaaaatatatacaaatgctggaggaggcagtaagatataatgacacagggaatagaagaccagatttggagccttctggaggtcctgggatttaatcctggtgctgccttttgctgtgttgttttaggcaagtcatttcacctctctgagcattattttctgttttctctatttctaaaataatgatgctaatactgatcttacaaagtgattacaaaagtaggggtaaaatgtataaagtgctaaggataatggtttgtacataatatacctcctactatttttgtgctgcttatgtggttattagtactactagcacttattgttctttatttattgaacaaggacttcctgtgcaccaaatattttggacggtttttttatgatgcctaatgaaaattggagccagtccagtacacaaatggcatacagattaactttttaggtgcctacatctcatcaaaggacacataaatacctaatctcaaactttcttattctgtagttacagttgttgaaatctgtcttgatgaataatcagagatacagatttttacagaatgtttcctgcaacattatttataattgtaaaacaatgttgaaatattcacatgtggaaacatagtaaacagtcgaaattataccaaaatgttaataagaattatctgttataggattaggattagtttttaatttcttctttatgctactatattttctaggtaattttctataatgacttaattacttttatattgtgactacttttcagcaaaataaatgaacttacatgtcttaatttagccggacataatgcatttgaaatacttatacaacatttctgaaaagttgctcttgaaatctccccagcccccacccaagacagcccatcctttattttgcacacgttgattattatccagttttcaaactataacaaccagacctgcctgtttctgccttgcacagcactactggctagtcttgtctttatttttcatgatggttgttgtgacctccagtactgctatctagtcaccaacagagacttccttgtaattttcttagtccctttggtacctgagaccagccatggccctgtttcttcccttctggatatagtctgaccctctaccctcaagttctacaggttcaccagatgccccaggaggtcctagatgcattgatggggccatatggggtattttgtctagtcctggttccaagagggcagcctggctaggtgatatttctttctcaggaccataaatttggaccactagatttgaggtgtctcaaattgtttatgcagccccacaaaaacagttgttcccacacaccatagaggtggctctattgaccccataagtgttctttccctgagttaagtatctagagagtcttcatctatttctcattacaacatctatcccccaccatcctgtccacccccctctaaacacatactctctccgtgttgcttggcacatgaggtatagaagcaaacacattactccagactggggcagttcagaagatgggaactaaaccatagaaagactccattgctgggatgaaaaatcttgattaagaacaataagttgtcacagtaaggtacccagcaaaggaatcagattgactatcctttatcccaacttcttgggaccagaaatgatttggatttcagaatattggcctatatataatgaggcatcataaggatgggatccaagtgtagatacaaaattcatttgtgtttcataccctccttaaaagcatagcctgaaggtaattttatataatatttttaataattttgtgcatgaaacaaagtttatattaagtactcatgtgtggaattttctacttatggaaatatgtgggtgctcaaaacattttggattttggagcgtttagaatttcacattttcagattaggattgctcaacctgtaatctatatatcctctaaaagtccagaaagacatcaaatcttaggcacaactagtggaatatctcttgcctagattttagtacatgcaattttattctcaagtacatggtattttttctgaatcactggtatttctgaggcatgcagaggtatttgtaacattttgtattttaaactttgttcctgaatgacatagattataatttattcttgagatgcaagaaaccaaggaaaggaaagggaatgtcttgtgtattatttcagaaataggataaaatctttcctaatatgtagtgtactgccccaatatcttagctggtttttctctttcaaaggtacttttagatttctgcatgttgcattccacagaagacaagtcctgccgagactattatgtaagtttattttatcatcattatctgaaatttattttgttataattctttgaaaaatattaaaaatattgttactattgatctgtaatctactgcagatggtattgatctaatttgtcatattattgtattatctacttgtgagagaatttttcccttacattctcagttttccccgaatattttaatagtttctaatagcatcatttagtgttgtttctagtctttatgttttcttaagtagttgtgccttaataatgaagatctaaaagatctaaatgatcttttgagaactcctctctttccatgcctatgagatacaaagcaattgaataacaggcttccaggatatttatttttagaattaatatgcaataacttaatttcctttctccacttgaaataactcaactttgttcaaatcacttaattttcagcagaattgtaaatttgtgtatttgattttttcaagaattactttggggattctatacttgactaactgtacatttttttaaaaaaaattctgtcttctacagatcgagtataatttcaaatatcttcaatgtccattagaattcaccaaaaaaacacctacacaggatgttatatatgaaccgcttacagccctcaacgtaagttcaatgttttcattatctaaatagtttcttttttttctttttttttttttattatactttaagttttagggtacatgtgcacattgtgcaggttagttacatatgagaaataccatttgacccagccatctcattatctaaatagtttctagttgggttctaaaatgttttgatacaatagtctaaaatgttttaatacttgatggatggagagaattacagttttatagttctatgtctatatcttccatgtgactcaaacctttatttgttaataaagaaagcaatcctttttttcaattgctataaagttctacacttcatttctaatggtcacataagaactgctccaatccagaatcaaataaaccatggacaacacaggtaacacttgcttgccacctctatccacctacatattcaagagttttctcctgtgtaaaccacaggaaaatgcaaggggtgatatttcacagccacagcttctaagttcagctagccactgggctccaaggtaaactctgaccattcagaggttcttagatcttagattccagatgaatgaaccccattggaagcaggcttttaagacacagcatagacttaaatttcccaagaaaccttttaaaaagtagctattatttaaaaagatgcttttatgtttctagccaatgaagcaatgaaaataatgcatttgaccccctgtagtctaaatcaaaggtctcaaactgaaataactacagagaaaacagtaacagccaagtaacttaggcttctggttaaaaggacagtggctactagcttcaacaaatcattgccatgtggcaatagcagcccacaattgtgtaaatattggcaacaaattaaaattgtgtgcatgtaaaacaaaacatatttgaggactggagttgcaaattttggtctagatttgggctatctagtatgggaaccaatagttgcatgtggcttcctaacttaaaaactagtttaaattaaataaagttaaaaatttgttttccagtaacactagccacattttaaatgctcagtagcccatttggcttgcagctctcatattgcactgcacaggtagaaaacattttcgtcattgcagaaagttctattagacgacactgctctaggccaatgaagaatttttattcaccttcaatgagttcatttccctaaattgaagactttggtacagaccatggtagcagccgtcacccaagttaaacctacaaggcttactgagcacttggagtatggagaatgcagactcgtggggattttatgcctttaacactggtgatggcaactgactaaccattgctgtaagcgctttagctctccttgagtatgttgtgttttgctattagtatagttcataatcaatagcccagtgatctaacagtaactacactacagttatacttagaaaatttgttgcatatgtatgtgttttttaattctaattttaaaaataggcaatacttctatcagaaaaaaatgtatctatttttgtctccattatcagaataagaataggaagaaataagatctatgtagcatctaaaaagaaagacaatatataacaatgggcaaagtataatttaaataaaataggttcacttagataaatgcaatgtactagatatcaaaacagcacctgattctgcaatgccttaatagcttatgaaaccttcctttagttgtaagtgagctgagtggggctctttaggaaggtaactggcctgatgagaaattactgtgcacagaaaatttgaaagtctagatgcaccaaatagagaacataagaaatcagacactgagattaagacaaactggagccagtgagaggctattttcattaatggtgcatgcaagagtagagctactgtggaaaatccattagcatagctacaaatgcattggatactttgtcttatttacactttatttgggtgatatttaaacttaacaatgtacttgcatgcctcaaggggtaggttttctgtatttgttattagtttaaaagcagagttacaagatttcagaaacgtaagaggattgttttaatgaaagcacattgaaaacaagtatctgtgtgtgtttctagtatggtgttttaaaaatattaatagtaacattctgaattactctcacaaatatttttccatattttttattttagcttgaagaaaccattaattttaaatggaaaaaaagtcaaatctacgtggaagtttagatgaggtctcaaaaacaatagctagatcttgccagtttttttttttttcccaagaatagctagatatatagcttttcgggctccactgggcatccaattgataatgaatatttgcaaggggttcttttattccccccagactattgtatataaatatatctcaattacttttcaaatggttggggtaaaaataaatagaaaagaaaaatggtgaacctggaaatattccattgttggtgtcacagtagtagtttttaaactggaatctctggctgcttgaatcagaattattgtggttcttgttaaaatgaaggttcctaaggcccatcttagacctactaacccagaatgcttgagggtagacctaataatcaaaattttaaataagcttctaaaagatttttatgaatactaaaattgaaaaaatgtaatagagtgctgatgaaaattatagtataggctttttcaaaatgtaagtgggtgtttagtgcaaaaacctataagttgtttggtgaataattttggaaagtacaatcaaatcaaagttaatacaaggaagctaaaaacagaaattccaacttctatctaacagttatttccgaaagatggacatttttaaaaagagatggaaagatagggagaaaattgaaaggataatgtctgagaattttctagaaatgaaatctgtaactcatcaaattaaaattaaaaacttccccaagggctaagaagaccattctggctgcatcatttttaattataaaatgtgaaacaataataatatttataaataagggaaggtcttaataaactactatatccaaatgatgaaatattaagcaatatttaaaaacaatgttcttgatgaatctttatataacattcatatgtttctaggctgtgttgaataaataagcaaattgaagacataatttgagtaaaaacgtaaatacaaaataattatccctttttctataactacgtttgagtttttgaacatgggtgtttctgtgtagaaatatagaaaaggatttggaaggatgtacaagtaagcaatgatgatactattgaggaaatggaggcctgcctagaactgaggcttaggtgtggtgagaactatggccttatcccgatgttccagtattttaaaggagaatttgtctgggtatttcttcttttttacttgtggtaaaaagcataaagttaaatttactgtcttaactctttttaaatgcatagttcagtagtgtcaagtattttcacattgttactcaagagatgtctaaaattatttcatgttgcaaaactgaaactctatacttattaaacagtaacttccatcatctttcccccagcccttggcaaccacccttctactttttgtttctgtgatttttctccaccttaggtacttcatataaagtggaatcttacagtatttgtacttttgtgactggcttatttcagttactataatctccttaaggttcatccatgttagagcatgtgacaagacttccttcttttgaaggctgaataatattccattgtatgtatataccatattttccttatctgtttgtctgttgaagacactgggttgctttccctttttggctattgtgaataatgctatagcattattatacaaatatctctttgagatcctgctttaaactcttcatatacacatttagaagtaggcttgctggatcctgtggtgattctatttttaatttcttgaggaaccccaatactgttttccataatgactgttccattttacattcccaccaatagtgcacaaagattccagtttctcagcatgctcaccaatacttgttattttttgttcttttgatagtggccaacctaacggatgcgaagtggtatctcgttgtggttttaaactgcatttccctaataatgaatgatgttgagcatcttctcattcaatagtcataaacaatagtgcttattgactattcatgtatcttctttggagaaatgcctattcacagccttgacccatttgtcaattgggttatttattgtcttgttgagttgtaggagttcctcaaatattctggatattaactccttataagatatatgatttacaaatatttattctcattccataggttgccttttcactttggtcattgcttcctttgacttgaagaaatttttaactttatatagtcctgtttgtctgcttttgctttagttgcctgtcctgttggtgtcatagtcgataaatcatctctcctttttccttaattagtcagtaaaattttgttaattttgtttatcttttcaaaaaaccaattcttggtttcattgatttttttctattgtttttctattctctattacatttatctctgctctaatcattattattttcttcattttgctaatcttaggtttagtctgttcttctttctttatttccttgagttttaagttaaattatggatttaaaatctttcttcttttataacataagtatttaccattataaacttgcctcttagtattgctttagttgtacctcatgcattttggtatattatgttttcatttcatttgtttccagatgtactttaaatttctgttttattttgtctttgacctatttgctgtttaagagtgagttgttaagcttccacaggtttttcgattttcatattttccttctacttttgatttctagttttattccactgtagtgaggaagatattttatatgacttcaatcttttgaaatgttttaatacttcatggcctaatatgtggtctatcttagagaatgttctatgtgtgcttgagaagaatatctattcttctgttgcatcatagggtgaactgttctgtgtatgtctgttaggtaaagtgatctatgctgtggttcacgtcttctgtttccttattgaacttctgtctggttgttctatccataactgaaagtcagatagtgaagtcgcctaccattattgtgttgctgtttatttctcccttcagttctaagtttgctccatatttttgggagctctaatgtgaggtgggtatatatttatgattgttgtatcttcctggtgagttgacgttgttatcattatatattgtcctttgtttcttctcacagtttttgtcttaaagtctattttgtctgatgtaaatatggctgtttcttttcacttcaggttctcatttgcatggaatatctttttccatccgttcaatttcagcctgtgttcttatatctaaagtgagtctcttgtaaagagcatgtagttgaatcctgggttttatccattcaatcaaccgttgtattttaataggagagattaaccagtttgcctttaaaataattattgacaggaaaggacttactattgccattttgttaattgctttcagtatgtggtagactttttgtctctttttccctgtgtctttgatgctgtagcaagtcatgatactgggacactgcctaggatctgtctgttgacactctatcttctctggtgctagactaagacccagtgatctactttgttatcagtggtcccctcctgagacccattcatgtcagagcttagattcaggcaagataaaaatcattcccttgggcagccccttagaagtcagaagttagtggatatgttccactcttttctttctctttccagggagaaggcaggagttgggagttttctcccaatggcactgtgctttgccagacggaggatctgtggcatgtaaaggccatgcattttcctactgtctttgatatggttgattttggctacatgctcaccttgggtacagaaacacgttaactaagtttgggattgctcacaaagaaaatgttctgtgtattgttttcaattccatatctctatggaggaaggagggcctgggacttcctattttgctcccttgttggcatcagtccctctatttatgtatgtcttgaataattaaaaactaatttttaaataaatactagtagtcacaaataactctaatgaaaacttatgatctagattaattgaacaactatgtatgtatattctactgcataaaatccttctggaaagataagcctgaatttcttcaaggacacaatgagggtataactcttgctaatttatctttaatgtcctttcctgttgtaatcctgtataagattaaaaagcttatgctaggttaagtagtcagaaatctaaagaaacagactgaatcaaacaattttacctgtacaaaatggttatctctaatttgtgttttttaaaaccttgatctaatttttatttttttcaatgttctaaaataggtgttacttttacaataccaaacacagttataaaaccagacaataaatagattagtttatactcagtagttgattatgattgtgtttttattacacttttttttatttctcaggcaatggtacaaaataaccgcatagagcttctcaatcatcctgtgtgtaaagaatatttactcatgaaatggtgggtattgagtagtatttcttgtttaatgctgtgtctattggatctattacaaagccttcaaaacaattatattgtaatggtattttaatgttttagcttttgttattttaatgtttttactttgaagaaataagtaaggcaaatgccctagaacttaaagtataataataataaaataaagtgaaaaagaccaaataaaaagaagttaaggttaaaaaaaatgctggcattgtttatccttatcattaaataaaatatttgcagggtgggagggaattattatataagacatgaagaagctctttagagcctaaaatttatctttaacattaaatgaaatatttgggggcatggaaaggatcattgtatagaacatgtagaaatatcctggaccctgaaatttagctgacaatgaagaaagaggtgtgttctaggaagagcactcatattgccgacagattatatgggctaacatcctggctctttcattaatttgttaagtcgtaatttgcttagaacttgaggttccttctctgaaaatgaaaaaggtgaattagaagatttacttgatcttaagcttcagtgaatttaccaacaaggtttctgaaagaggttataaccattttttccccaggtatcttaagtaaatatttttgtttgaaatgactcaattctggtttgcttatatttttgtaggttggcttatggatttagagctcatatgatgaatttaggatcttactgtcttggtctcatacctatgaccattctcgttgtcaatataaaaccaggaatggctttcaactcaactggcatcatcaatgaaactagtgatcattcagaaatactagataccacggtaatttcaaattttaactttctaaaataaaggattataaaaaatgtattttttcttaagactactaaacccataataaatctgacatatcaggactttattataaatagcctgtaagaatttgtatacagtaataatttctcctaaaatcctttgtggaaggagagggaatataaacaaacaggtcaactaatgagtttgtaaactaatttaaaaagaattgacatgtgttagatgctagcttaaatactgaagtgtaaaactttaaaataggtgtacaagaaagcagatttgtagttgccagggactgtgggacatgggaaatggggagagatgctttatggatatgtggtttccatccaagatgatgaaaaagttatggaactagataacggtgatggtggtataacactgtgaatatacttaatgccactgaattatatattttaaaatgtacatgtaaaatgtaacttttaaaatggtaagttttgttatatgtattttgccacaataaataattttatattggcctacagattcatattcttttttaattcaattagcaatttttgaacttcacttaataaggacattcctaaatgagggtgtgttcatctctagtaaattatatgagtattggtgtcagttaaattttctgtttaactcaaagtggacagtatatagaaattaagcaaaaaaaaaagaaaaaagaaatttaatagtgaaaattatggaaatgttaaagtgttttatatctctcataactatgtgtcttatccttttttgttttagaattcatatctaataaaaacttgtatgattttagtgtttttatcaagtatatttgggtattgcaaagaagcggggcaaattttccaacaggtatgtaatacattttgtatctctaaagttgcacatattttcatatgcagaacataagttaattgataagctattacttgagatattatgtcataataaaattacatagcttgactaccatatagattagaaacaccaagcataaatgtttcaaaatgtagaaatcacatgattttaggtaaggtccctgcctatttgatatatctatgaaagagatgttccacttttactggtccttaaacatctaactacaaatggtcattatgagtgaactttcttttctcttacatagttttaaagattttgctaacataatggttacattttgaacttgataattttaaatgtaaatgtttataaagaagttatctggcccaagactccatttcaaatgggtctttctttgaattccttttctaacagaaatacttttttgattaaataaaattccaagttttaatacaattttggaactttttacagcaaaatttttactttatattccactttttaaataagtgagccaagttcagatcagaaccaagtgtataaattatctgcaggtcctacctttggttgataaatggcaaaagttgatccttcttttctcagtatggaggttgaaagtctttataatttttttgtatatgttcatgaatattatttttataaatcatatgtcttttatacaacacctcactttctgtgaaaattttctttgttgcatcacgtaagcacatagatatttgcatttataaatttgataataatggtttgcattttttaaatattatacattgcaagtactttcatataggtacattaagaaatttgtcacaattctgatagactgtaatgttgcattttaccttaaacgatttaaggcacattacttaatctttcttgccattattttcattttccagaaatgaaaattgcagattatagtttaaattgagctataaagttatatgaattctctatcagatttgatctccacattttcttattgatatttaagtggcctactctataggaaatttaatgaccaatacataaaaagtttgaaaataccattattatttgtttttatttcctaattaagtctcagtgcatgtcccaaacctttttagaaacaactttagttcataaagagagctccacattcatgttgttatacggatagaaaggccccaggaattactgaaccaacttgcagtccccaagaagttttcttaagatggagtggactccacagggaaagcccagcaatttgtaggatttccttaggcgtcggattcccataacaccaggttaacagagggctctgggccatctccaacaccgattcataccccggggactctgaagtcaatccaggatggcgtgaggttactccttggtcctaaacttctccccagctggctgcaaagctagaaaaattgtattacggggtgcatgtatataaccatccatagatgctaggtctctatatgtggtaattttttattcttttctatcccagaaaaggaattattttatggatataagcaatgttcttgaatggattatctacacgacgggcatcatttttgtgctgcccttgtttgttgaaataccagctcatctgcagtggcaatgtggagcaattgctgtttacttctattggatgaatttcttattgtatcttcaaaggtaaaacaagcttgaattatttccacatcctttaagcatttttaatatcaaaagaaaaactattgtacctggtgtaaatttaaaactggcttattccttttccagttgtttcaaaatatgaagaatttttgtataccctattaaggaaaggctggagcatggttccagagttcagaatgaagatcagggtttctcacacttggcactattgaactttgtagccagataattcttttttcttcttcttcttcttcttctttttttttttttttttttttttttgtggagggggactgtcttgtatatcgtaaattgcttagcagcattcctggctcctggcttctacccactagataccagtagcatccaccccagtccagttatgacaaccaaaaatgaatgcagacaatgccagatgttccctgtgtgccaaatgagcccaggtcaagaacactggtctagacaaatctggactaaacagggggagtaaatattaaaagtattggctattcttgttttacctgatattattttgtaagcatttactttgaattaaaacactcaaaatgaactgatggatagtatggggaattgaagtggtataaaagaaaaaataagcccaaagaatctaattctagacagggaaaaaagcctgagttcccgggcctctgacagttggtaatgttgagtttcatgttatttcacataatctttccaataacaaggccaatgttattatctgcattctctaaaagaagaagctgaagcactgatttcagtaacttgctgaagatctcagctagtcagtcaggatacaggtatttacccaaagtctttctgactccaggaagcatgtttttttcaccatatatcttctgcattgctgtgtcataagcacagtgatagagttgagtgccgccccttggagagtacgtggtatggtgagaaaggcagtggcccagaaataggatttaagacaggttcaggcactgtcacacccttggctctgtcattattagtggccttgctgagtcactatatatgtctctgtgaatttcgctgaagtccctttcagctttagaatcttgtaagttcctcatttaataagtcatctttgtcaaaggcagactacaagttagaggccagatgacacacccattatctatccaaacatttcacaatataggatgcagggggtagaaaagaaaaccgaaggagatggtgaggataaaatgcaaatcatgtagtgtgtgccctgcattaggtgacttccagttcacaaactcagtctctgcatgatgcagcacacaatttatctctctaatttctttattaagcatttggcagcattttctttgatattgagaagctattatttttctctcctacttcagttgaagtaatgtccagttgtcaagtggtaaaatgatttaaggtaacattagggccgggcacagtgactcacgcctacaatcctagcactttgggaagccgaggcaggctgatgcttgagcccagcagttcacgatcagcctgggggtgatgcctgcctgtggtcccggctactcgggaagctgaggcagaaggatcacctgagcctgggacgtcaaggctgcagtgagcaatgattgccccactgcactccagcttgggtgacaaagcaagaccctgtatccaaaaaatagataacattaataatgagaataaaagcaaaagtaatttgactaacagcttgaaaattaagacatgattattcaattaattcttatgttttctttttcaaaataactggcctcagtgatctcatctgtgaaatctaatacctggtttaatacatgataaatattgtcactgaatgaatacactttgactataaaagtgagtaaatttttttttttttacttttctagatttgaaaattgtggaatttttattgttatgttggaggtaattttgaaaactttgttgaggtctacagttgtatttatcttccttcttctggcttttggactcagcttttacatcctcctgaatttacaggtaagacagttacatcagtagttgattttgtcgctgtgaattatggaaatatatatttatatttaaatctaaatagtctagaaaatgcataattacataacaacagtattcaaatactttagtttttatctcctatatctttcaaatgacgtttattgcagaaaaaagtatagtcgtgttaagcaactttgtccattgtcaaaaagtttatgtacaacacagatgatttattatttatgcagataacatatttttgatgactttaccatgtttactatattttatcactgcatttcaacagctatatgcctatgactttaaaaaagtattctgaatatagtttttatcattctacctccaggaaacactttttcattgtagaaactttgcatttcatttgtacctcaccgtctgctttcaggatcccttcagctctccattgctttctataatccagaccttcagcatgatgctaggagatatcaattatcgagagtccttcctagaaccatatctgagaaatgaattggcacatccagttctgtcctttgcacaacttgtttccttcacaatatttgtcccaattgtcctcatgaatttacttgtaagtagttttttcttatattttctgtttgttgatcatttgaaacattttataatgataatcatttttaacttctttaatcttcctccactggggagatcaggaaggatctactacaaaatctattcgttcaacactcacttggtgcctggggagcaccaggcacatcaagaggctcagggcgtgcaaagatgcatgcacttggcaaataccaaggatctaccaaatgccagcaactgttacaagttctaggaaccagtgatgaagaaagcagaccaatattcagtctcagtgtgattacaaacagtcaggaatttaggtaataaataactgtgtagcataatgtcatggggttgataaatgctatgaagaaataagaagcagggaaaggcaataaagatgaaggtgtgtgatgttttggagttggagagggggtcagagtttaggcagagacctttatggaacatatctctatgctcgaacttaccattgaccagagattcaagtggggaagtctctcatgcagagggcatctgcgacgttcagatgccgccttgaacccagtcaaagcctagacactatcagcagacattagagtgcccttccacatggaattctctacagaatctgctcaaggcatgagcacgttggctgatgcaggcaaaggtgcatcccattccaggtccatggggagcccttattggcatcgttgtgcctgtttttcctttatccatttatgcacgcatgcacatattccacacaatttctctgagtctgactatgtaccagagactgtactaggcagtgcttttggaaaggaaaaaaaattatgcagatgtgtgagtattttgattcaattatttgatacatctccagagttttattttggtgacctagaaaaagaaaggatggcaataggaataacggagaatgacataaagcccacattgttctccaataattgtttatgctttggaagataattatccagaagagaattgggcttagcagtagtacaggttggccccattctgaagatccaaacatccagcgcccgctgtgcatctctacctggatatcctggaggaaaatcaaaaccaacagagccaagactaatgttatctttccttcagaatctccactgcctctcagtagaatctcctagtcatcctactaagatcattggcagatagtctctatttcactctcccacgtttttcctcagttctttcaataattctttggctgtcacatctgcttccggttggcttggactgccatagttcctcatccaaattgctgcagcagcctcaagagcatctctatcgtatcacactgctttgtctaatttttcctacaaatggccaccatagtgatgctctgctaatgaaaaactgaacacatcagtggcttttaaaaatattttccatgcctcttcaaaagctttaattcagtccaaacccatcagcatagcaagcaaaggtccctgtgagctggatcttaccaagatctttcccaacgcctcactgttcccaggatttacccagaaatgcacactccatgattgtgccacactttccttcatgctgcctagactctgtacaggctcttccttttgcctgaaaaacgtcccaccatgggttagctctaagatttcaaaactcagctgaagtatcatttcttcaggtcagacttccttaaccaccacccctctccaattaactaactctattggatgttctttccttgtgttaccatagttttgaggatacaaacatttaataataataaaacctacttcctagattattgtatagattaaatgagctaatacaagggacttaaaatagtacttggcacatgataagcatttgataaatgttagtgaccatcaaaagttaataattcatctcttctatggcttataagctcaaatgtcttcagagcccaaaaatgtatctaaaatatgtgaagcagcaggtatgaaatggttagttttggggttagtttttgttgtttgtttgttttttgtttttttgttttttttttgtttttttgttttttttgagataggatctcattctgtgacccaggctagagtgcagtggagtgatcatggctcactgcagcctccacttcccagtctcagctgatcctcccacctcagcctacccagaagctgtaactacaggtgctcaccaccacacccagctaatttttgtatttctgtagagatggggttttgccattttgcccaggctggtctggaactcctaggctcaagtgatcctcccacctcagcctccccaatttctgggattacagatgtaaaatgctgcgcctggcagagatggttggttttgatgggggtcaatgtaaattggagagaacacccatctgaacacttgcaaattaaaaaccaaaacaatattatcctgtccagtgaaacctatttcctgactatatccagttctcagtgctagttttcaagccctagaatatattctccctgtcttcattcattctgtgactgttttgtttacctattatgtaccctgctctatactaagcactgggcatacagtggagaccttgacagatcccttgtctcatagagcttactggactttgagctccccaagagcagtcactgacttttctttctggtgcagcatgcaagatgctggctcagcaaaggcaggaactaagtaccagaaaataaatggatgagtgaaatgagctaatttcatcagactgagtagaactgagctaacagcttccccccagctaattctatctagccataaatttctggtttctcaccagagcctctcctgcccctatagtatatgttttccttctgaacatatgtaagatataaaatgtatcattctctcagtttagtatttgtttccatgttgttaaatcactcttgtctaccttagttactaaactcctggagtttcccaccatgttgtgtggccacacccaattgcatgtgatatcacatcatccctctcatttaaaaaaaacagatttttatcttaaatgaaatgaattttggattaatttgtatgtcttaagttttcataacacttaagagtactgaacctctgaatgtggccatcatcgttgcagaggtatataggccttgtagttttctgtaaggtgtattaccaaagtattctgcagctactactagtagattatatgcccagtctcccactttagccacagaggccttgctatgatttcaatttttatgtcccatccaaaatgtatgtatagaaacctaatcaccaagaagatggcattagaaggtggggcctttgggaggtgattaggccatgaggggagagccctcatgaatggaattagttcccttataaaagagctatgagggagcttattagctcctttgcctttctgccatatgggaacacatagaaggtgccacctatgaggaatgggttcttaccagaaaccagttctgcccgagtctttattttggacttcccagcctgcagaaccataagcaattaacttatgctatttatacactacccagactaaaatattttgtcacagcagtctgaatggactaagacagaccttacatgcatttttaggtggaccattcaactgtagtgatttaattttgtgtcatacttcagattggtttggcagttggcgacattgctgaggtccagaaacatgcatcattgaagaggatagctatgcaggtaagtgcagtgcctccccacttattacagtgttatcttctggtaaacccacaataagttaaaaatattacaagtcaaaaatgggcattttgtaggaatatgccagttataaatttatactacttacactgtaaagtatgtgccatttaccctcctgatcatgtggctgactgggttctgttcctcgctgccactgcccggcatcccaggagaataccacatactgctagcccagaacagatcaaagtttaaaatttgaagtacagattctactgaatatgcatcactttcacacatcataaagtcaaaaatcatgagtcaaaccaacctaagttaggtattgtctgcatcacgtttatttaaacttactggaattaacaccattatcgttacttccttttttaagagcacagttacttagcatggataccttcttaatcctgaggagtcacatcctgtgtctgtttgcatgttacctggtatacctgctctaatcaaagttgatacaaaaaaatgtccgagaacaatcttagagaaattgagaaattgcctgagcatcttttgttatgttaaaatgtggccacccaggtagctagctgcttgatcaagagcatcactggcatcctagccccgctgttcaaaggagctccttatattttgtgcagggaatcacagggtccccacagcatgatttatgttgaagttttaactgcatccatgaggttttgttctcttgtgacatctctctcatttttatagacaatttgatgtaaaatttggtgtcaaagtttcctggctaggtatttggctattgaatcttgtgaggtgccttcctgtcatacaacacaaagttatttttatgctcttcactggattgtctttaaatttcaaattcacatgggcacttttgatgcttcgaggatatttggtgaccagttgactatacgcattcagaaactttggccagtttgagagagagaaaaatcatgttatgatataactttctattcactcttgtctcctcttcacttttatttgtccaaattctttcttctctgttattcattcagccacacactaacatttatttattgaaaacaatgtttcaatacatagtatgtacaaagtccagtacaacttatcatgagagcccagaggaaacagagggatgtgatccctgactattaagtcaactatgcctacttagcacaccagctaggtattcatagaattaaatatcaaaaatcaactgagaaccattcataaattctatgttctatgacatggctgtatattatacagagacacagagcgattggaacacttagagaacaaacacaggatcaggtacaggaaaaaatgcaaaaataattaagagaatgcaacatggagggggtgagatgagtcagtgttgaaagatggttgggatttaacaggacatcgataccgtcgtgaaaggaggggccagcaagagcaaagggccacatcagaaccagggaaaatggccaaggcactggcccaaggcccctttgcctggaaggatcattcatgttagtgggtgattagattgctgcagatgataggggggtttattcaaaaccagcaaagaaaaaccttagcaaagggcactaaatgatgaagtgcttcaagttattttgtaagttagtggagagttattatcagcccttctgcaatgaaaatggtgtttatagtgatctgttattatcttggtttagtgaggaaagattgaaggcaggaaaagctaatggcaggttattactgtcacaaagatggtgtttaggactccaggtgtatggatatggagaggagatgtataaacctcttggcaggtatgtcagcaatacctcataactgccctaacagctctttaaaataccctggggaatagataaaaacaataatacaagcaaaattggggaagcttactgaactaaagtgtcagtggggttgagctgaaaagcacaaacctatattgtttactatgctccctgacagtcaatggcacaaatcctagtaccccccatattttctatgccttgttttggatcaaaaacagcatcgcctggaaaaccgggaagccattctcctacttctcctgagttgtttcttaagcaactctctgcatccattctgaaacctatgtctgagcccatggcagaactgtgagcagaactggacaagtagcacacatttctgacagggccatttagttctctcatagaatcatctcgaagggaagtggagacaggccttgggacaatgcatgctgggagatgggttctttatggggactgtcagttcttcaggggcaggtgttatgagtattttgaggggcttgaagctgtttgggtatttttaaatgttggtatctccactttccaccacagttttggcagctgcagacagtccataaacatttatatctccactgcaaattagaaagggaaatccgcagcgtgcatcttacccttcaacatggaaaccccaccagttagaggaggtaaagatgctccctgagcccagtggtgccaggctcagtgggtcccacctgacccacactggacttggggctttgcttgccaacctcccccaggaccatctttgagggacctatgtagataatgaacagtgtaagacacactatgtattttatctgttggcaaacattgagcttgagtaaatctttttcaatcaagtgtgaggaaatagtatgtgacctctaaaactatatgtatgggaagaggaaagtgatatcaccctaaagagcaaaggggaaaaaaggaaccctagaaattattatagaaaatcagtgaaaatatttaactggtattattaataaaatacaagaaaacatagcttttcttgaagctggaactaatgcacagtatgttaaatggtgataagtgctataaaaatagcaaggaagccacatgggggaaagtcatttgggggacagtgagggggccacaattttaagcagtggtgtcaggaaagttcttaccatttcactatttatggctataaatcactaatattggaaagtatttgttcttagaaagcaaatctcactagtagttacaagtagttacagtaaacatacctatacatcagatacaaaggggtgtaaaaaagcagagataaatttggcaaaaataaatgaaaaaaattaaatgtgaggaaatatctcatttgctatccctgaaaatagtaattatacttaaaattcatcatagagaaaccattttgcacctgatagcacagacatgagaaatgcatgacatactcttaagcatgagagttctaattcttttactgcttacctttgtcttcctccagttaagcactccttcttctctcctgccctagatgtgtatacatgtgtgcacgtgcacacacgcattcacactgtccagttgtgcacattttgtagtattgcaacaccgcaagagtatgaactacccttttcttctttaaatctccagcattgaacaataaaacatcgggtgactatccctgaacaataaacagcaagtgactaaaattgaattccttttttaagcaacttccccctctccttcttctcccactccaaggcagattgctgccctgtcagtgggtgaggtgagaggaaggggcaggtgactgtgagctaggggataagaaagcctggccagcccagctgtggcacagaagtcaggacatagaaatcagttttcattttgctgtattaatgattgcctctgtgccatataaaaattccatatactaactaatgattctatcaataaatccaaaatgcactttaggtggaacttcataccagcttagagaagaagctgccactttggtttctacgcaaagtggatcagaaatccaccatcgtgtatcccaacaaacccagatctggtgggatgttattcgtaagtacacataacaaataacaacatcagtaacatgacactgtttgacattcattcattgtgttaaccctaagggggcccttttatagactttgagtcttctctgcctgtgggcagaggagttgtgcttttaaaaaaaggatatgattaaaccaagacatgaaagagctgggtgagaggagggtgacgtttgctctcccctttcaggtggttcatccatagcatctgtgttaaatgcgtgctgtccctgtgagagcagatgggcaggggaccagccacacccttttagtgtcttttttacagtacaggtatactttatttgcttttcctagtcacatgtcacttacatttatgtgtagatatatatgtgagtatatacagccaagggtttagaatacacaataaagaacacacatttacacatacacacactatacatacaatgtattaatccattttcacactgctataaagaactgcccgagactgggtagcttataaaggaaagaggtttaattgactcacagttctgcatggctgaggaggcctcaggaaacttgcaatcatggtggaaggtgaaggggaagcaaggcaccttcttcacaggcagcaggaaggagaacgaacgcatgaggaacaaccaaacaattataaaaccaccggatctcatgagaactcacttactatcacaagaacagcatgggggaaaccgcccctatgatacaattacctccacccagtctttcccttgacacgtggggattatggggattataatgcaagatgagatttgggtggggacacaaagcctaaacatagcacgcacacacacacacacacacacacacacacacgaacacacacacacagcatccactatagaaaatgaggtaattaagtgatcaaagactaagcaagacaattgcattataatggaagaagggccatatgaagagccagaataacaggttgctaatccttagtatgcctgggctcccttcatctctacgactgttcttcctgagttcttttcaggttaatttcccctgtgtagtcataaaataataaagtcaccctgagtatcagtctaggctttattctaacgccacagtatctctccaactgatttcacacatgtccatggttaaaattactaccgaaacagaatgctcagcaactgatttctcaatcctagagctcactcttcagttcccggaccctgtatccagctgcctacttgacatctccacttgcatgttttaaaggtgcctcacattcagcaggttcaaaaccaaacttcaatgctttcacgtttcaccctctcctgacatatcccctacaggaaaaaatgaaaaagtcctggttcctccttgcaacaatgtcagcacaattcattagcctgtgcaatccagccacccaggagtcatccttgatctgtcccctccctttcattctcccctcagtctggtccatttgacttcctggatggcctgtgcaagtcaccattttctcttgcctgaactcctagaattacctcattcttgatcatttcacacctgcccttgaccctctccagtcaacctatggtttaaaagatactaaattaaaatgaaatgtgttaaaataacatttctgaaatttctccaggtgaaactttgttgattggttgagttgtattggataatgtgcagtacagttttagataattaacaatgaatctcgtatagaataccaccttccgtgatgggcatttctcatgaaaatatatagaacaattcagctaagcctcattctaaacaatttctgtcctaatttactcctcttctgttttatctgtacatgttttatttctctctgattatatgtatgacttcctttcacagctctttcttcacatgtctctttctcctagcagattgtgggttccttgagggcatagctatgccttatgcatattggtaccagtggtggttgaattttggcacatgcttaagaaaaagttcctgaattgaattcaatttgagtaactactattttttatccgacagcatatattctgttttttattttgcactggggaaataagacaagaaataccaaatgctgataaatctttagaaatggaaatattaaagcagaaataccggtatgtatttttccttctatctgtacttgagaaatttaaaactcataaataataatgcacaatgtaagattatattttatattgatgtttttgttttatatattatcttgctttattgatagctgtagctagtgtattgagagtcatgagacattttttagaaccaacaacatatttgccactattcaccaatcagtttgccttccaatcataagtgaataaaaattaaaatgctgatttcctttctcttggaggtagtatcataaactgtattcttcatctgaattcataaagcaaagctctgaaagcttctgaagatccctggagtaactatgtggtgggcagtcattaagcatgagggttttacagttagttagtacctgagttcaaacccctattcaactaggtacgtaataactgtgaccctgggcaatctgcttaacctttctctataatagtttcttacctataaactgggaacaaaaataaactagccatgaactaacagtgtaactttgggaaaaatcatttaaacttcaaaaatacatgtttcctggaaggattgtgactaccgaggttaaaacctatgcgttcctacattcagaagggaccgaggttaaaacctatgccttcctacattcagaagggctaaaagaagaactgaaaataaattcatgaaatgtgtatgtccttttaggctgaaggatcttacttttctcctggaaaaacagcatgagctcattaaactgatcattcagaagatggagatcatctctgagacagaggatgatgatagccattgttcttttcaagacaggtttaagaaagagcagatggaacaaaggaatagcagatggaatactgtgttgagagcagtcaaggcaaaaacacaccatcttgagccttagctcctcagaccttcagtgaggcttctaatggggggtgcatgacttgctggttctaactttcaatttaaaaagagtgaggaagaagcagaatgattcattttgctgcgtgtgaaatcatggttcctgcatgctgtataaaagtaaaccatcttttatcctctattcatattttctaccaatcactatgtattggggatatctttgcagatatgttcaaattggactggactttgatgagatataatctcattatttgaatgggtagaaaatgaatttgctagaacacacatttttaatgaaaagaagtaataaatgtaactattaagctaaaatgcaaatgtcagtactgaattcctgcttgttaattacataatatgtgatgctctagaaaatagtcacaagtattaataatgccttagatgatagtcttaaatattaggttgaggtctacctaacctaagctgcttcctggaaagcttcatgttgaaagaacctatgggtggcaccatgtggacttttctgtccctactgtgatgaatagccccacccttcttgctgtccccaacacacctgatgtcactttgagccatatagttgaagtacaaattaataggccttatgatatgcacgaattttactatagataatatatgttgtttctggttttgtttgccaatgagcataataaatgtaaaacctatatagtatccctgtgattattgtatgagcctttgtttgagatttgaaaacaacatggctccatcacatattcccttttttcttttgatgtctactcaaatcatgaattaatcacatacctcatcattaatcttttcaaggtccttctattgttttgtctgattttctccatcatcctgattagcatgtttattccctcactacccccaggagatattcactgtaatgaatatgtctttggctatgtatgtgtccttgtgttatgttgtacagtgttgttttgagtctgttattatttacacagatgttattatgctatagcttctatttctgtttttgcttcttatttctcttataattctcacttatttcctattttttctactcatttctatttgttactcctttttactggacatgatgtttacaagatacaactgtgttactgtattccatctagtacggggcctttggtgtggcttactatttcattgtgtgcacccacccacccaccacactggacttttctagagatggacagcttggttacctccaccttcctgcactcattctcaaacatactgatgttcatacaaaccagcagagtgctgagggacgatatgtactattacaaaaccagacacttttacattcatggtccaacagatcacatggcctagaggcaatgttgcatataccttaatctttgatatgaataatatctttgttctttatatttcttaaaacagaaagggtggaaaatcactatacagaagcaatatccaaagatctcctgatcataaagacaaggggtcttttcagtcttccctctcctcaaaccttgtgtagcattgcacaatatagatctcagtcaacattcactgagtgccaagaatgtgagaaacactgtaccatgcctgtcatgcgaaatatttaaataaacagattgtcttacaacaatgtcaccaacctgtactctcaagaagcttacaatttagtggtgttcatttatttctgcagttctttctcctttacccccaaacacagaactgcttttccactgtttccactgattgctgcttctctctttctcgactggcttctctttcctgccaactaactccatgtgtacatccctgaggtctgtacctggctctgtttcctctctttcctcacttctgctccttctcctaaagtccagtccaacatttctacagttcttcaaattaaatacatagaaacctgaatttggtggtaagagaaacaaaccaactcctctggacttcctatttcccatcagtggtaccaggattctctcaagctcctagactcgaaaggactcaacatactaagttgagttaatcttcctaaagtggagctctaagccttcacacccatctaaaaagcttaaagattttctctttcttcataagcaaactaatcctcttaacctgccttctcaatctaaattagctttatcttccagcattcttcatttcatccaaattggaagaccattgtttcatgaagacactatgttttcccatctccctacagccaactctattctcttccagccagaatgtcccctctctaactcttaaagctcagtttaaatggcatctccaccttgaagtattttcctaatggtccccactcattatgcttcctgcctcctcggaactggcacagactgcacttctcctctgctactgcagcctattatggtgactatgacttgccacgtgtcctcccctaactaaagggtagactccccgagctttatgggtcattatcaccagtagtctcaaaggaggcaaagaattacatcctatttcatttttttttcattttgtggagcttccagcactgtgccttgcacataacagatgctcaacaaatacaaatacacaaataagagaaatcagtgaaaataataaataccatggacctgaaagagactgcaagaaaactggctcagtttgcctcagaaaagtggtttagtgtcctttttctgttgatactgtgtcctagagaagttaaatgacttgcctctaagtggtggaagaagcattaaacaccactttcctgcctttttattcccaccagttcaatctgggctgttgttttaatgatcgttaactatgattagcatggacaattgaaaggtttgtgttttgcaggaagacaacttgtgccttcgtactgactctaattcctgttggttgagtgactctgggcatatgtcctcctctctaaaatgatgatgatagaatatattctttatggt

SEQ ID NO: 672 - DNA, 45365 bp, Homo sapiens
attttacttgcagtgtgggcagctggactggagtggagaagtaggtaggcctggcgcttctctgccagggtataaattctggctctgccacctaccagttgttataactttgaataagttactcagtgtctctctgccttataggatttgttgtgagaactaaatgttaggtgcttggaacagcatttggcacatacttagactcagtatatcttagttgttgttatttgtaagatattagggattaaaaagtgaacaaggaagcataatccttgtactggaggaactgacaacatagccaagtatagagtgtgggaaatagtatgatgaggaagcatttcaggatggtatgacagctaggaagaggggctgggcatggtggctcaggcctgcaatcctagcactttgggaggtggaggcgagtggatcacttgagctcaggagttcgagagcagcctgggcaacatggtgaaagcccatctctacaaataaaaaaattaactgggtatggtggcacacatctgtacttccagctatttggggggctgaggcaggaggatgcttgagcccaagaggtggaggtcactgtgaggtgagctgagatcacgccattgcattccagctgggtggcagtgtgacgcgctctttaaaaaaaaaaaaaaaaaactaggaagaggtgcgttcaacccagggaagggtcatgggaggctgcctagaggaagtcgcaggcaagctgaggaggcagagagagcagcctgaatcaaagtccagagatgataaagagcctggttattttcagaagccaaaaggaaggcaagagaaatacctgagcacacattgagacaaggccaggcattgtgactcgaggctcaggccactgtgttggaccttcagctcagtggttcctgcttctcctgttgtttgtctggctgatctctgctcacccatcaagtattagcctaaatgccacttcctccaggatgtcttcccggaacccaagcttcccacagtttatgtcttcttgctgcaggaaccattggtacttttagtgctttttgcactttattgttaatgctagattgttgctcttcccctctatgaatgcctatacaagtgtatttcatagcatttatttactaacacataaccattagtatgctcaggtcataagtgggataacagaggcagagggagaatctaggagtttcagggacaggattttccataaccattctaacatgggctctagtccacaaccaggccagactccagctgctgttccagagccccctgggcagggctatcgcaggaaacactgctcaaagacaaagctcatctctgatgagctggaattatattatatgacagccggaaggtactgagaactaaatcagtctgttcaacctcccacctgtgcagttttaccctgtgcctccctggcagggagagaagagaagaggcccatgactggctcctacaggtatgccctcttcctcctcaccttctcctctgctccccacctagaaaggtagactgtctgcccaggcccagcacaaggtgtcagtgatccatgcctgaaggatggcagtgaccacaactacacacatgcacctttccagggatccagagtgtgcagttgataggacattacaggttggggggcacagaaatacttttctcgtttgatactgtaggggccttgggaaacggttccttccacctactaaaggtttgcggatgatgagctgacaaagggtagattaataggagaaaaaggcacacaaaacatttaatgtgtatgtggacatagaagccatacacaatgtataagactcaaaaaggggccagatagttgagacttaagtagtgtctttgtaggggaaagacatatggacccaggacaagatattttatgaatgattctctttgggagctgaatgagacaagttaggagaaggtgaggggtggaactgcagaggaacaaaggttgtcttactatgcagatgaagtcccccagttgacagctggaaggtactgagaaccaaatcagcctgttttacacttgcctccctggcaggtagagaagagaaatcttccactgggggacttgtattgtattgtattgtagtattttttaatttcaataggttttgggggaacaggtggtgtttggttacatgaataagttctttagtggtgatttctgagatttcagtgcacccatcatctgagtagtgtacactgtacccaatgtgttgtgttttgtctttcaccccccttccaccctgtcccccgagtgcccaaattccattctatcattcttctgcctttgtgtcctcatagcttagctcctacttataagtgagaacatatgatgtttcattttccattttttagttacttcacttagaataatggtctccagttccatccaagttgctgcaaatgttattattttattgctctttttttttttctttgagatagagtctccctctgtcacccaggctggaatgcagtggcacaatctcagctcactgcaacccctgcctcctgggttcaagcaattctcctgtctcagcctcccaagtagcggggactacaggcacatgccatcacacctggctaatttttgcatttttagtggacgtggggtttcagcatattggtcaggctggtcttaaactcctgaactcaggcgatccacctgccttggcctcccaaagtgttgggattacaggcaagagtgtatatatacatatatatatatacacacacacacacacatacacacatccaggagtgagattgctggatcagatgatagatctactttcagttctttaaggaatctccatactgttttccctagtggttgtaatattttacattcccaccaaccgggtaaaagtgttccctttttaccacatccatgccaacatctatttttttatttttttattgtggccgttcttgcaggagtatcacattgtggtttcgatttgcatttccctgataattagtgatgttgagcatttttttcatctatttgttggccatttgtatatcttcttttggaattgtctagtcatatccttagcccactctctgatgggatttttttttttcttgctgatttatttgagttccttgtatattgtggatattagtcctttgttggatgtatagattgcaaagattttctcccactctgggttgtctgttaactatgctgattatttctttagctgtgcagaagcttttttttgtttaattagatgaaaagtctctgtggatgtggcaacaactcccagtctcttctcccctggttgattttttttttttcttggttatttgatgagatggatcttaagacaattggatttcttttgggcagaacatttttcttttcttaagatagagtctccatctgtcaccaggctagagtatggtggcatgatcataggtcactgcagcctccaattcctgagctctaaagagatacttcctcctcagcctccagagtagctgggactataggtgtgcaccattgagtgctcagctaatttttaaaatttttggttgaaataaggtcttgctttgttgctcaggctggtcttaaactcctggcttcaagtgatcctcctgcctaggtctctcaaagtactgggattacaggtttgagccaccacagccagtctggaaagatgtttttagataaggaaattgcggagagagacagagttcctctcagtgcttcaggaaagagaatcagaaagacagggaggcagggaaggtgagagagagacctttgttctgagacttacatatcaattctcaaagcactcggtatgtcaaagggcagtagtttgggaaatcattttctgcaccccaacactgccaaaacagatggcatgaagagccagtgtttgttactggttttaatatcaataaaataaaactaaaatggtgtcacatgttatttcatttaatgcattttaatatttttatataatagttggcctggtgatcatgttcccttaaaagagacaatatcctttttttgagatggagtctcactctgtcacccaagctggaggtgcagtggcaccatcttagctcactgcaacgtctgcctcccgggttcaagtaatattcctgcctcaggctctggagtagctggaattacaggtgtgcaccaccacacccagctaatttttgtatttttagtagagacaggcttttgccatattggtcaggctagtctcgaactcctgacctcaagtgatccactcacctcggcctcccaaaatgctgggattacaggcgtgagccactgcacccggcccagtatcctttttataagatgagtgaatgaagtggcaatttgtgggtgctaggtgatgcaaatgtttgaattatattaagttgctattattataaaaacactcgattttttacatacataaaaatcacctttgcaactactagagtaactgcccaatggattcttcttgcctagaaagtgctgatttatcaagatagggaaattgcaacagagaaagaataattcatgtagagccggctatacaggagacttcagttcaaagtcagttgccctgaaaactttgggatctgggtttttaaggataatttggtgggtaggggccagtgagtcaggagtgctgattggttgggttggagatgaaatcataggcagttgaagctgtccttttgtgttgagtcagtttctgagctggggggccaggagaccagatgagccagtttatcaatctggatggtgcctctcaagggctggggctgcaaaacatctcaggtaattatcttaggttttacaatagtgacattatccccaggagcaatttgaggagagtcagagtcttagagcctcccaggtgcatggctcctaagctatagtttttaatcttgtggctaatttggtagctccacaaaggcaatctagtcttcaggcaggaagggggtttgttttgggaaagggctgttattatctttgtttcaaagttaaactataaactaagttcctcctacagttagtttggcctccacccaggaatgaacaaggacaacttggaagttagaagcaagatggagtcagttaggtcacatctctttcactgtcataattttctgagttaggattttgcaacagcgatttcgctagtatccagttagacataaatacactcatacacactgtgggggccatcggctcttggtctcctaaaggttcactgaaaaattactgatgaggcagattgattagaaggagaaaaggcatgcaaatttacttaacatgtatacatgggaactttcagaatgaagatccaaccttttaataaaccacagaagcttatataccatcttgaggttacagaaggaatgggggcttgaatcctggtaaaaaagattatgggatggggagaaaaggaattctagggagggtcaacaaatggttcttaggaagcatgaatggatctggaacagagattaacttgtaaatagttttccttggaggccatgcggtggctcacgcctgtaatcccagcactttgggaggctgaggcaggtgggtcacctgcggtcagaagttcgagaccagcctggccaatatggtgaaagcctgtctgtactaaaaatacaaaaaattagctaggcgtggtaacagggacctgtaatcccagctacttgggaggctgaggcaggaaaattgcctcaacccagatggcgattgcagtgagccaagatcacaccattgcactccagcctgggtaacaagagcaaaactctgtctgaaaaaaaaacaaaaaacaacaaaaaagtttttcttggaatttaaatgatccttggatacagtctttatactttttatattttattttattttattttattttattttattttattttatttattttattattttattattttatttatttattttattttatttaattttatttattttattattttatttattttattttattttatttattttattttattttatttatttttattttattttatttttattttattttaatttttctgagatggagtctcactctgttgcccaggctggagtgcagtggtgcgatcttggctcactgcaagctccacctaccgggttcatgccgttctcctggctcagcctcccgagtagctgggactacaggcacctgccaccaggcccggctaatttttttgtattttttagtggagatgggtttcaccatgttagccaggatggtctcaatctcctgacctcttgatctgcccacctcagcctcccaaagtgctaggttacaggcgtgaggcaccatgcctggtctcatcatactttttaaagggtatgctcatttttggtcacatttagagaaaaaaaaaaagtatgtacattctagataagttgtcgaatggatttatttttacctgctgcccagatacagcaaatttatcaagacaggggaattgcaatagagaaaaagtaaacagtgtgaggcacatagagccagctaaaaaggagactggtgttttattactcaaattagcctctctgaaaattcagagggtggggtttttcaaggatggtttgcagggcagggaggttaggggaatgggtgctgctgattgattgaggatgcagtcataggggtgtggagaatggtacttgtggctgagtctactgctgggtatgggccagaggagcagttaaatcaaaattcttgggtcttgggtcatcagaaatgcaaaagcctcaaaggacattatcttacaaaagccatctcattgggttttgtaaaaccaaaagccagtctttgattttataatagtgatgttatctgcaggagtaactggggcagttgcaaatcttgtgacctcttgaataatggctggcaatcatttacgcctacatcttagcagaattcaggctcctctcatcctgctaatgtggtgtctttcattagttttacaaagctggtttagttttggggaagggctgttataacttaaactataatccaaatttctttgaaagttagcttggtccaagcccaggaatgaccaagggcagtttgcagagtaaaggaaagatgggggttggttagatcagagctttttcactgtcgtcattttctcattgttacaatttttgcaaaggcagtttcaaaaatattttgggggtattggtttctgaggtccaacacacacacacatctactcacacacaattctttccttaataaagactagatgtgtttgcataggcctgtgaagaggtttaagaaaaaaacattgactcctgtaatcaaagagagtactattttgtattttctaaaatgattttaaaataatttaaacataatgctaaattatgatgtagagctagagaacaaaaagcatgtgtattctagataagttacaaaactgatgaaacaaaccggcagtaatcacagaatccagtgattaatgttttgacgcattacttcctggacattttcctgaaacgtgctcttaagaaacagaagatggttgtagtgaaactgcctttgcaaaaattataaatagtaagggaaatcaaacataattgactccatcttgcttctaccaggctaaattgcttttgctcattttttgtggaggccataatagtccttttcttaaacttatcccctcctggtttaaagattgaaaccatgttagtaaagactaataaaaggccacaagatgagaattacggtgttacaggaaagaggtcccaatccagaccccaagagagggttcttggatctcatggaagaaagaattcaggctgagtccacagtgcagagcaaaagcaaatttattaagaaagtaaagaaatgaaagcatggctactccatagacagagcagccctgagggcttctagttccccattttgatggtcattttgtgatgatatgctaaacaaggggtggattattgatgcctcccccttttagaccatatagagtaacttcctgatgtagccatggcatttgtaaactgtcagcactggtgggattgtagcagtgaggatgaccagagatcactgtcattgccatcttggttttggtgggttttggctggcttcttaactgcaaactattttatcagctaggtcttgttgacctgtatcttgtgctgacctcctgtctcatctggtgacttagaatgccttaaccatctgggaatgcagcccagtaggtttcagactcattttactgtgctcctattcaagatggagttgctctggttcacatgcctctgacaatgggagggcttgaactttgctaaaaaataggcatggttaaacaatagccattaattgcttgcttagcttgcttttctatagctgcctgctgtcccagagtcataaaccagagatcaaaagattgtgacttcccaaactgctcctatagataacattactattttgagaccttaaagggctggtctttgagatatttttcagatttagtattttggcagaccaagagataccacctggacctgtgaccaagaaactaactcagctggttctgttacctacagctgggaattgactcagctgtagctttgatacccctataatttcatccttagccaatcaattgtttcagttccctatccccctacccaccaaaatacctttaaaaatgctatgatatggtttggctgtgtccccacccaaatctcatcttgaatactcacgtgctttggagggacccagtgggaggtgattgaattatgtggatgggtttttcctgcactgttctcatgatattgaatgagtctctcaagatctgatgggttaaaaaggggagtttccctgcacaagctctcttcttttatctgccaccatgtgagacatgcccttcatcttctgccatgattttgaggcctccccagccacgtggaactgtaagtccagtaaacctctttgtttcataaattgcctggtcttgggtatgtctttatcagcagcatgaaaacagactaatacatcctacctctgaattcttggggagatgggcttgagaaacatctcctgtccctcttgtgtggctgccctgcaattattaaactctttctctttctcaatacttgctgtttttggtgtgttggctttttcagagtagtaggcaaaagtaaccctttgggctgtaatggtggggtagagtacaggaagtagtagtagagagaatgagaactagagtccatattctacacctcataggcctcagtcaagctactctttactcctctgcaatggaatcacccagtggcttcttcctgcctactgtacagacaaaaccaattcactgtgagaccatggcattgcagtaagggaagcatttaattgacacaaggctggccataccatgcaggagacacagttattactcaaatcaacctccctgaaggcttggaggttggggtttttcaaggatagtttggtaggcagggggctagggagtggggaatgttgataggttgaggataccattataggggtgtggaaagtggtcctcatgcgctgagtcatgagttgtgggtcaaggtggagtcagccagtcatcagaaatgcaaaagtctaaaaagacatttcaaaaggccaatcttgggttctgtgatagtcaagttatctataggcataattggagaattcacagatcttgtgaccttcaaacattggcttgctaagtatacctactttttagcagaattcaggcccctttcataatcctaaccttgtggcctttcattagttttacaaacgcggtttagtttttgtaagggctattatccttactttaaggttaaactataaaccaaattactcccatgattagcttgggcgacacccaggaatgagtgaagacagcttgtgaggctaggtgcaagatggagtcagccatatttgatttttctgcaaaagtagtttcagaaacaagtgctttttttttttcctttttaatgtgattctaaatgtccctgcattaggacatggcatctctatgatttaggcacttatgaatgagtgctcatgtcagagacctgaagatgtaatggttccatcagttagtgttaagtttagcctaaaactgccttcttacatggttaagtttaccctaaagtttcttggtacatagtgaactgtaacctaactgaatgtgtaaacagactgtaacgactacaacctactgttgtagcaatcactgagtttttaccaatcaaaggaggacaactgtttaaaccgtattccaataaaacaaatgccaagctgtaaccaatctgactatttctgtagctcacttccattttctgtaagtcacttttttttcactgtccataagttatcttcaatgatagaacagggctggagtctcttggagcctgctctggttcaggaagctgcctgattcatgaattgttctttgcttggttaaactgttaaatttgtctaaggtttttattttaacaataagaattatttctctcttacccaaatacagcccaggaggaggcagttcagaactggtgaagtggcttcatggtattactatcttttagctcatggcttctattctttatttttttgagatggagtcttactctgttgcccaggctggagtgcagtggcatgatctcagctcactgcaacctctaccttccaggttcaagcaattctccctttctcagcctcctgagtaggtgggattacaggcacccgccaccatgcctggcttttttttttttttttttgtatttctagtagacatagggtttcaccatattggccagcctggtctcgaactcttgacctcaggtgatccacccacccagctcggcctcccaaagtgctgggattacaggtgggagcgaccatgcccggcctattctatacattttctagaaattttagaactgtctttttagatttaaatctgaaacttacttatgtttatagtgtggggtaaggatacaaccttctttttcctgatgattgccccaagcgggtattttctttaacctcttctagctactagccagaactttccctagaaaatgcaggaggcgccaagacacattcttattctttctagacttcacaaagacctacactcatttgtttgcactattttttaatgattctctctgggcttccagtatattcaatgcatctctctttgcacttttaagtggcatcataaatatgggtggcagctgggcgtggtagctcacacttgtaatcccagaactttgggaggctgaggtgggtggatcacttgaggtcaggagtcctagaccagcctgggcaatatggcaaaaccccgtctccactaaaaattcaaaaactagctgggcgtggtcgtgcttacctgtaatcccagctactggggaggctgaggcaggagaattgcttgaacctgggaggcagaggttgcagtgagctgagatcttgccattgcactccagcctgggcaacagagcgcgagactctgtctcaaaaaataaaaataaataaataaataaataaataaatataggtggcatcataatgatcttttcgcaaatatttttcccacacagtgctgtgaactgcttgagagtaggaactgcctttattaactttgtatctctggtacttactatttatagtttcctcagtaaacaattgtgtgttttgtttgtttttgagatggagtgttactctgttgcccaggctggagtgcagtggtgtaatttcagctcactgcaacctctgcctcccaggttcaagtagctgggactacagaatcccgtcaccatgcccagctaatttttgtatttttagtagagatggggtttcaccacgttggccggactggtctcaaattcctgacctcaggtgatccaccagccttggcctcccaaagtgctgggattacaggcatgagcctacgcacctggctaataaacaatggttaaatggaatttataaattaataaaacatggccatatcttacatacccttcgttactggttccatttagaagttgattcctaatgacacaataggaggcatctttttttaaaaaaagttgttttattttaaaagataggggtcttgctatgttgccctggctggtgtgaaactcctggcctcaagtaatcctcccaactcagcctcccaaagtgctgggattacaggggtgggcctccacacccagtcattatgaggcatcttaatctcattagcctgtctccaaatcccatctcaaactgagaatgtttcctaaacaaagttaatccctttaaaaatgttgtctgggggctgggcgccgtagctcacgcctgtaatcccagcacttagggagtccgaggcgggcagatcacctgaagtcgggagtttgaaagcagcctgaccagcatggagaaaccccgtctctactaaaaatacaaaattagctgggcatggtggtgcatgcctgtaatcccagctactaggcaggctgaggcaggacagtcacttgaacccgggaggctgaggttgccgtgagccgagatcgtgccattgcactccagcctgggcgacaagagtgaaagtccatctcaaaaaaaaaaaaaaatgttgtttgggtttctattagcttcagccctgtagcatcacatttttgcatatagtttactttagggagcttctatccattaattctagtagctactatgaaggccaagggaaagttccctatcctttgaaggttcactgaaaagtcaactcacaactcacaaaaggcaggttaattggggcatgcaagttgtattaattcacacctggggagaatcacagatggggttagccgccctgcaaggaggttctgaagattatatgccaccctggcaacataggttatgggaggagagaggagaagaggaattctgttgaggggtttactagggggaatgaatggatcagggaacagagattaatttgagcattatcttgtgaacatgtctgtccaggtgtggttacactcttggtcttcagggaggggaagaaaaaacaattgttcttggtgggtctggatttttggcagataatagaaattaagcttcagagacagtgggtgggagggttagaacttgaggcttcttcagtaggtcaaggtgtcatttttggaacatcagctactgacccccaacaccaccaacaagctgtatttccacgattccagcacagtagtccccccttattctatttcacttaccatggtttcagttatctgcagtcaacaatggtccaacaatatttgcgttttgagagaagagagagagagaccacatacacacaactttaactacaatatactgttacaatggttttattagttgttgttaatctcttgctgtgcataatttgcaaaactttatgacaagtatgtgtgtgtgtcaggctgttcttgcattgctataaagaaataccagagactgggtcatttgtaaagaaaagaggtttaattggctcgtggttctgcaggttgtacaaggatggagcccgcatctgctcagcttctgaggaggtcttagggagcttttacttatggcattctaacatggcgagaacaggagcttgcacatcacttggcaaaagcaggagtgagtgagacagagaggtagagaggtggggtaggtgccctgcactttttaacaaccagatccaatgagaactcactctttattgagaggacagcgccaagccatcaaggattcacccccctgacccaaacatctcccatcaggccccaacttcaatgctggggattgcaattcaacaagaatttggcagaaacatgtgttcaaactatatcagtatgtgtaggaaaaaatcagtatacgtagggtttggtactacctgctgttccaggtatccaactgggcatcttgcaatgtacccccatggataagggggacttctgacttagacgaccttcccagggacagtgaggtagctgttcattcgggaaatattcacagcaagtctactgaggactaaactctgattttttatcttgcccaaattcctatctaaggggactggggagtcatgccctacaaatccagttctcatcagatgggctttatttaactgtatatatcatgatttactttccaacctgactctggcatcacattatgagacaaggaagaaaaacaaagtattttaccccaaaaacatgtttctttgccattattttgaaatggccctgcaaagctgtccttcatgggggaaaatttacatctgtaaagactctctgttaacatagctggatctttttcttccagaccctcccaatcttaaagtgattaagagtctagaaccttttaaagatacgaataggaaatatttttctattgtctctaatggcagccactataagatttcaaaagaaccttggtcttcacaatcttttatcttaacctgaacattccctttctgtggatcccaggtctttagacaaactcaaccaattgtcaaccagaaaatattttaattcacctatagcctggaaatacccccctaccatcccccaccccctttgagttgtcccgtctttctggaccaaaccaattatttcttaaatgtatttgattgatgtctcatgcctctctaaaatgtataaaatcaagctgtgccccaaccaccttgggtacatgttctctggacctcctgagggctgtgtcacgggccatggttgctcatatttggctcagaataaatctcttcaaatattttacagagtttgactctttgcttcgacactaccgtctgcaagttcttgtgctagccgctgtgggaaagacacagctgagtcagacatgatccctgccctcaaggagcttgtgacaccacagtgaagacaagtctattttggtgagtttgtggagacaggagatagaacaagcatggccgtggctgccctttgcttccgtggtgctgagcagcagcaggggcagctgtgagcaggcagctggtcttggcaggaagcagagcaccacccaaagactggagtgaggaaataaggccgcctttacaatttggcaaatgactggccttgggaatgtgagtagagagagagtagcaaattaagattatctcacctgagaagattcagaagtttcctctgcattttgtgaataagcagtgtgggcctgcctgcctgcctgcctgcctgcctgcctgcctgcctgcctgcctgcctgccttccttccttccttccttccttccttccttccttccttccttccttccttccttccttccctccctccctccctccttccttcactccttccttccttcctgtgaataagcagtgtggggcttgcttgcttgctttgagtaagtagtgtgggctttctttctttccttctttctctttctttttctctttctctctccctcctccctccctcctccctccctcctccctccctccttcattccctccatccatccctccctccttccttccctccctccttccttccctccctccttccttctctccctccctccttccgtccctccttccttccctccttccttccctccttccttccctccttccttccctccctccttccctccctccttccctccctccttccttccctccctccatccctccctccttccctctctccatccctccctccttccttccttccctccctctttccttccctccttccctctttccctccttccttccttccctctctccctccttctttccttccctctctccctccttccctccttacctccctccttccttcctttcctcctttcttttcttccttttctcttcttctctttctctctccccctccctccttccctccccctccctccttccctcccccttcctccttccctccccttctctccctccccctcccctctgcctccccctcccctctgcctccccctcccctctgcctccccctccccctccccctcccctcccctccccctcccctccccctcccctcccctccccctcccctccccctcccctccccctcccctccccctccccctcccctcaccctccccctcccctcgccctccccctcccctcgccctccccctccccttctcctccccctccccttctcctccccctccccttctcctccccctccccttctcctccccctccccttctcctcccctccccctcccctcccctccccctttcttctttccctcccctccccctttcttctttccctccccttcccctttcctctttccctccccttcccctttcctctttccttcctttcttttctctcctctctctttctctttctctctctctctctttcttttcctctttaatctcttttctcttttcttctttaatctcttttctcttccactccaggccatgtgaagtgcatccaggagggctgtctagagcaagggggaactttgagtgcagagaggatgtggagctctaaggaggaacctacaggctgtccctgtctttcagcaaattgcatccagtctgagcttcactttgcaaccctgattagaaaccagtttgatcacactgggtctttcaaccgtttgtctgtggctagagttcataacttcatctttgttaagagcccactacctagaacatttatttaatgttagagctcaaaacaccctacctcccctctcctcatcttctttagtgccttcagtctttttcaaaccctagctccagcctaataagtaacacattaactgggttttcctatttatctatcctctcgcattacttctctgagtcagagcctcttctctctaagtcacgggaactgcccttgctacttgtgacctgccctttactcagcagtttttgttctgggaagccctgggattctgctaatacctatcactgtaggtgctgaagggaaacagatgaagaacatgacctcaaggagcttcctgtcaatgagaagaccaagctgacgcctggcaaaggtaaatgccaccataacaaattaagtaaaagtgtgcattagctaatttgtaaattcagcttaagatgaatcctgcttcttgggcccttctctgacgctggtgttgggactgtaggattcctcgagcctccgtcaaggttaacatcaaatcccactggcttctctcagcaccaccttgatgaccctagcttagtttctctgtttcccatgactggaactcttagacctttccacaaacatacaaggatttataattcaaagctcaagcgatgaagttgaagcttttggcccataggaagcctgaactagtgattaggagaaaaagattgaggagtctgagtgggaagagttagctatttgaaagacagcattatagtagtagtcattgtaggaaaactcaggactgggttggacttacttatattatgttgctttatattttggttactgagggaggtgaaggtcatcctttcagttcttgggatgtctaaatagcttcatgactcctgggctgttggataaatttgctttcagcatcatctggctgtaccttttgtccttagcaggggtaaaaggaaccctgtgaaaagcatcataccccaggtttcagtttttgccttgaaatgtgcccgggatcccaggcagtctgggactgcgccctttctccctcttgccaagtgtcctgtatgttcttcagggctagcatggaattaaggtgaggaagctgctggccatctttctgaatgcttgcctgatctctgcaggttgcctcacccccgatcttcctgtgcccttccgcagccattctgtcccctctcctgtacctccctggggtcagttgcagctcatccctggtcttattctgcctgaggtgctgagggtgacaacttacaatagagtctctccacagaacacagagatggagggcaattcttagtcctttccctcactacatcataaacattaacacttctgcttggtccagagttcaggaatgctacttgtaaccaccttgagttattttgtcagtaaaataggtctttgtgggctagcactggatctatttcatgataaccttcactgaggggctgtaagtaccaggctatatttgcctggtccttcatatgtatcttgtttaatcttctcaatagtagtagaaaacaaatattagcattagcttctattatgcaaaagaattcactaaaatacagactgatgaatgaatttgttgcagatcattcagcttgaatgtggcagagccaggattcagacctagcttttttgggctgagtcccacgctgggctttattactaggtacttgacgttactataatgtagaccatctcaacaaaatagagccacgatttcttaatgtgttattaacaaatacttaacacataaccaacttactttggttaccttaaaaataaaatatttggctgggcatggtggctcatacctgtaatcctagcattttgggaggctgaggcggggagattgcttgagctcctgagttcaagaccagccaggggaacagcaaactccatctctacaataaataaataaataaataaataaataaataaataaataaataaaaataaaaataaatcagctgagtgtaatctcagctactcaggaggctgaggtaggaggatcgcttgagcccaggaggcagaggttgcagtgagctgagatggcgccactgcactccaatctgggctgtacagccagaccttgtctcaaatgacaacaacaaaaatattcaggcccggcacagtggctcacatttttaatcccagcactttggaagcccaggagcttgagaccagcctgggcaacacagtgaaaccgcatctctacaaaaaaaatacaaataataaaaattagctgggcatggtggcttgtgcctgtagtcccagctacttgggaagctaaggtggaaggatggcttgaacccaggagttcgaggctgcagtgagctatgatctgccactgcactccagcctgggtgacagcgagaccctgtctctgaaaaacacatacacaaacaaaagccctcaactattcaaggtgttgtctcttactgagggaatctataatgcagtttttatgggaatgaaggtgagacttgaggggggcaccaaagaaaagtaagatactaataaagtggaggagtttttctagattagaatactgaagcaagtgcttatcccataatcattcttgtcccagagattttatactcaacaatggaaagtcactgagaatcccagtaccgcagaaaacagcctgtggagcagggcccacgtaggggtgcagatgaccctgttaccagaaaggggtcccgatccagaccccaacagagggttcttggatcttgcgcaagaaagaattcagggcgagtccgtaaagtgaaagcaagttcattaagaaagtaaaggaataagagaatagctactccatagacatagcagccctgaggggactactggttgcccattttaatggttatttcttgatgatacgctaaacaaggggtgggttattcatgcctcccccttttagatcaaatagggtatcttcctgttgttgccatggtatttgtaaattgtcatggcactgggggcagtgtagcagtgaggaggacaggaggtcactctcgtcaccatcttggttttggtgggttttagctggcttctttactacaatctgttttatcagcaagattgttatgacctgtatcttgggcctatctcctctatctcatcctgtgatttagaatgccttaaccatctgctaatgcagcccagtaggtctcagcctcattttacccagcccttattcaagatggagttgctctggttcaagcacctctgacaaccctacatgactttcttgtctttgctgtggcttcatctaagtcagaggccggtgggcagaggaccaaaaaataaaatacctaaattctctgcgctgaaaatcttggaggtgtgtgcatgtaaacaatttgtgcaccaagaaggcaactctgactcatctccattattgcctcattatcttcaggagaaatccacccttctcaactctactttgtaatgctggaggttattcatgcctcttgcaaaccacgtttctgcttaaactctgccaataaagggcactggagggagacagccggctggaggagggacttcctgtttgcttcctatctgcttcctggttctgtgagcatcaccatgtcaacgcctatttatgtctcagtggctgttcctttgtgtagctgcactaaattcagtttacagtagctatcggcaaagatttcatttgcctcctgagaggtctggatctcagcccagagggccctcctgtgagctcagagacctcagcatttgttgagtggtcaccactcttcagagccatgagtttcagcttcttcggtgtctctccacccaaaatttcaatttaataattttcagttcctcccttaattccctcaatctaggagtggtagctatgtccaacaattgctagtgccttaatagtgactccttccccaacactttatatcttaactttatacctagttgagttctttatattaaatttgccctgttcaggctgggcgtggtggctcactcctgtaatcccagcactttgggaggccgaggtgggaggatcacttgagcccaggaatttgagatgagcgtgggcaacatagcaagacctcatctctactttaaaaaaaaaaaaaaaattatctccgcatggtggtgtgtgcctgtggtcccagctactcaggatgctggggcaggaggatggcttgagcccaggaggacaaggctgcattgagccgtaatcacaccactgcactccagcctgggcgacagagccagatactttgtaaaaacaacaaaaaacttgctctgttcagatatttggttaggagtgttgctttttaggaggagcagttgggggccgggttggggagaagctaacaatgtcagcagctttgaagaaggcattttgtaatctataccatggccaaaaccaccccatggggctctcactgaagtccaacagcccatagtgtaatccattccttagactgccaacagctctagactcatagacattagtgagggagctctacaaactggaaccctgtgggtatttctacaacttacagattattaatagtcgtgcaaagacaggcaaatggatgttttctggtggggtaccgggagggagcagttgcatttgaagaatgaactatggatttcattgatgtgctttttttaaagaaaagtaaaataacaaaagaaaaatccttgaagagtatttttattcccacctcttgtaatgttcagggaacatgagtgacatttggactcccaaacaaaagaagggaggggcatatctctctgtttctatggttcctcgttgagggaaaaaggctttcaagttcttgcgtgagcactgacaggcttttatgaatagttggtgacacaggtacaaactgggctgttctggctgaaatatctgtttgccttgtcggatattgccagcattcttcctgcctcactgacctccctgaatgacttgggcttgagaatgtttctgcatgatttctctgagcttgctgtcttacctgagagcaggaagtcaaaaggagagtgatggagccacctgctgccctctactttgcagatattaaagaggagcctgaaactgttccttggacatcttatgaatgtcagaaaataccttttggagggttagaagatcaggggacatggttgttcacatttgctgccacggaacaccgccagtcttcacttggaaacagaatcacgccttgtgaagagatcatccctaagcaggagagaagctactaaaggtgagaattttcttcatttttcattttccttcctcttagattcccataaaagctattactaaagagaatacattcttgtgtttaggaagagctacaacaagggaaaataatcattgcttgaaggatgtggcacattttgtccctctccttatagggattattttctataatatctggttttctttactgatattcagtaccctttattgtatttattttttcttttttttccatattcatcttaggatttcaatgtacaatgttttttctttatttttcttttgttttctttctttctttttttttttttaaaggggcttcctggtcttcatcggacagtgaaatttgtttgggagtccaaacaaaatataaaagagctataatacttcctgtattgtatttcaaaggtagctgtggtttgttggaacaagcattaggcttgtagacaaaaacactgggggagaagagagagtggagaggagtcctggatttgcttcttaaaacatgtgtatttggcaagttatttagcttctgttttcctatctataaaagaggcttaataatacatttcagattggttgtgaaggttattaaatgggacagtgtaaataaatatttctcacccacaaaaggtactcattaaatattgtatatacacagcttgtgtgcaagtatattttaaacttggatggatactctgaatgatttcaatgcatttttggataatatccagttatttttacttctttaagaacattttttaaaaagtgtggctagatgtcacatctgaccaatgaattatatatggtgaaaagcattctaatgctatataaattgccaaaatagaagcaagaaatgttttgaaaggacctttaggtttctagaaccgatgccaagagtctgaattttatggatttttctctccagatctatcagaaattccagaccccagataagagttatattctagggtggtaaggcatgagaagaagaatgaggaatgaagggtgggtggggacgtgctcttactaatgacgctccatggcagcaggtgctcagttgttccttttctcctggggtggaggtggatccagatccagacttgagtgtggtcggctagtttgtagggtcagattacagatctccatcaacaaaccagatgtaaggggcttctaggcaggtctttactaaggatttttgtccaggtaagaaatattttttgccatcagtttggaattgaacttgatgtttctgggaatgattggtttgtaactggaggcattttgttctgtccaaggattgtgtcctcctccaccttccctgtgctcggtctccacctgtctcccattctgtgacgatggttcaatggaagagactctgccagctgcattacttgtgggctctgggctgctatatgctgctggccactgtggctctgaaactttctttcaggttgaagtgtgactctgaccacttgggtctggagtccagggaatctcaaagccagtactgtaggaatatcttgtataatttcctgaaacttccagcaaagaggtctatcaactgttcaggggtcacccgaggggaccaagaggcagtgcttcaggctattctgaataacctggaggtcaagaagaagcgagagcctttcacagacacccactacctctccctcaccagagactgtgagcacttcaaggctgaaaggaagttcatacagttcccactgagcaaagaagaggtggagttccctattgcatactctatggtgattcatgagaagattgaaaactttgaaaggctactgcgagctgtgtatgcccctcagaacatatactgtgtccatgtggatgagaagtccccagaaactttcaaagaggcggtcaaagcaattatttcttgcttcccaaatgtcttcatagccagtaagctggttcgggtggtttatgcctcctggtccagggtgcaagctgacctcaactgcatggaagacttgctccagagctcagtgccgtggaaatacttcctgaatacatgtgggacggactttcctataaagagcaatgcagagatggtccaggctctcaagatgttgaatgggaggaatagcatggagtcagaggtacctcctaagcacaaagaaacccgctggaaatatcactttgaggtagtgagagacacattacacctaaccaacaagaagaaggatcctcccccttataatttaactatgtttacagggaatgcgtacattgtggcttcccgagatttcgtccaacatgttttgaagaaccctaaatcccaacaactgattgaatgggtaaaagacacttatagcccagatgaacacctctgggccacccttcagcgtgcacggtggatgcctggctctgttcccaaccaccccaagtacgacatctcagacatgacttctattgccaggctggtcaagtggcagggtcatgagggagacatcgataagggtgctccttatgctccctgctctggaatccaccagcgggctatctgcgtttatggggctggggacttgaattggatgcttcaaaaccatcacctgttggccaacaagtttgacccaaaggtagatgataatgctcttcagtgcttagaagaatacctacgttataaggccatctatgggactgaactttgagacacactatgagagcgttgctacctgtggggcaagagcatgtacaaacatgctcagaacttgctgggacagtgtgggtgggagaccagggctttgcaattcgtggcatcctttaggataagagggctgctattagagtgtgggtaagtagatcttttgccttgcaaattgctgcctgggtgaatgctgcttgttctctcacccctaaccctagtagttcctccactaactttctcactaagtgagaatgagaactgctgtgatagggagagtgaaggagggatatgtggtagagcacttgatttcagttgaatgcctgctggtagcttttccattctgtggagctgccgttcctaataattccaggtttggtagcgtggaggagaactttgatggaaagagaaccttcccttctgtactgttaacttaaaaataaatagctcctgattcaaagtattacctctactttttgcctagtatgccagaaataatataaatataaacagataaagtgtgtgagactttttctcataactattcatgacatttaaaatccctaggggctggcaagagagttctcattattctgaaatggtcctgacaagctgcatgaatagcaattttttttttgagacagagtcttgctctgtcacccaggctggactgcagtagtgcaatctcagttcactgcaacctccgcctcccaggttcaagcgatactcccacctcagcctcctgagtagctgggactacaggcatgcagcaccatgtctggctaatttttgtatttttagtagaggccgggtttcaccatattcgccaggctggtcttgaactcctgaccttgtgatctgcccgcctcggccttccgaaatgctgggattacaggtgggaactactgcgcctggcctacaaatagcaaattctaacgaagacaggggaacagggatggttcttccattgttaaaagccatcctcattttgtttatattgccaggtttgtgatttttctgtaaaggaaaaggcagggtgatttaaccagtttgaccacctttcctgtactcttacaggaaaatcgcagcactaattctaattttgtccactttacagccaaagcttagctaatgttccataaaggagataatagccaatcaggtaaggtaatgtgtaattcattattcaaagtggaacatgtttttgtagggggagagtctgcactattaataattgtattgagaaataaaaataaactaggactattcagttaaaccaggatgtcttattattccatgtttaggcctcttgagtcaaaactctttttttttttttttttttttttttttttggagacaggttctcactctgttgcccaggctggagtgcagtggcatgatcttggctcactgaagcctctgcctcccaggttcaagtgattctccccccaaaccttgcaagtagctgggattacagatgtgagccaccatgcccagctgatttttgtgtatttttagtaaagatggggtttcaccatgttggccaggttggtctcaaactcctggcctcaagtgatccacctgccccagcctcccaaagtgctgggattacaggtgtgagccaccatgcctggtcccctcttgagtcaaaactcttatttcagaatgcgaatggaaggatcgctattagtgattctgcagattacacatttccttgcggggagacaataaggtatgtgtaaatacatatatgtgtgtgtatgtatacacacatacagcacgctacctcccaagtgttacctagtgaaacagtttcctttccgaagctccagagatggttgttggctaagttatactcttctgtgatgggcaagggatactataaaaacataggcagtgccctttgaatatagtacagctcatcttctgcatacgatatgccctggaaaggtgatttatatgcaagttaattggtgtaatctgaaggatgctcccattaatacgtcatgatgtcattaatatgtttcttcctttctgatttttgtttttttttttttttttgagacagagtctcactctgtcacccaggttggagtgcaacgaatggcgcaatcttggctcattacaacctccgcctcctgggtccaagcgattctcctgcctcagcctcctgagtaactgggattacaggtgtgtgccaccttgcctggctaatttttttgtatttttttagtagaaacagggtttcaccatgttggtcaggctggtctgaactcctgacctcaagtgatccacttgccttggcttcccaaagtgctgggattacaggcgtgagctaccgcacccagccctttctgagtgttgtcattcaattcatcaagttttctgtcatgatcaactttctctatgcaaaccctgtaactctgacagttatcactgtgtctgacacagtgaattttttatttataaggtagttacttttggccaggtgtggtggctgacgcctgtaatcccagcactttgggaggccaaggtaggcagatcacttgaggtcaggagttcaagatcagcctggccaacatggtgaatccccatctctactaaaaatataaaaattagccagacatggtggtgggtacctgtaatcccagctacttgggaggctgaggcaggagaatcgcttgaacatgggaggcagaggttgcagtgagctgagatcgtaccactgcactccagcctgggcgatagagccagactgagtctcaaaaaaaaaaaaaaagttacctttttttggtaaggttgtacttcttagataatggtcattgtcactaccaacttgcctgcattgtaatagagtcctattcactttgctcccaaccccactacggagatgactgatgactagttgtatacacagtgggtgtgccctgagaggtctgttgccagcagtggtgatcgatcacggcctccccctgctggctgatgtgatggtccttggtcctcctctgaaggaggtagaaggggcacacggccaccgtgggaagtaggcagaaaagcctccctgggtgcagattctctgagaaaagaactttggcctcatagttaacttactccaaaagctttcatgtgaaataatttataattttttatataaataaaaagattaaaatgtgaacttgtcatttttttggggataagttactgaaatttttcaaccattgaaattttctctagaaatatattcaggtgcgtaggaagtgctgtttatttaataacacagggtcttcatatcagaggggtcgaatttagccctcatttgtttagtgtattatagaaatcatacaccaacacatctgctgatttttctcttccctctgagtcatatctgtgtctttaaccgttctctggtaaggaaaaatctcacaaattaattgaacaactgtgtttgtattacctctcagggtttggatttcctccttattttttatctgtgggctattggtaagcattgttttaataactgcatttttgttgtacactctgctcattgtagtttttgtctttctcttggttgagtggaaaaaatgtttttttttttttttttggaaacgggggactcactctgttgcccgggctggagtgcagtgctgcagtgatggctcaccacagcctcgacctcctgggctcaagcaatccttccacctcggccacctgagtagctggaactgcaggcgtgctcagggagtctgaggctgcagtgaactatgatcattgtgccactgcattccagcttcagtgacagagtgagaccctgtctcaaaaagcaaaaacaaaaaacccacaaaagcgttgacagggaatccctcaataaaaaggtgatgttcaagtaaaggtctgaaagaaggccaggcacagtggctcatacctgtaatgccagcactttgggaggccgaggcgggaggattgcctgaacccaggtcaacctcctgggctctagcgatcctcctgcctcagcctcctgagtagctgggactacaggcatatgctaccatgcccagcttgaaaatttctcaagaaagaaggagaaggccgttgataaccttgcttgggaacatatgacatacatcagttgaggaggtcaaatactttgattaaaactggaaaaaacattggggctaggtgtggtggttcacacctgtaatcccagcacttcaggaggctgaggtgggaggattacttgagctcagaaatttgaggatgcagtgagccatgatcgtgctactgcactgcaaactggcatgagagcaagattctgactcttaaaaaaaaaaaaaaaaaagaataattaaataccctgcctgcttgtctgctttaagtaccttacttgagccaaagatcagtttttctatttttttaagattcttcttactttttaaagatgagatctcactacgttgcctagcctggttttgaactcatgggctcaagcaatcctctttcctcagcctcctgagtagctgggattacaggcaggtgccactgcacctgtccccaagaatctgatcttactgcttccatttagtcttttttttgagacaagttttgctcttcttgcccaggctggagtgcagtggcatggtcttggctcactgcaacctccacctctggggttcaagtgattctcctgtctcagtctcccaagtagctggggttacaggtgcccgccaccatgcccagctaatttttgtatttttagtatagacagggtttctccatcttggccaggctggtctcgaactcctgacctcaggccatccacccccttggcttcctaaagtgctgggattacaggtgtgagccaccacactgggcccatttaattttttattacaaagatgaataagatatggtttctgcctctatgaagcttgaatgtactggcaatcaatgagataacgtcttcatcccacaactattgtgctcttactgtttaccaggaattgttcttggcactggggatacatcagtcaaaacacagacaaaaattccaacacttgtgttgtttgcatactagtgggaaacagactgtaaattattataaggaaacaaatgatagagatcaaaggaagtgatggagaacttgggaggatggagtagaaagggaagatatttaaaattttaaatagggtggcctgggctgggtgtggaggctcacatctgtaatcccagcactttggaaggctgaggcaggaggaaagcttgagcctgtggagttagaggctgtagtgaactataatcattgtgccactgcattccagcttcagcgacagggtgagaccttgtctcaaaacaaaaaaacaaaacaaaaacacacaaaaccaaaaccaaaacacacacacacacacacacccacacacccacccatgggtggacaggaaatccctcgatgaaaaggtgatgttcaagtaatgatctgaaggaaggtcaggcatggtggctgacgcctgtaatcccagcacttcaggaagccaaggaggaaagattgcttgagcccaggtgttcgagaccagcctaggcaacatggcaaaacgctgtctctacaaaaaatagaaatattagccaggtgtggtgcacacctgtaattccagctacttggtagactgaggcaggaggattacttgggctcaggagtcgaggatgcagtgagcaatgattgtaccactcagtatacttcagcctgggtgacacagcaagaccccatctcaaggaaaaataaaaacatctgaggagacgaggaaatgatccatgaggattaagggggaagatcacattctagaggaaagacttgcaaggccctgaagcaggaacccacctgtcatgtttcaggaacagcgaggaagctattgtaagtggattaaaggaggagaagaagaggagttaagaggggcatacagaggaggccagtagaggcttttttaagctattgtatggagtttgtcttctcctttgagtgaaataggccattgtaggggtttctgagcagagaactcacattttaataggatgactctagcctgctgcattgagaacagactggcttgggggcgagggtagagcagggaggccagttaggagactatagcaataatccaggcactatgcaatagtggcttgaaccaaagccgtagtagtagaagtggtgaaagtggccagattctggaatttttttttttttttgtacaggctagagtgcagtggcatgatctcagctcaccacagcctcgacctcctgggctcaagtgatcctcctgcctcagccccccaagtggctcggactacaggtgcatgccaccatgtccagctaactttggtatgttttgtaaagatggggtttcaccatgttgcccaggctggccttgaactcctgagataggaggcgatccccccatctcagcctcctaaagtgccgggattacagacgtgagccatcgcatccagcctggaagtattttgaaggttcagtgtgaggatttgctgacagattgagttggagagaaatagaggagtaaataactccaagggttttatcttgttagaaggatggtgttgccactaactaagatgggaagcctgtggaagactggtttttcagggaaggtcaggactttgtgaacatataaaactgcagatggctattagatatccaagtagagatgctgaagagatgaatgtatatagaagtctgaatttgggagagagatctggattggagatacttacctggtgtttaacagcttacagattgtgtaaagtcatgaaacggataagaaccttaaaagagagaaaagggaatagaggttaccaaatgaattgcagtttccaaattgcagagggcagagagacaaggagaaaccagcaaaagagagtaggaaagaagcaactagagtggtagaaggaaaacagggtgagtgtgatgttctggaagcaaacaggaaaaagtgtttcaggaaagagagagctgatgattgcatcaaaagctgctgagacttgcatatgatgaggatgaagaagtgactattggatttaacaacatgtaggtaagtaagcttgataagatcggtttttgtgaagtgcggaggtgagcacttgattggaggtggttcagggagaacaaaagtggattcagcaagtatagaaaatcttttgaggagttttactttaagccaaaagaagcagaaaaaaagtaaagtaactggttaagagaaggttatcttgaaaatgtataaagtggtaacctgttggtatattgatgggaaagatctagtcaagaggaaaagatgtaggaatgagttgggaggcttgccagaatgatgacatctttggaaagaaaagagagatgattatttaagggcccaagaagaaaggcttgtctttcatggaagtatgaacagttcacctacagtaacaggagtgaaggcagcgtggatggactcagctgtagtagatgggtggatgttgtgggatctgtggggttctctcattgtgtcgcctagactggagtacagtggcacgatcatggctcactgcagcctcaatctcctgggctgaagcgatcctcccatctcagcctctcaagtagctgggattacagacatgcactatgacgccttgctaatttaaaaaattgtagagacggggttttgccatgttgcccaggctagtcttgaactgttggcctcaagcaatcctcctgcctcagcctcctaaagtgctggtattacaggtgtgaaccgctgtatccagcctctttttcaactaacatcttatctgaggtataatatccgtatgcaaaaatacaaaaattccaaatatctaactcaagaatttttacaaagtgagcacacctgtgtaactagaacactggtcaagaaagagaacattcccagcaacccagagtatctcttgtgttcctttccgatggctttccaaaaataaccattgttctcacttctaacatcacagattattttgcctgtttttgaattttatgtaagtactatgttctcctttgtttatggctccttaaactctacattatgtttacaagattcatctatgttgtatgtagcagttcagtgattcaggaaactcaacaatatgtttacaagattcatctgttttttgtagcagttcagtgattctcactgctgtgtaataatccattgtatgaatataccatagtcgatccattctgttgacggacatttgggttgtttccaagttttgtccattataaattgtgttcctaaggacgttcttgaacatgttttgtagtaaacatatatatacaggcatatctcagagttattgtgaatttggttccaggacactgagtaaagcaaattttgcaatacagcaagtcagacaaagttttagatttcccagtgtatataaaagttatgtttacaccgtatctgtgtaatggcattatgtctaaaaacacaatgtatatgcattattttaaaaacactattgggtaaccagtgcaaaaaaatactttattgctaaaaaaatattaataatctgagccttcagtgagtcatgatctttttgctgatgtaggtcttgtctcaatgttgatggctgctgactggtcaagggtggtggttgctgaaggtgggggcactgtggcaatttaaaaaaataagacagcattgaagtttgtcacattgtttgactgttcctttcatgaaagatttctctgtagcatgccatgctgtttgataacattttactcacaggagaacttccaaaattagagtcaattctctcataccctagtgctgctttatcaactaagtttatgtaatattctaaatgctttgttgtcatttcaacaatgttcatagcatcttcgccgttagtggatttcatctcaagaaaccactttactttttttttttttcttgtgagacaaagtcttgatctgtcacccaagctggagggcagtggcgtgatcttggctcactgcaacctcggcctcccatgttcaactgattcttccaactcagcatcctgagtagctggaattacacgcgtgcgccaccacacgtggctaatttttatatttttagtagagatggggtttcaccatgttggccagtctggtctccaactcctaacctcaagtgctccagctgccttggcctcccaaagtgctgggattacaggtgtgagtcaccatgcctggccaagaaaccactttctttgttcatctataagaagcaactcctcatttgttccaatttatcatgagataagattctagttctcttgctctttctacaacatctgcagttacttcctccattgaagtttttttttttttgttttgtttttttgagattgagtctcactctaacagccaggctggagtgcagtggcatgatcttggcccactgtaacctccacctccagggttcaagcaattctgtctcagcctcccgagtagatgggactacaggtgcaagccagcatgcccagctaacttttgtattttcagtagagatggggtttcaccatattggtcaggctggtcttgaactcctgacctcaggcaatccacctgcctcggcctcccaaagtgctgggattataggtgtgagtcatgtgcctggcctccactggagtcttgaaccccaaaaagtcatctatgagagttggaatcaactttctccaaactcctgttaatgttgatattttggcctccacaccatgaatcacgaatgttctcaaaggcatttaaaatagtgaatcctttccagaaggtttttcttttttttcttttcttttcttttctttttctttttttttttttttgagacagagtctctgtcacctaggctggagtgcagtggcacgatctcgggtcactgcaacctctgcctcccgggctcaagcaattctcctgtttcagcctcccaagtagctgagactacagacacatgctactatgcctggctaatttttgtgttttcagtagagacagggtttcaccatattggtcaggctggtctggaactccacacctcaggtgatccacctgcctcggcctcccaaagtgctgggattacaggcgtgagcccccatggctggcctccagaaggtttttctttttcctttgagacagagtctcgctctgtcacccaggctggagtgcactggcacaatcttggctcactgcaacatctgcctcttgggttcaagcatttctcctgcctcagcctcctgagtagctgggattacaggcatgcgctatcatgcacagctaatttttgtatttttagtagagacagggtttcaccatgttggccaggctggtcttgaactcttcagctcaggagatccacctgccttggcctcccaaagtgctggagttacatgtgtgagccaccatgcctgacccagaagatttttcaatggactttgctcagattcatcagaggaatcactatctgtgatagttatagccttacgaaatgtttttcctaaataagacttgaaagttcaacttactacttgatacatgggctgcagaatggatgttgtcttagcaaccgtgaaaacaacatgaatttccttgtatgtctctatcagagcttgagtgactaggtatgttttcaacaagcattaatttttttttttttcctgagcagttgttctcaacagtgggtttaaaatgtttagttatccatgctatgagcagatgtgctgtcatccaggcttaattcttaagggtcctaggattttcagcatggtaaatgaacactggcttcaacttaaagtcactcgctgcattagcccctaacaagagagtcagcctgtgctttgaagccaggcattgacttgtcctctgtagttacaaaagtcctagaaggcatcttccaatggaagaatgtttggtctacaaggaaaatctgttgagtgtaggcttctccaccaatgatcttagctagatcttctggataacttgctggagcttctacattagcacttactgctccatcttgcatttttatgttctgaagacggcatctttccttaaacctcacaaataaacctctcctaactccagacttttcttctgcagcttcctcacctctctcagccttcacagaattgaagaacattaggaccttgcctggattaggctttgatttaagggaatgttgtggctggttggattaggctttggtttaagggaatgttgtggctggtttgctcttctgtctagagcattcaaactttctccatatcggcaaaaagactgtttcactttcttactcatgcgttcactgaagtagcacttttttaatttttttttaggggttctgcaaatggagtaagaactagcacttttacttttcttcaggaatttttccattgtgtttatgacttggctgactttgacacaagaggctcagcttttgacatgtcttcctttgtaagcttgatcatttctagcttttttttttttttttttttaagacgttagttttaatctgtcacccaggctggagtgcactggcgccgtcacggcttactgcagccttgacctccagagctcggattatcttcccaccttagcttcccaagtagctaggactacaggtgcctgccaccatgcccacctaatttcttgtactattattttttaatagagatagggttttgccatgttgcccaggctggtcttgaactcttgggctcaagggatcctcctgcctcggccttccaaagtgttggaattacaggtatgagccattgcacctggccaatgctttcaattcttttgggtatatacccataactggaattgctggattatttggtaaatttatatatatacacacacacacacacacacacacacacacacacacacacatatatacatatatatacacatatatacacacacatatatatacatatatatatattttttgagatggagtcttgctccattgcccaggctagagtgcagtggcgcaggtatagctcactatagcctcgaactcctgagctcaagcaattctcctgccttggccacccaagtagatgggactacaggtgcatgccaccacacctggctaattttttttttttttttggtggagatgggagtctctatgttgcccaggctggtctctaactagtggcctcaagcaatccctcccgcctcagcctcccaaagtgctgggattacaagtgtgacccgacatgcctggttggtaattctatttttaattttttgaggaaccatcatactgttttccttagttgtgccagttttatattctcaccaatactgtaaaagaattccactatgtctatattctcaccaacacttattaatttttttttctctgctagtagccatccttatgggtgtgaggtggtcttcagtatttttaagattttatttcattgtcttctagctgcatagctgttaacaagtagtctttggaaatcattatctttgtttttgtgggtataaagtgtctcttacctctgcttttaaattttctctttatcactatttttcagcaattagattttgatgtactgtggttatcctgcttggagttaagcttcttcgttgttggtttatagttttcgtcaaatttggaaaaatttggccactgtctccttaatttcatctttctgttctcccttccatatatagccactcgatattattccaaaaatctctgaggtttgattccttttttccctagttatattctctttgtgctgtattttagataaaatttgtttttcaatttcactgatcttctttagtatctagtctgctattcagttaattgttttcatatattgtatctttcatctctagaagttctgctttttaaaaaaatctttgatttttctcattaagtatttgtattaatacaaaaatggcagttttaacatccttgtctgctagctgtatcacccctgtcatttctgtgtctgttcctgttcattatgttttgtcctcattatggtcacattttcctgctgcttagcatgtctagtcatttttctgttagatggagtacattgtaactcttaagttattgaggatctggacttcgtttacttgtgttgggcttcattttggcaatatttgtggaacagtgtgatctcccttgagtctgcttttccgctttgctagggtgagtttaagtcaagcagccttcattcaagggatatttgatgcctgctaccaaggcatgaccttggggtttctaatgtcttgggtgattacagaggactcttccctctggcatcccccagtgtgagctttgggaattgctgtttccaactccccactcttagcttggcctagcggagtgtcactgcttctatgcagccaggcactcagtaaggactcgaggggaccacggtatagattcctggaggtttttttttccctccatagtgttctcctttctggaaatctgcttgcagcttcaactatctcacctttcctcaactccgcaagactgccaggttctgtttctatttcctttccctgtgcctgcagcttggatattgcctccatgaagagagctgggatgattacagggttcatcctatttttttcctttcttagggattacagtcctgtcacagctgcctgtggtccaatatgtggaaaacgtttgtttcatatacttaatttacttttctagttgtttatagaaggaagttaagtcccatccttcttactctggcatgactaaatgtggaagtctgcagatagagtattcctatcagggaatagagggagtagaagcaggaaagagaaatgcacaaagcttctgtgtccatcccttaacttggccaaagaatcagtgctgcccatgtgtctccagaagtggaaagtataccttcacatctctgcctacaggcaaaagaaccagttttgaagcctatttctcttgaatagaatttcaggaagttcacagaatcagataataagagttgggatattcaagagaaagttccgttgagcatatttctacacaatgctcttttgagctaattcccactaaatactttgctgtgtgttgccaagttcctgtacctcttattaggtaaaatgctttgccctaaactccttgcagattgtgcctccctatgtactagaaaaataagattacattcttactacagcatgcaaaaaatagatgaatattcatcaaattagagaagattttaggatggactgacaaaagctacaaattaattctggaggctccctaaggagatggcaaataatcatccagagcagctgaaactgttatgagaccttactatccatgttgtgttactatcatggcttgtacaggaccaacatgccatgatagtaagacaacatggacaaagaaaacaagcctcaaatataatattttaggctaagtgctgcacattgcaggcattgatttaaaaaaatcttagaattggccggggatggtggctcatgcctgtaattccagcactttgggaggccgaggcgggcggatcatctaaggtcaggagttcaagaccagcctgaccaacatggtgaaaccttgtctctactaaaaacaacaaaattagccaggcgtggtggcacatgcctgtaatcccagctacttgggaggctgaggcaggcgaattgcttgaactcgggaggcagaggttgcagtgagttgagatcacaccattgcattccagcctgggtgacagagagaaacccctgtctgaaaaaaaaaaaaaaaaatcttataattttatttttttgagatgggattctcgctctgtcacccaggctgaagtgcagtggtgccatcttggctcactggaacctcttgggttgaagcgatttttgtgcctcagcctcccaagtagctgggattacaggtgcccacccagctaatttttcgtatttttagtagagacagggtttcaccatgttggccaggctggtcttgaactcctgacctcaagtgatccacccgcgttggcctcccaaagtgctgagattacagacgtgagccaccgtgcccggctgaaaattttaaacatatattcaaataacaagatgggtataatgaatttcatttacctattaactgagcttcaacaactatcaatgcatggtccattctgtgttactgaaatccatcgccctgcccaattatttttgaagtgctaaatgccatttcattaaaaattttagtagtaagcattgatttttaatccattgagttctcatttaactgcatatagtgtgcatgtaggtgagtagtagtagcgacttatttattttattattttttgagacggagtcttgctctgtcacccagactggagtacagtggcgcgatctcagctcactgcaaactccgcctcttgggttcaagcgatttgcttgcctcagcctcctgaatagctgggattacaggtgcatgccaccacgcctagttaatttttgtatttttagtagagacggggtttcaccatgttggtcaggctggtctcgatctcctgacctcgtgatccacccacctcagcctcccaaagtgctgggattacaggagtgagccactgtgctgggctagcagggacttatttaaaggtgcttaaataactaacaatgctataaatggcagcttttattttcatgtagtctagttttataatttggggggttttacactcagctttcctcctgattggatttttggtcctggaaaggtgaatccgtgtctgggtgttaattttcctgtgcactgaaagaggaggttgaagtcattagatcatcgttgaggttccattcagctttgaaaggttctgatctgtgaacctcatcatgtgaccatgggttggcatcttggccagtaagttctgacaaatattcatatgtatgttaacctgaactccaggctctgagttttcattggaatttgaatttccctgatctgggatttgtcattcccataattacatccctaaaccagtctgattttaacttctgcctggatactcttattttcctgcatattgcagctttgtttcatgtatctcccatcctcaaagaccactaaaggccttttgagaatttccctgcccagctttcaaggcctcctgtaatctgctctcatgctacaaaatcaactgtattttccacttgaatccaaatttcataactaatgctacaaattgctaccccagttgatccatatatatcattttaaatataagtaacttaaaaattttcagaattttacaattagtgtaaatttgtgacccattcaaaactgaaggcaacaaatcagtgtgttgcgagtgactgataacctactgaaacactttttttctccccagttggctgaatgtaaatcataataagccaatcagtcaccagtctggcattaagcccaaggaagaggctattctttgtccactccttgggtgttaaaatagcaaatagctgtgaatctagaggactgactctacactatcacaaaaagcccagctttcttttcactcaatcttgacagtaggtgaattaatggatttcttcttcttccacgttaataggcaactaagattctttaagttccagggtacgtgtgcaggatgtacagatttgttacataggtaaacataagtcatggtggtttgctgcacctatcaacctatcacctaggaattcagcccagcatgcattagctgtttttcctaatgtgctccctcctgctaccccaccccgtgacatgccccagtgtgttgttcccctttctttgtccatgtgttcattgttaagttcccacttatgagaacatgtgatgtttggttttctgtacctgtttgctgaggataatggcttccaggtccatccatgtcccttcaaaggatataatcttgttcctttttatggttgcatgatattccatggtgggtatgtgccacattttctttatccagtctatcattgatgggcatttgggttgattccatgtctttgctattgtgaattatgctgcagtgaacatacgtgcatgtgtctgtgtaataaaatgatttatattcctttgggtatatacgcagtaatgggattgctgggtcaaatggtatttctggttctagatctttgaggaatcagcagggaactaagactcttatcactgaaacctgtggccagctgggagggcacaaagtgatacatgcacttgctgtgacccttttaattccagtggtttgagtaacactatggtaatattggaagacacgccacagtgcaagtgtcagtcatgtgatgtgtatgcgatcattagaagtgacaggaggaaatgccaggctttgacttctgcacctccgcccaggcaaatgcagaggtatgtatggtgtatttacggtggctaagctaaatatgaaaactggttttaatggatgaaatgtaaaaactctaggtgtattccatactggttacctaaatgagtactctagcatctattataactgactcaacttcagtcagcctgaaatacctgtcccatcacagaaatggtctcccactaaataatgctgagcaaagctctaggtacagagcacttcacagtacagagctatgtttgaagtttgggctgggcgcggtggctcatgcctgtaatcccagcactttgggaggccgaggcgggtggattacctgagctcaggagttctagaccagcctgggcaacacggtgaaaacccgtctctactaaaatacaataaaccagtcagtcatggtggcatgtgcctgtaatcccagctactcgggaggctgagacaggagaatctcttgaacctgggaggcggaggttgcagtgagccaagatcgtgccactgcactccagcctgggtgacagaacaagactccatctcaaaaagggaaaagtccgggttgaagtgcatattctactccaatagcagttttctagtctgtgcgcctggcatacttgagtttagtaagcatttgtgaaaatactattcaaatgttagctgtaatacaaaataaacatacctgaatgattatcctgccctcttttgggaggaaacatgtattactgcctctgttctcaaaaaggtttatattctgtccttgattgttttttcatgtacctagagctttgctcagcattatttagtgggagaccatttctgtgatgggacaggtatttcaggctgactgaagttgagtcagttataatagatgctagagtactcatttaggtaaccagtatggaatacacctagagtttttacatttcatccattaaaaccagttttcatatttagcttagccaccataaatacaccatacatacctctgcatttgcctggtatgcatttgactatgtaataggtagtagtggaggttaggaagggaacatggaaatacatgcatagaatgaattggaagatgaaacaattttattttctttgtagggacagtctatattggccaggctggtctccaactcctggactcaagtaatcctccagtctcagcctcctaaagtactgggattacttacaggtgtgagccaccagtacctagccaaagttagttttaatgtgagagtcaaggactacagtggcatgctgaggtaacaactgcaggagcatcgaggtaacagcaaaaatcttttactccaattgggtcaatccagttaaccatgtaagaaactcctcacctagggtcagtatgttacttctgtatttctgcaagcacaatccactgacataaaagtctaataattagactttattgtaagtctaatgtatcttgtacatgataaaatgtatgaactttggatcaatatggcaagctgaagacacctgtcatgtggggggactattttgtttgggtttttttcccccttcctcatgttacctggtctaagaaggaaagttttttggttttgtttttgctatgattgtctaacttttcctaatcaagttgtacttgggtttttttataccaatgattaactttggttttgtattttaaaaagcaagggattttcttaaaaaattccatccagagtttggttttgcccctgctgatgctttcatcaggtaaagttacaactgacaaaacatgactttattgaaataagcattctgaaagggcatcatgttccttgcaaaggaaatgggaaaatgcattatctaatatcttcatattgctaccttaatagcttcaccagttattactcagagttttaaaatgagtttattaaagaaggttcttaggaaggcaacaacttttgtccttaaaaaaaagttatggtttttcatgctgtataataaaggtgatgtaagaggctacagagttacaagtttctttctactggaattctctggtatagcacagtgtagtcatttctgcaattctagaataaataaaaagtctcttctatgcttctcttcaaaagcaatgaataacagaagatggtgtaaaaaagtcatattttttctattcattctgtagtattggagccagtatctaggaaacaaaagagaaagtaaagtaaagtaaattcaaggagcaatttaattttacaattaactattttaagactatcaaaaatgagaacacaggactaatagtggtggtggcttgcagggtggggaagaacaggaggaaaggtgacactgtaaatatgttgaacttcagtaagtttccttttaagcagagatacaaagatgcttagctcctcatattcatactagagtaaaactaagttgaactacatttggttcacataattgttacataacctttcttcccccaggtcctttactgtcccaaattttttttttttttttgagatggagtctagctgttgcccaggctggagtgcagtggcgtgatcttggctcactgcaggctctgccccccgggggttcacgccattctcctgcctcagcctcccgagtagctgggactacaggtgcccgccacctcgcccagctaattttttgtactttagagacggggtttcaccatgttagccaggatggtctcgatctcctgacctcgtgatctgcccgcctcggcatcccaaagtgctggcattagaggtgtgagccaccgtgcctggcaatttttttttaaagacagagtcacactgtgttgcccaggctggagtgcagtagcgcaatctcagctcactgcaatctccacctctcgggtttaagcaattgtcctgcctcagcctccgcagcagctgggattacaggcgggtaccaccatgcctggctaatttttgtatttttagtagagatggagtttcaccatgttggccaggctgctctcaaactcctggcctcaagtgatctacccaacttggcctcccaaagtgctgggattacaggcgtgagccactgcacctggcctactgtcccaaacttctaacactgcattcttttctgcagatataaagtaaatggaatacaatttaagctttccttgagtcaacaatcttctcactaaagatcaattactacaccgtgctgaagtgtgagggaaaatcctcaaaaactactgcaataaacaaggccaatctgctacttctcatccactga

SEQ ID NO: 673 - DNA, 176071 bp, Homo sapiens
cggggccagggcagcgcggactcgcgtcccgtggagcgttccaggcgggcgcgcggctttctccccagacccaccgagtggcggcggaggcgagatgcgcgggggcgtgctcctggtcttgctgctgtgtgtcgccgcgcagtgccggcagagaggtgagcccggcccgggtcctagggtccctgtcccccgcaggcgggcgggcgggggcggccgcggacaaagcccgtcgcgttggggctgctggagtccgggcgcgcatcctgatccacctcggagtgggtgtctcggccacgtgggtctcccgcgcttgccggggagggctggatggggacgccgctcctgccggacgctgcccgctctttgcaggcttaggctttaacctcctcgggctttggggttaaagcccagcctcgcctctggcttttgcgggacttcgcgacccaggagcgccatctacgcgagcagtgctgggggtggcgggagcggggcgcccggagcggggcgccgggggttgcttttagtgccccggctgcgcgggcgggggtggcggggctgttggccgggcgcgggggatgaatggagaaagagctctcccgagtcgccctcattgtccggctgcgcaagctgggtcgcggcggccgggaaagggcggattcctcggggcccctggcagccaagcgggctagtggggagagacgcggcgagaagggcgcccctagccagccgtcccgggcagggggacccgcaggcggcgtccagggcactgatgcgccttcccgacccgcgctttttgtgcaataggcgaagtggccaaacccgctcattcactgcgcgggattgaccgtgggcgcgccggggcgagggaccagcggagaagggagcaccttgcatgcgcgttgcaaggattgagaagagaaactcagagcgaattttcattttctgtttttgcgggcgggcggaaagagagagagagagaagaaagaaagagagagagaaagagaaaagaaagagagagaaagaaagaaaaagaaagaaagaattcttttcccttttgggggacaaccctagtcacccacgccacccctagagctgtcttcgcagcgtggcttcgtgttggctaggcagtcacaaatatttgttgaaaacatcttaatgtatgcagcacatgacaatgggcgtattcccacgaatataaacttcattaaaaaaaaattcgagtcaaaagtagtgggcggaatttgcagtgccctcgtgggaaacgtgtgtttgggcattgtgctgagttgtgagctctgcagaaacgcgaccatctcattcattcaagcattcatgatggaagcactggaccggagctggaaacgcagcattgaatagctgcgagtctgctgcgcagagccaggctgggaagagggaatttacatagttatcagccagaagaaaggagcctttggggagggagaggagccttaaaggattgcgaggggactcctgtctatcaggctgctgaaggtgaacaagtcccggtttcccacagggtagagaaagagcagcttgcctcagcttattgttccccgaaattgaaagtcttagactgaggagatggcctgaaggttgtcctggcccctcggggctcggcacttggcctggcggttatgagtggtttttggagaaagtgggacctcatggggctttcctgctttgagatgctgcggaaaacctcccagggcaggagccctttaatgtttcatatcgcattccctgtttgcctttttgccttccgcaccccaccaaccctcacccttcctaactagcctccttgagcagttttgattttttttttttgcagtctccgggctgcaggcaggagtggagtggcaccatctcggctcactgcgacctccgcctcccgggttcaaacaattctgcctcagcctcccgagtagctgggactacaggcgcgtgccaccacgcccggctatttttttttttttttttttgtatttttagtggagacagggtttcaccatattggccaggctggtctcaaactcctgacctcgtgatcagcccacctcggcctcccaaagtgctgggtttgcaggcgtgagccgccgcgcccggcctgattttttttttttttttaagaaacgattttgtgccccatgaatagcatgaatgatttgtaaagttgtgtgttttggtcaataatcctgacctgcaaatcacctgctagttagttgtctggtgttattttttaaaataacttattatctattgacattcagattgttagacgttccctgtcatttctgcagtctctctgggttaccttacagctcatagtatatgacctgatggctcactttcctttgaaatttaatgagtttcaagtgagctcctcctaagtattgaataggacgtattgtgtttgtaaaaataatgtgttaaattcatagctggcaatcacataaaattatggttgcttcatcacttttgttggaaactatcccttctttttttctaaaatagacaattctaaggacagaaaaaaatctacaagaaaattcacttcattctcatatatgacatagtattcaaatttagcaagtatgtgctccacagtaaagtatgcatgcctgaatggatttcagaggtgcgttttttcttttctgtcactgtattctctaagggcccatgaaaaatattgatcgtagcagttggaaacaagggtatgtgtaacagaagcctcactgcccacctcctacatagcctggactttagtccattctttttttccttcttcttttccagacattaaatatgaagcctacatctgtagttaatctagcatgattgagaattcaaatgcatcaagaatattagaataaatacatatactgatctttagtgtcttgtgccactgctttataattgcactgctttataaactcatataaaatgcttctgggaccatttatttcagggtaatgatccttgaaatgccctaccattttatactaattcattcataaaatcctatggatattcattttcatgtacagtaaattgttatggggaaataacacaaggtctgtctttaagcttcaggtgtttaattctctggctttactagctatggcaaattggggacataacgtgtgttttagtttcactgtctgtaaaatgggaataataatagtgcctacctgaaagggatgttaatgattaaatgaaataatgtgagaaaagttgttagaccagtatctagtacagagttaaccctcaacaagcaagtttatttatgttcatcactgttactattttataaagaactatatatttttaaactatattctccaaaatgcataattgtttagaaatttgaagtctggatttggaatcaaatagtcttgggctcaaatgccagacctgtcactttaattagctatggccatggctaagtttcttaacttctctgaatgtcagctttctatctataaaatggatagcattgatactattaaataatatgtgaaaaatattagcacagtgtagggtgtgtcataggtactcagtgcatgatggttattactgttacacctattgtacttgctcatcatcctggacatcatctctctttcattgctgaaatccatttggtcattgagacttattgattttacctcctgaaaatctgtgtagtctctttcccttttttcttttttttttttttttgagacggagtctcgctctgtcgcccaggctggagtgcagtggcacgatctcggctcactgcaagctccgcctcccaggttcacgccattctcctgcctcagcctcctgagtagctgggactacaggcgcccgccaccacgcccagctaattttttgtattctttagtagagacggggtttcaccatgttagccaggatggtctcgatctcatgacctggtgatccacccacctcggcctcccaaagtgttggtattacaggagtgagccactgcccccggcctctttcccattttttattctcactgctggctagacttaggaattgtttgtttttctcaggttgtttgtttttctcaggaaatagtgtgatggttcactcagcaggccagcagcctcacctgttctccctcctcagcagtgccatcactgtgatgtttctagaaacaccatctcgataaccgctcctactcttgtttaaaattcttcccatttctcaccgtttctttatcaaattacttaatgttccccaatgtgacttactttccttcatgtttaagcaagtggtcttcttccaaggtgtgcccttttcactccacatccttctccagggcccaccctataagtttagattatgtgccccaaacccctcactttataagatgcacaaaatgacagtgtcctgctgtgtcacattgggggtaaagcaaggaggctgggaccccagctggcctgctgtctcagagctgagaggcattatctgggatacgcctgcacctatttgtagctaactaatgtttcctggcacatgggctcttaagtgccggacacatctttcatttgggttctaaagaaccctggaaaatcttcccagctctctctctgctgaagtatttgttagacaaccttccctgtactcacagggctttccctgctcaatgctattgtcttgcctgtcatggggccaatgacttatctggctcaccttctctctcggccttgtcaagggcagggactgttttatgcatatctgttcattgctttgcagtgtttctagcagttagtagccacttcttgttgttgagctaagttgaaatgaacatctttatttaggaatcaagtaactttaaaaatattttgaatagctgggcgcagtggctcacgcctgtaatcccagcactttgggaggccgaggcaggtgggtcacatgaggtcgggagttcaagaccagactgaccaacatggagaaaccccatctctaccaaaaatacaaaattagccaggcgtggtggtggggcctgtaatcccagctactcaggaggctgaggcaggagaattgcttgaaccctggaggcggaagttgtggtgagccgagatcgtgccattgcattccagcctgggcaacaagagtgaaactctgtctcaaaaaaaaaaaatgtatatatatatataaaatacatatatgtgtgtatatatatatattttaatagataatccacatttatggtatgaaatgcaaaaggtactataggtagaaaaaagttaagacttggcttttttactctcttttgaggtaaccactggctttaattttttggataagcgtctaaagatgtttcttcaggtaacttttaaaagcaagctacatcataaaatctacttcttccctattagtgtaagagggacaccagtgattttctgccaaaacatggatgcatggaacagtatccctctgtccactgtcctcccctcatactaacttctttactggaccttgtgctggatattaacacatcatttagtaaatgtatgtacttgcaaacttttcaccttgcaacttgtccttccaagtagggctttgacagaaaggtattgttagagcagtgtttcctagatcttttggggtttaaaaacttgattgatttcatggcattgtactacttctaaaagtattgtttactatagtattaataagctatttttaagccatagagaattttaaaaaatatattttagaattttaagatttatgatatagagaagttgagtttgagaacaattctattacacgttaaggataagttaatgtattgaccaataagtatgacttattactggaacactatggcaggtacagaaaatatgtatttaaaaaaatttctaatgaagaagttaagtctacaccttgaatacagaaattaattgatagcgactggacagaactgtggaacttagaccttagctgaagtttttcgttacattcttcagaaatatttggatgaactagataaactatcatctcctaagaatgatgtatgtagttacttacaagtttgcaaataattcttttacttgttttatttctaaaatatcaatatgcatccatggacaattgaataaaccaaggcattgcaaaattaacgaggaggaaaaacccttcatagaagtaatttagttaaggtcatgaactttggttctgttggaacacgtctgtcagggagctatttcagcataaaacgccacacgatagctggattcattgtattttcatgtcctttatactgggtgtgacagtgcccagagtaaccatttgataataaatagcacagaatcttcccacttgtgtctttgttttctcaaggctggctcaggagagctttctttgggttaacttgttcctcatcttgcttgggggcaggaggcagacaatggaggcagagagattccaaatcagcttgggtagataacattcttgcctaggtaagcatttatctcgaagtgttaattcagaaatggtggcagagaaataccactgtgaaatcaccagtgtgacttcagtgtgcgtgcacattttttttttaatcaaccatttgaagtttgaatctcttcattccagaagttatctttgaagtctgatctgctggcccagcaggcagtatgactgacattcttgtgccagagaacctcctgtattgctggtgggaatgtcaaatttagatcaatgagtatttatggaaagtgccatcttttctcattcccgaaagtatttcctgcatcttgttccattgctccatagtttcctgccagaacttcaggagattctctatgacaatagcagtgttaaagaagatgcttaaatttagcagatgatttttagttaaaagagaacaattagaagtggggggggggagggaaaaaaaaccctcacaccacagttgattatggtacaccatacttttttctttgttttttcctttgacatggagtctcactctgttgcccaggctggcgtgcagtggctcaatgtctgctgactgcaacctccgcctcccagttcaagcgattctcctgcctcagcctcctgagtagctgggattataggcgcccaccaccatgccaggctaatttttatatttttagtagatatggggttttgccgtgttggccaggctggtctcgaactcctgatctcaagtgatccgcctgccttagcctctcaaagtgctgagattacaggaatgagccaccatgtccagcctacaccacacatttaaatgtcttccaaccttttggtaatgacagaattttacccacaacaagtggaatcttgttatctccagctcaggacaaggaattcgttctttctccagatggctgccctccctgtttctcctgttcttggcattcttttggttacctaggcttcatttccttttctgtttttctttttctgtatccccttatccaaattgtctctcttaattttgtttctttccttgaaaaacttcctgatctttttgttttagtttctctctgttagcactgcaaatgccaccagcctctaaaccagctgctatagtgtaactagccgcttttttttttttggcagcgggtggggggatggagtcttgctctgtcacccaggctggagtgcagtagcgtgatctcggctcactgaaacctctgcctcctgggttcaagcgattcttctgcctcagcctcccgagtagctgggatcacaggtgcgcgccactacaccctgctaatttttgtattttagtagaaacagggttttatcatgttggccaggatggtctcgatctcctgaccttgtgatccacccgccttggcctcccaaagtgctgggattacaggcgtgagccaccgcacccggccagccggctgctttttatcgggtctgtgatgctagctcgtgtcctttcatttaatccagtcccacactgcagttagagtaaccccgccaaaataccgccttcgtaatgttctccctctgctcctgcccacctgctatggccctcagtgatccctccaagttcagtcaccccgcccttctccacacctttctgtagctgaactattagcttccattgcaggggtctccttcctgtctaactgcacgtggtatattgacttgcagctgtgtgatttggttacatgactctctcacctgaaatgtactcccgtttcccactgaaaacctaaccagaccactcatgcacaggctgcaatataccaaccccaggacagcctcgatgtgatggcctgtttcaactgtctcacttctgaatctgcattgtattttgtgataaattggagttcccacccagccaaagttgccatccggtcctcttttgaatggctggtccagaatgacatgagccagtgtcaaaaagaagggacatttctgtttcgaagatcaaaaccttagctcccggcatttctttgaatacacagacaaccccaggggggttctagcattaaaacctgggtcattagtagccggagggcagtaacaccgaggaactccccacaggtagtcaggttgcctgagcaaccataaagccggtccccggactctggataacaaacccagccctggcacctctctgggtatgtggtccttcagcctcttagactttgtatcatccaatcaaatggattgcagttgatttgatctgggtaggaaccaaaatctgtgtttcaaaaaaccttttcccattttgtatccagaggcacaagaacctttccagttggtcttcaagcagaccctttgggtttctggttcaaatagttgtttccagaactcttcctgccactgcttgctttctgtccttgctgctgtgtcctgtgatgggctagcactctttccccacccgtcaaaatccacagtttgtctcttcagcccttttatctgaatctccaactctgccatttttacctttgcttttgtacaaactaagtttttccaactctttgcaacttcacccctggcttcatgggcatacttttgttcattctagaagtttggagtggggagaactggagataatgcatccacatatgaatgcttttggaagctcccagtgtttttctttaaaagggagttagctttttttttttttttttttttttttttgagacagagtctgtctcagtgcagtggcatggtctcggctcactgcaacctctgccttccgggttcaagcaattctcttgcctcagcctcctgagtagctgggaatggcctgccaccacacccagctaatttttgtatttttagtagagacagggtttcaccatgttggcggggctggtcttgaactcctgacctcaagtgatctgcctgcctcagcctcccaaagtgctgggattacaggtatgagccaccatgcctagctgggagttagcattttatttttatatttatttttttgagacagagtctcgctctgttgcctaggctgaagtggtggagtgcagtggtgccatctcggctcacagaaacctctgcctcccaggttcaagtgattctcctgcctcagcctcttgagtagctgggactacaggcacacaccgccatgcctggctaatttttgtatttttagtagagacggagtttcactatgttggtcagggttgtctcgaactcctgacctcgtgatccacctgccttggcctcccaaagtgctgggattagaggtgtgagccaccgagagagttagcattttttcttttctttttttttttgttattttttttatttgagacggagtctcgctctgtcgcccaggctggagtgcagtggcgcgatcttggctcactgcaagctctgcctcccagattcacgccattctcctgcctcagcctccagagtagctgggactacaggcacccgccaccaggcccggctaattttttgtatttttagtagagacggggtttcaccatggtagccaggacggtctcaatctcctgacctcgtgatctgcccgcctcagcctcccaaagtgctgggattacaggtgtgagccactgagaaagtattttagagttaacacctcattggagaggagaatagtatttccttataggagtattgtcatttctattcagtttttaaattttttttcatgcacttgatcattcatttattcactcattcatccatgcactgaagacactttgggacctccactcctccaggccctgggtcaaggatgttcaaaggtagtgtgtctggagagccctgttctcggctgccttcctcactgtgaatccaggacacttcttggcattcttagtgtatttgtttttgaagtccaaggaactgaaaagtgcatatatcaaaaggagttttctggctgggggcggtggctcacgcctgtaatctcagcactttgggaggcggaggcgggtggatcacgaggtcaggagatggagaccatcctggctaacacagtgaaactccgtctccactaaaaatacaaaaaattagccgggcgtggtggcgggtgcctgtagtcctagctactcaggaggcagaggcaggagaatggcgtgaacccggcaggcggagcttgcagtgagccaggatcacgccactgcacttcagcctgggtgacagagtgagactccgtctcaaaaaaaaaaaaaaaggagttttctccataagaaatgatgatcaagtaaggagttaaagtcataggagtggacattgccatctacgttctgcttgctcatattcatgtaagttaggggtgaaatgagtagtccaggtcatgggtcgaggaaagcgggggaggaggggcagaggcgtgcagcactggctggctgctttattggaggtgcggggtcagcttctacatcatatgccactgttggtgggtggtggctgtttcccttaggcttcctttcttccatggagaactcagagtcacctgcttggccagcacttctgtgtgtgtcagaagagcagactcaaacagtgacacagaagttccctctgtgggctgcacattaaatttcaataatatcaatacccaggtcttactcccagggattatagtgtgtccggtctggggtgggggtcatatcatttgcattttaaaaatgcttctggccgggcgcggtggctcacgcctgtaatcccagcactttgggaggggccaaggcgggtggatcacgaggtcaagagctcgaaaccatcatgaccaacatggtgaaaccccgaatctactaaaaatacaaaaattagctgggagtggtggtgcacacctgtagtccgagctacttgggaggctgaggcaggagaatcacttgaacccaggaggtggaggttgtagtgagctgagattacgccactgcactccagcctggcgacagagtgagactctgtctcaaaaaaaaaaaaaaaatgcttcccaggtgattccactgtgcagccagggttgagaaccactcagttaacatcataaactttgtaggtgaatgcagtttacacagcaatgcaaggaggcaggatctgccaccatccctcgctttgtctgtagggtgcaagttggggcattgatcccgtcctgcccaccgcagcccacagactagtgctctgtacataacagatgtggaatactcgggtcccaactgactctcctcatttcatgtctattttctgatattcccacagctctgtgaagtggggataacaacacccacacatctcagagctgtgagtaatccctgcacttagagaccacgttggatcagtgaagtggctcagggaaagccagtttcttctgtgtccccattgtcccttgtgtaatgttttttacttggaaagttctcacctgatggttcattgttgcacttgtgtttaaatgggtttccccacagtttagtcttgctttgctgacttggtcattcgccaagacccttctttgaaaaatactcttgatcatgtatgacatttagagtcctcaagttttgggataaagtctggtgttgcagaattgggtgttgattgatctggtgttgcactgaattgttcattctttaacgaattcatccaaaatttaaaaagtgtcctccatattcaggcattattctgtgccgcatcccttctttctcaatgcctttaaatggacaggtcacaggagccttttctttgggattatctgggccacccccttcttcccttatacaacctgctgatctcctcttgcaccttctcatgtctggcgactccagggtctagctgtctttattcacctactgctcctgtcctcttctgctcttgtttgtttatttatttatttatttatttatttatttatttattttttgagatgaagtctcactctgtcgccgaggctcgagtgcagaggtgcgatctcagctcactgcaacctccgcctcccgggttcaagcaattctgccacctcagcctcccaagtagctggattacaagcaccagccatcatgcctggctaatttttgtatttttgtagagatgaggtttcaccatgttggccaggctggtcttgagaactcctgacctcaggtgatccacctgcctcggcctcttgaagtgctgggcttacaggtgtgagccactgcgcctggtctgctcttatctttaataattgataattcattatgcacttgcttttctggcctccttcagaagttttcctcaatatttggcttattatttctcttccacccaacaaaacgagccattttcctttccatatccctgtcacactcagacatacatgcacacacacaccccttacacatctgcctatattgacttacagaccagctgcctacctggcttccctgctacaggcacttggggaggtatcgcactgaacccaaccgagcagagccagaacctgggcctgggcccgtctgcagggtagagcaggttcttctggaagggccagtccagctgcaagtgctgggatgaagtccaatgtagcatgtaatgtaacagttttccaagagcccagaaagctgttgacattggaagttccctctgagttaatggactgtgaggttgaccgtgtcatgccatccctgttgaattgcttcaatggcatctcattctctattgagtgggacttctaaggccctgtgtggtctgaccctgcccagacctctccacagcctcttctcccactgctaaccacatctcgaccattctgtgatatctgtagttccatcacgggagcttcatttcacctatggcactctgacggactccagcccaccctgtcatccttcttattgtttccatagcgatttctttgtacatctgaccagtacaccatttttcacctatttgttgacttgcctgtctctccttaagggccgagagttttgcctatatttgttatgcctagcacagtgcctgacatacaatgtagattctgtaaatatttgttgagtgaacaaatcccaatacagacaagcaatggaaatctgttaatagtaggtattggctggacgcggtggctcacgcctgtaatcccagcgctttgggaggccgaggtgggtggatcatgaggtcaggagttcaagaccagcctggcccacatggtgaaaccctgtctctactaaaattacaaaaatcagccaagcgtggtggcggtcgcctgtaatcccagctactcaggaagctgaggcagagaattgcttgaacctaggaggcggaggttgcagtgagctgacatggtgccactgcactccagcctggcaacagagtgagactccatctcaaaacaaaaacaaacaaacaaaaataatgggtattatttagagaccagacagacggacagaggggttagggcagtaactagtgaggaagcagagcgaagatccgctggggaggggcaggggctggctccagaaggctaggagacctcagtgggtcacccaggcaggatttttttttttttaagacggagtcttactctgtcacccaggctggagtgcagtggcacaatctcggctcaatgcaacctccacctcctgggtttaagcgattcttctgcctcagcctccctagtagctgggactacaggcacccaccaccatgcctggctagtttttttttggtatttttagtagtgatggggtttcaccatgttggccagactggtctggaactcctgacctcaggtgatccaccacccatctatctcggcctcccaaagtgctaggattacaggcgtgagccaccacaccaggcctcaggcaggatttaaaggtggaacaaggaagaatccaggtaaccagactaagaaagagaatggatagaacttttggaaccaaggcctctgctcacattattttttttattttttatttttgagatggagtctcgctctgtcacccaggctggagtgcagtggagcgatctcagctcactgcaagctccgcctcctgggttcacaccattctcctgcctcagcctcccgagtagctgggactacaggcgcccgccaccatgcccggctaattttttgtatttttagttcaccatgttagccgtgatggtcttgatctcctgacctcgtgatccgcctgcctcggcctcccaaagtggtgggattacaggcgtgagccaccgtgcctggccggcctccactcacattctaaaccagaatacaaggtcaggaacaagccagcagcagaaacaagaagttcagacactctctgcactcatgagtggagtccaaatatggttacagaaaatccacagaatctagtaaccaggaggaccctgatgacttgaagacattattaatctggcatgttctcatctacccaatcaatgcaaagaagaaatggattacattttttgtaataggattatttactgatgatgaatattccattcagccttaaaacttacattatactcaacaaaaacttatttctagatttagagccactgatctctagccagaaattcattaacacacatagtcaacaagtatttgttgagtatctagaaagtgccatacaggtgacaggtggaccttgtactccagaccccagtgctaggagtcaagcatgagaagtgtccaagaatcctactaagtgtgttcctcagttcagatttgggagcggtttctgtttctgaaagtctcagacacctgtatcactccacttattgctgtgggatagtatcatcgtcaacagaaagagaattgtaattaaacactacatttctactgcatgaagtctccttttaaagaatatgacttcaaaatactctaatgtgactgcagacttgttggcatttgctgagtagtgatatttttacgtatagtagaggtttttcttttttttaagggaactctacctgcatggctttaaagggctttctttaagtgagagaacagctgttctcctccaggcgttctgggctaagacttcctcctcctctcaggaacagaacaaaggcatacagaatttatgtcatagatggatttttgtttgataaatatcacttattactaaacaaaagaatggcccattctctttagaaatatgagcataacatctcctttgtctttagtggtttctaactttgttggtttacttttaattattataattgactgaatttaaatgggccgtgttttatataatcaaactttccttgaaaatgtatgtataagatggttattggtaaagggaataatttcaaattcaatattaaaataaatccaaaataatatttgaaggaatcagctaataaagaaaataaccctttggtcactgttgtaggggccagatgtggtggtcacacctataatctcagcactttgagaggctgaggcaggaagatcccttaagcccaggagttcgagaccagcctgggcaacatagggagacccccccagctctacaaaaaaaaaaaaaaaatagaaattagccaggtgtggtggcatgcatctgtagccccagctacttaggatgctgaagcaggaggatcacttgagcccaagaggtcgaggctgcagtaaactatgattgcaccactatattctagcctgagccacagggtgagaccccatctctaaaaataaaaatataaataaaacgtgtatccactttttggtggataatggaagccactgaagaagatggaggtacacgaggattggttagtccctacaatctgaccacatagataatcacaagagaataacttggatccaacacgcacttctgcaatacacattatgaacatacctttactagcaagcagactcataacaagtcctaggccatatccttcaaactgatagtcacagctttctgtctttttgggtattcagacttctctcttggtgattggccgccttcctaatgctggatacaggacatttcagggatcaagcatcaggttccatcaaattccttcaggatgtgagtttcaggccacataaatttataccacttacttacaagagtgaggagaatctctgttttaacagttttattgtagtataatttacataccctaaacctctgccaattgttaagtgtacagtttaatgttttttagtaaatttagagtgctatacaatcacagtctggtatgaacctttccaagactgcagaaagtgtcatcattttcatttgtgcccagaaatcttctgctgtctgtactttgggaagtgcctgttctggaaatttcatatacatggagtcatacaaaatggagtcttttttttgagacagagtccagctctgtcataccccagctctgtttcccaggctggagtgcagtggtgtgatcttggctcactgcagcctccacctcccgggttcaagtgattgtcctgcctcagactcccgagtagctgggattacaggcacctgccaccacccctggctaattgttgtatttttagtagaggtagggtttcactacattggccagggtagtctagaactcctgacctcaagtgatctgccagtctcggccccccaaagtgctgggattacaggtgtgagccacctcacctgaccaaaatggagtcttttgtgtctacttctctcggttagtgttttctaggttcatctattttgtagcatatgtcaataatgttctactttattgctgaatggtattccagtgtgtagatacaccacattttatttattcagtcatcagttgatggacattttgattgttttcaggtttttggagctatcaagaagaatgctgtaaacattcacatacaattctttgtttagatataggtttcatttctcttgagtgaaattcctaggattagaatatggatcgtgtggtaagtttgtgttttccaaagtgtctgcactgttttacagccctaccagcagtgtctgagtgttccatcttccccacattcttaccaacactatgcattacctgatgatagacatacagtgagttcaaagtggtatctcatggtattattttgtatttctccaatgattaatgacattgagcatcttttcagatgcttcttagccattcatatatctttggtgaaatgtctattcaagtattttgcccaatttttaatcaagttgtttatattcttagttaagagttttgcatatttcctggatacaaagtctttatcagacatgtgatttgaaagtattttctcccagtctatgcttgtcttttttttttttttttttttttttgagacaaagtctggctctgttgcccaggctggaatgcagtggcgcgatctcggctcactgcaagctccgcctccctggttcacgccattctcctgcctcagcctcctgagtagctgggactacaggtgctcaccaccacacccggctaattttttgtattttttagtagagacggggtttcaccgtgttagccaggatggtctcaatctcctgacctcatgatctgccctcctcagcctcccaaagtgctgggattgcaggtgtgaaccaccgtgcctggcctatgcttgtctttttgttttcttaatggtatgttttgtagtgccataggttttttttattttttattatttttatgtttgttttgatgaggtccatttgatcaattattttcttttgtgggttattcttttggtgtcatatttgagaatttctttgcctaatccaagatcttaggttttcttctggaaagtttataatttagctcttaaatttagctcttatgatccatttgagttagcttttgtgtatggtaaggagtcagggtgtaagttcatttttttttttgtttttttttaaatttatttattttttattgataattcttgggtgtttctcacagagggggatttggcagggtcataggacaatagtggagggaaggtcagcatataaacaagtgaacaaaggtctctggttttcctaggcagaggaccctgcggccttccgcagtgtttgtgtccctgggtacttgagattagggagtggtgatgactcttaacgagcatgctgccttcaagcatctgtttaacaaagcacatcttgcaccgcccttaatccatttaaccctgagtggacacagcacatgtttcagagagcacagggttgggggtaaggtcacagatcaacaggatcccaaggcagaagaatttatcttagtacagaacaaaatgaaaagtctcccatgtctacttctttctacacagacacggcaaccatccgatttctcaatcttttccccgcctttcccccctttctattccacaaaaccaccattgtcatcatggcctgttctcaatgagctgttgagtacacctcccagacggggtggtggccgggcagaggggctcctcacttcccagtaggggcggccgggcagaggcgcccctcacctcccggacggggcggctggccgggcggggggctgacccccccacctccctcccggacggggcggtggccgggcagaggggctcctcacttcccagtaggggtggccgggcagaggcgcccctcacctcctggacggggtggctggccgggcggggggctgacccccccacctccctcccggatggggtggctgccgggcggagacgctcctcacttcccagactgggtggctgccggtcggagaggctcctcacttctcagacggggcggttgccgggcagagggtctcctcacttctcagacggggcggccgggcagagatgctcctcacctcccagacggggtcgcagccgggcagaggtgctcctcacatcccagacggggcggcggggcagaggcgctccccacatcttagacgatgggcggccgggcagggacgctcctcacttcctagatgtgatggcggccgggaagaggtgctcctcacttcctaggtgggatggcggccgggcggagacgctcctcactttccagactgggcagccaggcagaggggctcctcacatcccagacgatgggcggccaggcagagacactcctcacttcccagacggggtggcagccgggcagaggctgcaatctcggcactttgggaggccaaggcaggcggctgggaggtggaggttgtagcgagccgagatcacgccactgcactccagcctgggcaccattgagcactgagtgaaggagactccgtctgcaatcccggcacctcgggaggctgaggctggcggattacttgcggttaggggctggagaccggcctggccaacacagcgaaaccccgtctccaccaaaaccagtcaggcgtggcggcgcgagcctgcaatcgcaggcactaggcaggctgagtcaggagaatcaggcagggaggttgcagtgagccgagatggcagcagtgcagtccagcttcggctcagcatgagagggagaccgtggaaagagagggagagggagaccgtggggagaggggagaggggagaggggagagggagagggagaggtgtaagttcattttttgcatatagatatccagtggtcccagcaacatttgttgaaaattgccttcgcacctttgccaaaaatcaaatgaccataaaaataagtatatacttttggactctattttgttctattgatctatgcatctgttttatgctaatatcacactgtctggacttctttggctttatagtaagttttgaaataggtagtgtaagtcattcaactttgttaactttttctaaagtgctttaactgttctaggtcatttgtatttccaattgtatcagcttgccaatttctacaaaaaaaaaaaaaaaaaaagccagctgagattttgatagcaattggatggaacctacagatcaatttaaggagaattgctgtctaacaatattgaatcttcccgttcatgaataagaaatatcttttcattcatttaaatcttctctaatttctcccccaaaatttttataggttttctgtgaataacatttctttcattgaatttttcttgaatttctttcattcttttttttttattattttttttgttcaagtattttgttccttttgaataaagaagcctggtgtggatggagagctgatccagcccttctgtggctctcctgtttccaggatctcgttattacaattttggctggtccagctatcggttgcatgcaccctactgggactaaaacctcaggctagcccagctgtgagctttccccattcattttctaccaagttcactacttttgctgataagatcattaggcatgtgcttctgctctgctctgaatcaagccagccttctccatcagtggagctgctggctttcacggctagccctgccttaggaaactcccctgccgacgggctggggtaagaatggagctgcctctgctggaaggacgctctcttccacgcatcttacccaaaactctagcagcttttcctaaagaaaagcttgccagtttgttgtttgtcttaagatgattttcagagtcctgaaatggttgcttttgaaaactttgttcacttacataatttttttgggtgggagagaatttgtcaacttccttattatgccatagacaaaagttgctctatattttatatatatacacatatggaatggggtgggggagagatagagagagagagagagagtgtcttgcttggtcacctagactggattgcagtggtgtgatcacggctcattgcagccttgacctcctgggctcaagagatcttcccacttcagcttcctgagtagctgggactacagacacgcactaccatgcccagctaattaaaaaaaaattgttacccaggctggtgttgtactcctgggctcaagcagtcttcctgccccgacttctcaaaatgctgggattataggtgtgagccacgatgcccagctctaaaatgtaattgatatggagaccttgactaccatgaatttcaccagtggaaatctgtttccattagtcatcatgccattaacaatccactgattttactaatatcccattgctatattctccctggtaattaacaaagtgctgctgtcatggagacagaaagagcagggtgcctctggaatgtgggcagtattccggattggagaaccaccagctaactatccaggaagacacatcacctgttttaatactagctgcttaacctgtgtctctcacacacacatataccataccacagtctatactgaagtattttctttttttttgagacggagtctcgcgctgttgcctgggctggagcgcaatggcgcgatctcggctcactgcaacctccgcctcctaggttcaagcgattcccctgcctcagccttctgagtaactggaattacaggcgcctgccaccacgcctggcgaattttttgtatttttagtagagacggggtttcactatgtttgccaggctggtctccaattcctgacctcatgatctgcccgcctgggcctcccaaagtgctgggatacaggcgtgagccacagcgcctggcctactgaagtgttttcaagctatttaactggattttcacctttagtcaaacctcactcagttaatgtctccagtttgagtaattgtcagcacactgaagtaaaggagaattccgtgggaattgcagtccctgagaggaaacagatgccaaattcaaagaagggctctttgggctgcttgggcccatagccccagaagctgaaagagagctggcactctcctggaaaccaatgaggcccttaaacttgccagccttcttcagagctggagcctgggggctggagacaggaaggggagggctcctggaggagaaggggtagaaagtgcaaccaagaactgaaagggagaaaattcactgttctgtgtgtacatcatagtggggggtgtagtgaggatagaccatttgagtactaccagtttgttttaaaagaaaatacattaaacaaggctcgcataaatgtgatttaagagagtaatctattaatgtggtccagcctgggttttgattccttcattaccaaagtgtggacataaagtaaattttccgtcactgtattatcataatacaaatatagggaagaacttaggaaatcaaaggaaacaaattgttaattttttaatgacagcagaggagagagagagagagagagagagagagagagagagaaaggtcctgaggcaaccagggaacagcttgtcaatttctacaaaaaaaaaaaaaaaacagtcaagggatattgctggaatcggatagaatctatagatcaatttggagagaactgctatctcacaatgttgaatcttcctatctacaaataagaattatctttttattcatttagaacttcttcaatttctcgaaaaatgtttataggttttcagtgtattggtcttgaatttattttgttaaaatgtttttcctaaatattttattctttttgaataaaactgagaaatttatagttctgggcactgcctgtgtggatggggcctgaactgcactggtttgacttaatagatttccctggttgttactgagttgaacttgttcctatgttgtgtccttagttttggaacccttgaagtttttcctcttaacagtaagccaaaaacctttgttttaactgaagtaccacattgcctttaaaaatagttgctaaaggtctccaagacttggatgaagagtgaggaatctggagttctagttaaatagtgacagaaagctgctggaaggagtgagagcttatgaagcagtctgatgatcttgtgccaagtttggctgaattggttaaactcagggtgtttgagctggaaaaaaggtccaggagatcatctaatatcttttttttttttttttttttttgagacggagtcttgctctgtcacccaagctggagtgcagtggcgcaataatctaggctcactgcaacctccgcctcctgggttcaggccattctcctgcctcagcctcccgagtagctgggactacaggtgcttgccaccacgcgcggctcattttttgtatttttaatagagacagggtttcactgtgttagccaggatggtcttgataatttcttgaactcagtgcagcatcccctgggaacttgttaaatcgaagtatctcagccccactccagacctactgcatcagaatctgcactggaaccggatacccaggagatttgtacatgtgaaagtggagaagcccttggctgggcgtagtggctcactcctataatcctggcactttgggagactgaggtgagcagactgcctgagcttaggagattgagacaagcttggacaacgtggcaaaaccctgtctctactaaaaatacaaaaaattagccgggcatggtggcacacacctgtagtcccagctactcccggaggctgaagtgggaggatcccttgaacccgggaggcggaggatgcggggagccgatatcgtgacactgcactccagcctgggcaacagagagagattgtctgaaaaaaaaaaaaaaaaaaaagttgagaaaccctgcagtaattcttatctctctaccttgtgcataattaaatcttagttatcaaatgtgtgaatgctaaagggtcatcttccatctaccttaatgttatggtattattaatcaaccttagatcatgttagcatttttcctagtgctgttctcacattgtgcacacctctcacagagaaccataacatcttttccacctttgccaggacttgctgtgcttgcaggtggattttgggggaaaagtggaaggtgctgtattgatccctactaaacttactctggttttattttggccactcttgagattcccctaattccatgtacttttcacacatttgatgcctttttttttgaccgagtctggctctgtcgcccaggctggagtgcagtggcgcgatcttggatcactgcaagctccacctcccgggttcatgccattctcctgcctcagcctcctgagtagctgggaccacaggcgcccgccaccccgcccggctaattttttatatttttagtagagacggggtttcaccgtgttagccaggatggtcttgatatcctgacctcgtgatccgcccgcctcggcctcccaaagtgctgggattacaggcgtgagccactgtgccccgccatttgacgcctttttaataccattatctaagtcaggatttaaaatattgaacaaggaagtgttgggtacacagcatggaaaacccagttctctgctcctcaattcggtatactttatgttgcttgcgtcctttttaaagaccacattttgggaaaatatactccttcccaggttttccccatgcgattgcacctgtgcggtgaatgagcatgtgctgccaccacaggaaattgattcacatggagacctttgggatggccagcagaagagactgagaagttgcttgagggaaaccacgagtctgtattatgatgtatgatgtatgtatgtagcatgatatatgtagcgtggagaccaaaagaaacagggtttaagaaagagagaaagatcatttttgacaaaagctgctgcaagttcaagtgtactgaaagtaaactgcttgttgggtttgccaagatggaagctatggagaccttgcaaagggcattctttttttttttttttttttcccgagacagagactcgctctgttgccaggctggagtgcagtggcctgatcccagctcactgcagcctccacctcctgggttcaagtgattctcctgcctcagcctcccgagtagcggcgactacagtgcgtgccaccacgcccggctaatttttttgtatttttagtagaaatggggtttcaccatgttagccaggatggtctcgatctcctgacctcgtgatccacctgcctcggcctcccaaagtgctggcatgagccaccgcacccagccggcattcttagtgattaaaaggaacagcttctcagttggaactgagtgaagagagaatgtgaggcaaagaattggagacaatgaagacaattcttgttatatacagccttaatctaggaatagccttttgaaaaagagaaaaactaccaggttcaaagtatatgtgcttataaagaggtggcttcatttcaggggaaaaatggtactagaactgagaaaatatagtgttgtatcaatcccagtgagaatgacaccaaaataatttaactctgtgcacctgtgatcagagtgttttgttgttaaatatatttgtctgccattggtgcataaggtaaaacgtaactcaaatgatttctttgtctgtaagatgaccctttagatatgtactggaataaaagtagctctaatcctgtggatccagccaccttggggtcttcgtgctggtgttctgttagagatggtgatgcatttgacatctcaagtgccaaatgatttgatcggaggtactggtcactggacatttttaaggacaatttcttattgcagttaccactaggcacatgcaggaccagtcatgtaaattgaggagccagtgcaaagtgaaaatgtgggactctttctttaaattattaaacatttcaacagtttcagcatagcactaaacgaaaagtgattgtgcaggtcacatactcatgaaatggtcctcagcacatgccccgcgatagtgaaacaaggatgctaaagttttaaagcataagcaagtaaaatctgtacaatcaagtgcagaagtggcagaagaaagggaaagaaataactaagaccttcagggttttgtagaaaagttcatggcctttggaagtgtttgggctggtcagaaaactggtgttttaagtatttaaaggatataaatattgtaagtgtcataaatgatataagcaaaatttaatatagctgcattttaatccaacagtgttgtcattattcaacttaaaggctgcatttgcttttttatttttcacctgtaaggatttaggagagaggtacagtgacttctcaggacaatgggaatgatatgaaattttaaatgtgttgcatattgtggtgctattgtgttttgcgtaagtgcaataataattttaatcaggtagaacatttaaattgttgtccttggaaacaaaagagaaaactgcttcacgatgaatgaattaaagttcttttctctgccaactaaacttgtatactaaatgaaaaatcacagagtcattgaatatgagcatttaaatgaaccattgtgagaggagtaagtggatactgataacatactgtttttctgcagaaaatatttgtggttaacttgttcataccatgtgtttctcttacaatcaaaacctctgtctttttcaaggacaccttgagcacattgctagggaaatggaactcttaacaaaaccctgctaaatccttctgcttaccaccccctcttgttttctgattaaacttctcttcatcgtctcacatgaggggggaaaagaaatcaacttgttaaatgccagactcccaggagtttggatttgacttttctctcactgtttgtatggggtctttattccctccctccctccctctctccctcccttccttctctctctttttctctctctctctctgttctctttctttctttcaatatctctccctgtctttctttctcaccacccacatattttcttgtcctgtgttggaaagggctttggtccttgcctggtggaatcgctagaatatcttaaagcttttcttttactaacagccatcaatgattactttggtttagtccaaaaaccaagaatttgcttttgaaggagggggttattctccccttagtgtttctgcatcaagctgaaagagctccctgcttagagtaagtcaagtcaccttccttaaaaaaaaatactcccaggtgttagagatctctttattagagtcataaaataactactggttattttaaatagttccctttggaaatgagagtctcgttttacattaaacaggcaagactttgatatatttcacatatttaagccttagctttgattttttagtcatactgagaatactggtctttgagacacaaaatgagttcatttagtagtggtttaaaataatttttaacttataacaaataactggaaacagaatttctttaagcaggggactcctgttatgggaacatgtttggtggcaggtttcccaggggagaggatccgggaataaggaagcacttattgtagggtgccattgccacttgctgatggctcagaagtggagctgaggcctcttggaactatgtagtattgggaacgcatgttcatgtatacttaattttaaaacacacctactttatgacacgtggctatatttgtattgttttctggggaaataaaaggtttgagtgaagatgaatttcgccacaacttgtaaacagcccccctgaacctgttggggatgcattgctccaaatcatttcagtttaatccttcccccatctccacccctcacacctttcctatgtgttcacagccctcagcattcacggagaacatgtccctgaaaacgtgctggagcatcaagtgcaagaaatcagataataattatgtttgaagagggtgattttattccccaggagaaataaaacctcgctcaggcaacagggggtttattgaggaccggggctggaggcagctgctgccaggcccacgccaggtcattgggccttcgcctgagctcttggcttgagcccctcccactcaccttcacaatccatgtgggtgagaggtcatgggcctcctggctgccttgttcctgagatgcacgggatcctggaagaggaggtagggcaaggacactagcagagtcacctcaccaccaagtggaattcttcctctgcccttaactccttgcaccttccctaccagcgttttgttttgttttttttgcccaggctggagtgcagtggcacgatcttggctcactgcaatgtccgcctcctgggttcaagtgattctcctgcctcaatctcccgattaggtgggactacaggtgcttcaccacgtctggctaattttttgtatttttagtagagatgaggttcaccatcatctcctgatggtggtctcgaactcctgacctcaagtgattcgcctgcctcagcctccgaacgtgctgagattacaggcatgagccaccaccctggcccctagcaggtttctttacctttatggtcccaattaatccctttggcagagcttgtggacctattctcagcatggtttttgttgctgttttttttagagacaaagtctcactgtctcccaggctggagtgcggtggcgaaatcatagctctgcaacctcgagctcctaggctcaagcgatcctcttgcctcagtctccccagaagctgggattacagacctgagcctccgtgtccagcctcttgacatatttttaaatgcataaagaatatattagacagcaggcactgtggctcacgcctgtaatctcagcagtttgggaggctgagatggaaggattgtttgaggccaggagtccgaccagcctgggcaacattgagagactctgtctctacgagaaaaataaataaataaaatcaaccaggcatggtggcatgcaccctagccccaggtactcgggaggctgaggtaggaggatcgcttgagcctgggagttcgaggtggcagtgagctgtgattgcaccgctgcactccagcctgagcaacagaataaaaacctatctccaaaaaataaaataataataataataaataattttttaaaacaaaaaaagttagaaagaaagccaagtatgttgaaattcagtgttacccatgcatggctagctccctctcattttttacataacccgttcagtgttacctcctgaggtgctttcccttctcggcttacgtgacaattaaaagattgtgatttacaaacatgcagttaacttacaggggcataagtactcagtgtggcaaagccaacagcagcaagaacaataagatcaaatgagaaaagggcagggaggacggaggagacgaagggaggaagggaagggggaacgggcgaatcgtgctatgaggccatgccttgacgagcccctgagctgagctgaggtcagcctttcctttaggcctctcactgtgcacatttttctgggctaagagtatttcttctatttcgaggtatgtgcttttcatacccagtggcccctaaaggccaacccacttcttcttctaaaacttaagagaaacagagattcaaatatatgagctataatcatgaaagactaattatatttgaggaaacttagtgataccccctgataatatgaacataataagagcagctatttgttgagatcttaatacattgtatgaaaccctttacctacatgatctcattgattgctcacaaaaacgcctgggtgccgtgcttctcatcattcatatagagagactgggaggtaaagccctcggccaaggccacactgatggcagccagtagacctggaattcacactgggggctgcctgacttgaagcctgtgttcttcctctttatcaatgccatctttcctaggcactagcgatttcagagtttggattccaacaaaatccaaatacatattgatataaaaatacataattagaattaacatttccatttgaaacctggacacacaggttagacactcaatatgctatatttgaatagaatttactgtcttgaaataattccgcatgatgtaggtttactcacatcctgaggagtgggccaggggaaggaagagctggttgccatgggcatcggctggaagcaaagccatcctccaggatcctctggcttcctgagccaagatggcgtggagcatcatctgtttctcttccaactcatcttatggtggaagttgtgaaggagcaactttcctgccagtgctccaccccttattcacccattcctattctggaagatagtgataaaatctgattcttaagaattggaaggttaacctatgaagggatagatttaaagacttgatgaactttgattttacctgcaatacctcaaccaggacttgttactgctaccaaaattcccacttattatgacatttttgtcatctttctgaagtcattacaggacattttatagacctttctttttttagatgaaagggtcaacttcagtccgacgcacaaagaagcaaagaataataatttttctctctatttctatttgcttcttttgtccaaaaagatcaaagaattaccaaattatttctgtccacccttgcgcacactgaatggagaaaagtttttctcacttcattttctaaatagagagatcatggtgggcagatttagctggtagtttactaaggtaaaattaagaatcacagcatctcagaaaaaaaggactcatagagatactcatttaatagctgaggaaattgaggctgagaatttgacttgcccaaagacacagagtcggcagcaggctgagtctagattttaggtgctcggtcccgtgcgcctgtgtggtccctgagggagaggcagagggatctccttccttcacttactcattcttccactcaggcattatcgtcattcacgcgagccagacactgtcctagggccgtttttgtttttattttttggaaaaggatagtgggggagaagaactggggagagacaggtcagtaaattcatgatctctgtatgaatgataagtgcagtggggcatgctgagctgaggtacaaccaaagacattcgcctggggttcaggaaagatctggacttggctggaaggatgaatagggcgtgaatggatctatgaaaggtacaaagggaaggaaattgaaatggatctaaagagcatggagaggagtcagtgaaagacgttgtatctgttcctgtctgaatgcatgcccttctatttctgcctagatgatgcctgctcatttctcttgctctagaacatctcctcaaatctgttttcaaatattgctgcagttttaatgttatgtttatccacatcggtgagaagaagcttctctttccttcttggttgtgagaaccctggggtcaggaaaagctcggtcattcatcatagtgccctgggaggtgcctggcacagtgctgcacacctaagaggtgcttgttaaaagtttattgaccttaatcaaacattcattctcagccgctttttctgacgcatatgtgtaaatcatagatatgttactgaataggaatccagccaccctcctaaaattcatgtcattagaataccttaatcttattaacctggaatactatgttattagaataccttgatattattatcctggaatattattaaatagttccagaatttttcactaaatcatgctatttgtagttgttagaggtgctgtttttattgctcagtcaggtgactaccaggtttcaaagaaagtgctgattaacagggtagcttctttctaataccagacttctctgatcaaattatagatgttcacttgggcgaatgggtaagattaagggtaaaataggccaggagcggtggctcacgcctgtaatcccagcactttgggaggctgaggcgggcggatcaggaagtcaggagatcgagaccatcctggctaacgtggtgaaaccccatctctactaaaaatacaaaaaattagccgggcttggtggcgggtgcctatagtcccagctactctggaggctgagacaggagaatggcatgaacccgggaggtggagcttgcagtgagcggagatcgtgccactgcactacagcctgggcgacagagcaagactcttgtctcaaaaaaaaaaaaaaaaaaaaaagaagaagaagaagaaaaaaagagtaaaataaatggaaaacaaaatggatttgtatgttttttaaagatcacaaatttctcaatttagattgagaaatttagaaacttaaattcctacttttccaaatttctccatggattgaataagtagctttgtttttcaaaataaaaactcccaacaccagaagccaccctgattattcaaccctataaaatattcatattctcttgtttcattctggaaaaaaatgatctggaaatattgcctcagatcctgtagctaagaattgcaaatcattttcttttcagaacatcaccttgattttgagtatggatcaagcaaatacaacattttctagaactcagaaacttttttttttccaaaatggaaaaaaaacctcatacttctcttacacacaaatgaattaagactttgaatgcttggcttctgaatcatttgaaaaatattggcaaagaagttgttgtaacaagtctcaggcctagccaacattttagatgctttggttttaagacagggaagatatattctgctgggaagaaatccaaaaacctctaaaaatgaattataaactatctggaagtgtctcagctgtggtaattatggtagtagcattgttgtctgccaccttggtggccgtttttcacctaatgtttataagagaatcttccagtaggttaacatgatcctgaaatgcacttcaaaaggccaagtgtacagaaagggtttaaaaacagtaactgctagtgagtgagaaggaatttatttcatgctcgatggagtttggctttataaattttttagctgctggttaaatccacagtagaggaatgattccattgtgtgtcctgagtggaagaaaaaagtaaaaattagtatcacagtaacagtaactgaagtgaataacatttctcaacaaaaaacatgcagactaatttattaagtccttgatgaagtagtgggaaaactgtgtcacgccacatagctacagtcctcgttctacccttgatttttatgtgtaaaaccaaacatagcttcttggtactgtcctgatcctaatgctccttctcactctctgatttcctatctcacctcctgctcaatggtcatgtggttcccctttattgaactatttcagtagtctgcaatgagtcagcaaccttagggactttaaaaaaaattctatttaccagtctgggcaaaaagagtgaaaccccatctaaaaaaaaaataaaaattctgtttaaaacatgcttgctctagtacacatttctaaccccacagccccaccgccgctttttttttttttttttttttttttctgagacagaatctcactctgttgcccaggctggagtgcagtggcgtgatctcagctcactgcaacctccgcttctcaactttaagtgattctcctgcctcagcctcccgagtagctggattacaggcatgtgccaccatgccccactaattttttttgtaattttagtagagatggagttttaccatggtggccaggctggtctcgaactcctgacctcaagtgatccgcccgcctcggcctcccgaagtgctgggattacaggcgtgagccattgcgcccggccccaaccttctttcatcttctttcatcttggaacagatgtggttctttgcaacaaaaggatagtgattaactatgaaaagggagtaaatataatatgtaagacatcatttttagtgaatatttttttccaaatattagcttatctgagaaggaagatttagttttagtgaaagacaacccaaatatttttatgaaattaattatttgaaggttttacttgcataggcatgctaatgaagtatatttcttctaaatatactttcaataaaaaagcaatctttctttttattaaaagtatatttagggcccggcgcggtggctcaagcctgtaatcccagcactttgggaggccgagacgagtggagcacttgaggtcagaagatcaagaccagcctgaccaacatggtgaaactccgtctctattaaaaatacaaaaattagctgggcgtggtggtgcgcatgtgtaatcccagctactcaggaggctgaggcaggagaatcgcttgaacccgggaggtggaggttgcagtgagccaagatcgtgccactgcactccagcctgggcgacagagactatgtctcaaaaaaaaaaaaaatgtatatatatatatatttagaacagccaggtaagaaacctgtctagtgcaaagaactacctgatgctgattactataactgagatattattctccaaaaacagttaaatttatgttcatgaggtttgagctgctttttctcagtggctcagggcaaagactccagcatacacagtgtgtggtgcctccatgactccctggccccctcccctcctcaataacacaagaccctgcagttactcagattgggaggtagtggggagttcttttgatgtcctgcaactggtgggggtgaataaggagcaagtgggaacattcgttaactggtgaagtatttgttgttaatagagaaatgcattgtgaagtcagttcttgtaaccttggtttctttttcttgcttgactagtctttgtgaagggaatggatagagttgattgtactgtaaatctaattgcatgtatgtaatacagagccaaaaaatgtcattttagctgtttggacaaaacgctatagtttaaaagcatattttatttaaaatgattagctgataagagaaatttgaatcagaatacctgaatattatggtcataaaggatggaggaaattattgtttatcttagtactaaatagaataaacgtcagcccctgctacaggtaagtaccacacataagaatgtatgtgttactgtaggagctacattattacataaaatataactgtctaactactggttgatgaaaataataaattggggagctgcatgattaaacacaatgactcatctggttccgcataaagcatttttttttcttattttatattaaaaacaaacgaagtccctttacagggatatgataaaaataagcatctttaagttaaaaatgaaaataaatatattaaacatagtatatgatgtaagttcatgctatgtttcaaaattaagaataatgctttagagtacaaatattaaataactattttatcttgagagggtaaggacttattgacagaatggggtccttctatttgacagaattactaataggtagttctgttttatgtaaaaagtttttgaaagactacctaatgtatttttttaatagatgcatggtaaggtttttagtgtagcaagtgttagagaaataaccatttttgtttgataatttaaaatttaaaatatttataatggaaaagatcattgaacgtattaggcagtgcctaaaaaataacagtggaagccatgaattccttctgtgttactaaaattacactgtgctattttaaatttcactgaaaaataaacatttcagtaatggtatttctatatggtttttacaaagaaaagattatattctgtgatcttttaagatcaagctgtactatgttagagaaacgccactaagctgagaccctcgcagtatgctctcagctcagtgtccatgcctggagaatgtctcttcaacatcgcgtacaccattgtttctagatctttacagaatcttcactgctgctatccccttttaccaagataaagttaaatctccaaagaaccgaatggaggtacttttctcacagtcacccagaaattgtttcctgaatagtttggacctggtactgatcttggctgcttaaagataaaatcagctgagacaaaggaacagtacaaaggcaaagatcaataatgacttgaaaagcattttgaaaactgtatctttgtgttctaaaattttattcagcaaagaaaacaggagtaaagaaagagaagagagagacaaaaaaaatcctagataattatagaaaagaccttgtaaatactaccagagtcaactggaccaaagtgaggacagaataaatgcccttctttcaagtgaaagacgtttggattgcattgataaatatatgcattggatcatttgaaacttcccttaaggcctgtttcacaacattttattgtaaacattttcaatcagaaaagtggaaagaattgtacagtgaacacccatactctcgccttggtttttttttgttgttgtttttgaggctcagtctcgctctattgtccaggctggagtgcagtggcacaatctccacagcggctgaactgatttacactcccaccgacagtatataagcattcccttttctccacagcttctccagtatctgttgttttttgactttttaataatagacattctgactagtgtgagatggcatatcattggaagccagcttactttgtggtgcatttcgaagtgaattggagacataagtagactttactcctaaacatttccgcatgtacattggtatttatgattcttttatttatttatttatttttgaggtagaacgtgcacatactaagatacacggatctacccaaatcttacttaggtgtactcattctatgatttttcacaattgcatctgcctgtgaaacccaaagctttatcgagatatgaacgtattaccctagaaagttcctctgtcgtttcatagtcaatccccaccccctgcaacaatggtttgacttttctccgtagatgaattttgcttctcccagaatttcatatagatgaaaccatgctgcgtatacggtgtttgtgtaaggattccttcattcagcacatagactttcaatctccttttgattcacctaccaagtgggatggggtaagctcattctttggatttcaagtggctcagctgatttggtaaattttcactttcaggcctgtttcctgccattctcaatcttgccagcaatgctcacatcagcaccaatgccacctgtggcgagaaggggccggagatgttctgcaaacttgtggagcatgtgccaggtcggcccgtccgaaacccacagtgccggatctgtgatggcaacagcgcaaaccccagaggcaagtgtcgcgcctttatttctgaaattcccatgggaatgtacactttgtgaaatgaggactgagacttctgttaggaagccataaacattgtgttcaccttcactgctctttgtttccactagcattacggtttagaacttaagaaatttaaagcaacagccgagaggaattcatgttttttattttctttcaacagaacgccatccaatatcacatgccatagatggcaccaataactggtggcaaagtcccagcattcagaatgggagagaatatcactgggtcacaatcactctggacttaagacaggtaggtgagcccagaaccattgaagagtgtctacaggctgctgagctgtggtcttctgatgacctttgggaaagtctggcttctttctgaacacatttacattctaatctcactatttccaccaggtgaaggcaagtggtatacagaaggagtccctggtgccatttcttgtcactttcatcattcccaggtgtcttcagggagatgggtgaaattgcttccatatggttgatgttcttcgaagctgtgtcaacagggcacactcatccatccagggtatcatgtcaggctgtttgctggctgccaacagatgcatggggagggagagggggaaaacacatgtatttcctaacttttagcttactgtcttgctaatgtcattgagtaagttattgtataaggattatataaggctagaagaaaaaaagacaaaacggtgttaaacctcttgactgtgtctcccctgccacatgtagtctgtctgggccaggtaagctggagttgcccaatagtaacttaagcagtgccttcagcatgagtggggagagggaaggtatgactggctccagccacacctgcatctccttaccttgcttcaagtccacataggaggatggagagaaatatgagatgagccccagttgccctgatgttcctgggaaagaaaaacaaaaggagtctgagtggaaggaatgaaaaagagagatggcaggtgttttggagctgttgtcctggttctgttttgagcttttcagaaaagccatcgcattaattcttatttatttccattcagtttctcttgtgttagaactcataagtttcatgtaaaatatgagatcggttaaaagacacaagtaattgtgatgtgcattgtaggatttaaataggaattatagagatttaatgacaatcagaattctttgaataagtgatagttttaaaatgtgcaggaatttttttttattttttatttttattttttattttttgagacaaagtctcactctgtcgtcaggctggagtgcagtggcgcgatctcggcacactgcaacttccgcctccccggttcaagcgattctcctgcctcagcctcccgattagctgggactacaggctcctgtcgccatgcctggttaatttttttgtgtttttagtagacaggatttcactatgttggccaggatggtctcatctcttgacctcgtgatccgcctgccttggcctcccaaagtgctgggattacaggagtgagccaccagacctggccaaatgtgcaggattttaagaagacaaggtgatacttcatatattgatgtacaaggaacttgtgttctgtaataattacagcaaataaggtagcaagatgtgcagctcaggagacattttccaagttcaggttcacagtattatgaaagtaaaataacacttttaatagctttcaggtataagacatgaattaatgtgacactccttaatattttcaaatccccttaaagaaaaagagaaaagagccaggtgcggtggctcacgcctgtaatcccggcactttgggaggccaaggcgggtggatcacgaggtcaggagatcgagaccatcctggctaacacggtgaaaccccgtctttactaaaaatacaaaaaattagctgggcgtggtggcaggcgcctgtagtcccagctactcgggaggctgaggcaggagaatggcgtgaacccaggaggcagaggttgcagtgagccgagatcacaccactgcactccagcctgggcgacagagcgagactctgtctcaaaaaaaataaaataaaataaaataaaataaaaaacaaaaaaaaataaaaagagaaaagagcttctttgaaaagagcttctttgttgttgtgttttgttttttgttttttttttttttttgagacggagtttcactcttattacccaggctggagtgcagtggctggatcttggctcactgcaacctctgcctcccgggttcacgcgattctcctgcctcagcctcctgagtagctgggattacaggagtgtggtctcgaacttctgatctcaggtgatccaccggcctcggcttcccaaagtgccgggattagaggcatgagcaccacgtccagccaagagcttctttttaaccctggcctttgtgtttatctcagtggtaagaatggttctctggaagatttcggtttttcccatcacctttctgacatattttcctttttctaaaggaaaaagtaaaactgtgttcattattaagaatgtgatattatatgagtttggccaaattaagacctggacattttacatatagatttcaaacctctgtaagtctatcctttgtcttgaaatttgtcatgcttgacttcatcctgaagggatggactaagttagtctgaggaattccagaaggcagtctccattttagatgtttaaggcatttttaaaaaataagcatagacagccaggtgcagtggctcatgcctgtaatcccagcactttcggaggctgaggtgggcggatcacgaggtcaggagatcgagaccatcctggctaacacagtgaaatcccgtctctactaaaaaagatacaaaaaaatgagccaggcgtggtggtgggcacctgtagtcccagctactcgggaggctgaggcaggagaatggcgtgaacccaggaggcggagcttgcagtgagccgagactgcaccactgcactccagcctgggcgacagagcgagactccgtctcaaaaaaaaaaaaaaaaaaaagaaaagaacagaaaaaaccatagacatatagttataggctgctttaggtaatttttagtgttttaggatatgcttttaaaataagatcacttaaaataattagtattcagaaatttctttaccatttacacagtataaaaattctgctgtgctttgtttttttttaaacaaagcacattatgcttatatctgatcaagcctttctcagatttatttatttattgagcctttttattacaaacacttttgcatatgtagaaagcatattacagtgaatacacatatacccacccttgagatttggggattttaaaacactggaccatgttcgtttcagtgaattgcagtcatcacaacattttgccagtccttcagtttgtgtcttcaaaaaataaagacgtttgttctgattagataccataccatttcagcctccttgggcaaaattaacagtaatttcttaataactcttttcccatccacattcaattttcccagtttatcaactagtatcttttactgcttttttttttttttaaccaggatccagtaaggaccacttgttgcattggattgctatgcttcttaaatctcttctcatctgaattgtccttcacttaaaaaaaatgctattgaatatatgaatagaccagaccagttgtcctgtagaatatgccacattctggatttgtcagattgtttcttcatggttttatttaacatattcttctgtgctctctatttcctatacaccaaattcagctctagagacctgattagattccagttaagtgtttttcagaagaccacatcaccagccatcctctcacctcacatcaggaggcacccagggctggttgtcccactagtagtggtgctaaatttgaattctctctgggtgttaaaagtcaggtttcttccttgtaatgttacttccttttttctgtcccatatccccattgtttcttagatctcactgacattcagatctacagcatggctacaccttctgatgacttttttttaccttgccaaaatctgcatgtttccttagccattagccaactaccagttgttttctagactatatactccatgagggatgggaccacagctgtcttctacttttctttctctgccctttcctttcctggttagtatttatagagagatgtcttattcacttctgcacacccagacattggcacagttcaggcactgagtcaataattgcattatggatcagtactttttttttttttttaaatggagcctcactctgtcgcccaggctggagtgcattggcgtgatctcggctcactgcaacctctgcctcccaggttcaagagattctcccaccccatcctcccaagtggctgggactacaggcacacaccactgtacccagctatttttgtatttttagtagagacgtggtttcatcatgttgcccaggctggccttgaactcctgacctcaagtgatctgcctgcctcggcctcccaaagtgctggaattaccggcgtaagccaccgcgcccagcctagtgctttctttcttccgttattttttttttgagacggagtttcgctcttgtttcccagactggagggcaatggcgcgatctcggctcactgcaacctccgcctcccagggttcaagcgattctcctgcctcagccttctgagtagctgggattacaggcatgcaccaccatgcccggctaattttgtatttttagtagagacagggtttctccatgttggtcaggctggcctcgaactcccaacctcaggtgacctgcccaccttggcctcccaaaatgccgggatcacaggtgtgagccaccgcgcctgaccttgtgcttttttaaaaattttttttaacttcccccccctcctcttttcttgttcacagtctgaatagaaaagaacaaggaacaaaccttttggctgctttgtttcagtactataaaaatgtaaaatctaaagtatagatttctaaagtaaaattacaggtagaccttagtcttatcaagagttgtaaaacttaatattataaatgtgtttgtgtaacttggtaaatatcagctcttgaggttttatgaccaaattagctgcattctgtgttggcaaatgctaacattgatcctgttcctgattctctaattgatgacagctgtcagaattacagcatttttttttttttttttttttttttttttttttttttgcctctatgtattaggtttggttatctgcaagataaactaaagaaaagattaaaaagtagtcttatcagaagtccataaatgttgtatggtttgcaataaggtttaactactgtttattttagtaatgtattacaagaggaataatgagatttacttctttgctttttaaaaataatgtctactattcacttctttcattgattcacagtattttagaagatacactgtcagatatctagcagtatcttacttttaaaaaattcataggaatttcatgtgtgtgatatttttaagaaaagtaaagcataataatcatcaactttaacaaatacaaaattaacatatatgttgtggtctccattaataaaatgctgctcaccaagtggtttaggatctcatatatcaatactaccactgaacagtgatcttttttgacaacttaaaatttaagagaaattattctgaaagagcatgcacatttcatgaatcttgcatttataattgtccaaaatcctataggttccacgaattacaggaaaatttattccctatggtagcatttctcagtagaagaacatgaagatttcctgtttgagaaccactattttaaaagttaatacactgttgagatgaaaagatgttcatcgtcattattcaatagggaagtgaaaatcaaaccacaataagataccccttcacacccattaggattgctatattgaaagagttggaaaataataagtgttggtgaggatgtgaagaaaatggaaccctgtgcactgtgggtggaaatgtaaaatggcacagtgttatgaaaaacagtgtggttgttctggccgggcgtggtggctcatgtctgtaatcccagcactttgggaggccgaggaggtcagatcacgaggtcaggagattgagaccatctcggccaacatggtgaaaccctgtctctactaaaatacaaaaaattagccgggcgtggtggccaatgcctataatcccagctacttgggaggctgaggcaggggaatagcttgaacccgggaggtggaggttgcagtgagctgagatcacgccactgcactccagcctggcgacagagcaagactccttctcataaacacacacacacacacacacacacacaaccagtatggttgttcctcagaaataaacatagaattacagcaattccactactagggaatgccgtaaagaatttaaagtagggactcaaacagatgccagtgttcagagcagcattattcacagtagccaggaggtggaagcaacccagatgtccatcaaccatcaacaggtgaatggatagtcaaaacatggtatgtgcatacagtagaatcttagccttaaaaaggaatgaaattttgacacataccacagcatgtatgtaccctggaaacattacgctaaatgaaataagccacacacaaaagaagaaatattatatgaatcaatttggatgaagtacctggagaagtcagttcatagagacagaaagtggagcggggtggttgccaggagctgggaggagagagaatggggagttgttgtttaatgggtgcacagtttaggttcggaagttctggagatagatggtagtgatcattgcacaacagtgtgaatatacttaatgccactgaattctacacttaaacatggctaaagtcgtggtttttatgttacgtatatttttctacaacttaaaaaagttaatacactgtgaaatatttggtgtattatgtcagccagggtcagtcaggaatatggaagccacaccagtcatttaaaggcacaaatttagtgtgaggaattggtttgacagtgtgggagagctgggagagggagcaggaaggtaacttgggggtagtagtggtggaggaggcagcaacgcaggagggtgtggttatagcacctagagcctgggaagagagtctcctatctttcagaatgctcttctgggggtcctggaaagctggaggctggagtcagctgctacagcccaaggcagagggccgctgctgggcaaggctgataggacccggaagtagacatgggagaagtcctgcctccctccagccctccagcctcccactagtgtcgccgtcagggagcatcgatttgcagcgtcccagcctcagcatccaaagctgggctggcaggtgcttagcaaccagcgcaaacacttcttctcagtaggtggtcacttgcaccagtataccaacagaaacacagagacagagcagccctcgacatcctggggcaggattttgttattatggtggtcagccacatcctaaatatgctcatattaagttttttagaataactttggaatgaaaatgcaaattttagaattctcctggagaaatcatggactgctgtctaatacattacaaactaggtattcttggttctcagccgagagactgcatcagggcaccagcttggtcctgggaccttcaggacagggatggaggaaatacagaagcagttccatttatgtattaactattgggttttggtggtgtgatgtggtggagatgcatgaagtgtggtagggtgatatatacaaagtgaaatgtgatagcttgaaggatgtagagtacctaacaaactcctcacatttaataaacatgagttttctttccctctgtcatatttctaatacacaaattactttaggttcccaaagatcttcagatatcaccaagggaaatgttaaaccaggccttaatagaatctaattacagttagctaacaggattaaggagtgcagttatgcagattttgagaaattcataagtcaataattattctgttttttctgattaggaaattaagatggaatcatcatagaaaaatggaagataagataagtgtaaacaggcagaaacacatcatctcttcgctctgtaacaatcgctaattgatcccttgggatatttactttgtcatttgcctacaattctatgcatttaataatgctacaacaatactatcatgtattacatacttactgtgccagacattgtgctatgcacttgatcaggattatgtcattgaattctcataatcgcctgtgacttggctcctgttattatccccttttgacagatgacgaaactgagacttagagagtttaagaggcttgctcaagggtaggactcactgaagcttaagagcctgagctctgcatcattgcaccactctgaccctccagctgagacagattatgtgatatataaatttgtgttctaatgttttatgtaattgtatagcatgaacatttcccagtataactgaaactcatgattaataattgttaaagctgcattaatagtttctatatggcttacgcatcatttgcctaagaatcctcaggcctgacattttggtgctttttctgttatgggtaataacttgagctttcagtgaaaaaaggttcatttcgtatgtataccaatgaagtaatacagtgagtatcaatcatgtttgaggtttatatgacaaatttatggttaattttgttttgagcatcttttgaaagaggaatgttattaacaggtacatatataggaatttatagatatgggttatagcatttttttcctcgtccatgttatttcatctgcttttcccagcagttctggaatgcgagtgatcgcctctttgcaggtacaaaaatcacggcacagagtaagcaggtcacaggcttgcccagagtctacggctgcaggtgctcaagctaggcctggaaaccaggacctctggttccctctacaccatgccacgctgtctccttgtctttggtctccaattattgttttcctttgttctgactttatggggagactggcaagagctcttgcaattccctcttgatgttgggagtgttcagattctagccctttccctcttgttctgtttgcctgctcagtagggtcctctcccctatgaatccagcagggtattgacacttccttcatgcttttgcagtggctgatagaattgggtgctacctaacgtgtttttttttttttttttgatcaagaagcaggaaaataaatcagttatctcctattttccttaaaaaacttttaaagccggagaacatttcagtgggagtgagggtcagatttgtgagtaaaaatgtataatagtcttttagaagataagatctgttttgtaaaaaagggaagttccctatggcattgaaaataaagctgccttttggagcagtgctttattttatgtgtaggtttaattaggaagtagcactttgttgtgggaacataatcacagaggagcctttgttttatgcaaacttttagacaagagctgcttgtgtgctgggttttgtaaaacctcattaattcagatgtcagttgttttttcccccaaatttctgaaaaattgaccagtattgagtgaggtttattattatatcattcaaatataaagtatttattaagcacatcgacaaggtcaacaagaaaatagggaaatttcacattcttaagataaaatctttaaagatttttattgcaagaattgcatctaaattggagcgtctcattacaagtgaattttggctgttcctggaaagagattaggcagaaacccttcctagaagcactcagatagaaattacttttactgtatgctttttgtactctaatgattctattccagttttctattacttcatactggcctccaccaatttcaaatattaaggtttcttgaatttgcttggtaaaataaatagattggaagaaatcttaagctcatcattatgatttggaagtaagccaccctaaattcctgtccttcagacatttttatctgtgttgtcatgttctctgtgaagctactagactcagaaataggtctttcttttgttttcacattttcattatctcgttttattttctcatgcatagcttctctgctggttatctattgtgtaagaaatcactgtgaaactttatggcttaaaacagcaacattcattttatacctttcctgatttcagtggggtcaggatttaggaaaggcctgagtgggtatgtctaaggctgcagaccatggggggctagacttggagcagcttaggggagaggttctctggggcagctggaggagggggtttggggcagctggggaagagggtgccagaccagctgggagaaggttcctggggcagctggaggctatgttcatgagagttcagggcgtctccgtgtggtctttccacatgggtgcctgagcttcctcacagcatggcgactttaaggcagcttgcttatagggcagcttggggcaggaggcagaagttgtgtcccctcttagacctggtctccagtcacacagtgccagtttccctgtgctgtatgagccacccagtcactcaggttggcagagattcaacttgggaaagatagaccagcctcacccgtcaaccggaggaggggtgaagaatttgaggcctgttttaaaactgctactgcatcagccttctgaaagggtctttctctaggaggctttaatctttgcagccttgcatatcttatcttgtaggggccgcacccctgtctttaggtgaggtgaagagcttataggaaccaaacaggaatgcacatactgttcttttaacgataagtgagctgaataagtgaaaacaatggaggctaggctttaggaacaagatggagtttttgtttcttgatacgatttatatttaagctttctcgcttacatattatcggtggggattgccaaacagtccaggataaccattttgccatttggcagagctcagttctctttagattttgagctgccaaggtttggctgcactatttcagtgtttctacccagcagggcttcctgcatttggcctgggaggattcagggaaatccgtgaagacagttttgcaggattggatcacaaaatgcttttcatatccccaactgttttggcatcaaagtaaagatttttgtatatttatgggaaaaaagggaagtccgttctgaaattatttcttccattatattgaagctgaaaaaaaggggtaagttttaatttctcaagagatatttctttgaaaaatatagtgcagtttggtatccattctagctttttttttttcttttttatgtattgacttaacttctactcagattgtagtatttccatctttaaaaacaaagctgtaacaacgtttttaaaacatggcttataaaaacctcagctaggtctcagaatatctcttgtgtttttaatgtcttcagtggaccttttctctacacagaacttcctttattttgatgtactagtaacagataatagcagaaagtttttaaactatagaaaaatataagaaaaaagttatttaaaaaatcccctgtgattcttacaatcaggggtgaccttttgctccattgcatcatatctaagaacactgaatatatttaagaaatcagggaatctctgtcttgtgcatactgggatctcaggattcatcgatgaacaagacaacgatcggattcacattaagcccttagtgcaaagaaagtggacaacacatgggcggttccttcagtatgttggttattagcagtgatgagcaggctcgctttcattgcatctttaaaggcaggccccagctctcaaggggcttctggtctggtggggaaaaataggcttctgctgagtggtgtagagtgtgcagggaccgggggtgcacagagaacacttcagaaggaccacttcgtggctcagagaaacaatgcaggccgggcgcggtggctcacgcctgtaatcccagcactttgggaagccgaggcaggtggattacctgaggtcaggagatcaagaccagcctgaccaacatggacaaactctgtctctactaaaaatacaaaattagccaggcatggtggtgcatgcctgtaatgccacctactcaggaggctgagccaggagaatcgcttgaacccagggggcagagtttgcagtgagccaagatcgtgccattgcactccagccggggcaacaagagcaaaacgccgtctcaaaaaaaaaaaaatgcgaaaaggacccaccggaggaagggaggcaggaatacagaaggaagaagcagcagggaagagcagggtgggaaaggcctggaaattagaaagcctggcatgtctgtggagctgacatagtacattcagtcctagaataaacatttcctctcgtttttcttttctatttattgggacataattgacatatagtgaaatgcacaaatctcgagtgtatagttgggtgagttttgataaatacagacacttgtataagccattcccttggtatagaacgtttgcgtcaccccaaaaggctcccccacccccttcccagccaattccccacttgctctcctccctcccagcagccagaggaaccgctgtcctgaattttttttttttttcactttggaagagttttgcctgtgagatgacttcttattaatggaatcacagtgcgtccttttttgtgtctggcttctttctgtgagcatgaggtttgtcagattcacatgccattgcttgtatgagtggcttgttccattcatttctgtgtagtaatttcactttatggatatagcaacatttatttatccactgtcttgctgggtatttccagtttttgtctattgtaaaaatgctgctgaaagcaaagcaatcctgggctcttctcccaggagtcactgtcccgtgctgcctgctgtccaatatttgaaacccattgtttatatcctgtgtccagagttctagctgttcactggaggagagccaggtgctaccaatttcttcttcctagcgaccagcaaaatgcctgtaataatttttaatggaagaatgatattttatcatttggctacacaataattcatttaacctgttcccattgggagacacttaaggtgtttccaatttggggctattctaagttatgctgcaacaaacatttgaatattttatggctgttacggtagtttattttttagtgtcgattccaaaaaattagattatttggttaaatgcttaaattttttaaaatgtgatctttattgccttatttttttcaaaaacattgctcaatttatatgctcagtaacagtgataaagtgtgtttcacaattccttggtagtatagagatcagaattttcttttcttttcttttttgtcctatgctaattgaatagcagagaatttatttgtttataatgagttgtcacattatgtcactgtactggacatatctttgggaggactaagctaaattcagatgcttaaacaatgtttggtctgatttattatcttcacatgtgtaaattttatgattattaatctattgaggcagtcaaattgctataacacggtggtgacatttttagatattgaatatcaatattagaggctggacagacttttcaagtcatattctaaccaaagagaaagaaccgatttgactctaagtctcattattttgagaagttccagttgtcacaagaataactatggaacattggaatattgattaaaaatctgataccttacctctgtattgtgcattttataaagtgctttcctgttcattatttcatcttatgcttacatgaaaaatctgaaaaatgtgtcgatttgtatccacgtcattcacgaatatgcactgggatgtagagaatacatcctctggatttgtcgttttaagcctaaatcatggaaaacattcaatgtagttttaaagttctctaggctataggaaattaaaaatatattactcacctatcactacctttttccaggggaatatgggtgattgtggaattctgactctgaaagcattggttttggtgagatgaccaggctgccaaagtgcactgaaggtagagacttcttagtgactgggacagctgcctgttgatgccgtgcacctcctcagacctgtggtctctttgcaatttgtatgcaggcacttagaaagcactgactcgctctggcctgactgtttcggaaatgaagctaggaaaactgtgaggtcaaatttaaacctgcaaataattagctggatggcatagctgtacaaactgagatagcccgggaaatttggtaaagctttaaaactattatacttattcgcttctgttcagccaactgggctgatttttgagacagagtctcactctgtcacccaagctggagtgcaacggtgcgatctcagctcactgcaatctctgcctcctccgttccagccattcttgtgcttcggcatcccgagtagctgggactacaggtgcgtgccaccacacctggctaatttttgaatttttagtagagatgaggttttgccatgctgcccaggctggtctcgaactcctggcctcaagtgataagtgattcacctaccttggcctcccaaagtgctgggattacaggtgtgagccaccatacctggccaacataagctttcttatcagttgagaattactagaatatgtgtaattgttttcttgttttaaaaaataatagactattttttagagaagttttaggtttacagaaaaattgaatgtaaagtacagagaattcccccacacccctctgtacaatagtttttggatcaaattttggctagtcgttgtttttttttttttttttttttgagatagagtctcactctgtcacccaggctggagtgcagtggcgcaatctcagctcactgcaacctccgcctctcgagttcaagtgattctcctgcctcagcctcctgagtagctgggactacaggcacgtgccactatgcctggctaattttttgtatttttagtagagacgaggattcaccctgttagccaggatggtcttgatctcctgaccttgtgatccacctgcccccctcccaaagtgctgggattacaggcgtgagccactgcgcccggccttggctattcttaatcacccttttaagagcaagtgactgatccagtgcagttcaacagtttctaagaccttttcctccgtagtatttacaagacgatcatgagaattgtcaatcatataatttaagaatttttgcttttcctactatttaatggtatgtaatcagaagatatttatctgtgttcttcatatgaaggaagcacaaaaaaatgtcagttaaataaccacttagtaggtctctagtgggatgaacaatatttagaatcatttacaactttataccagtcttgtatcagtcttatagactgagccaggcaagaaatggggctgcccgaacttgctgttcaggaaatgccaccaaggagaaagcattgtgtgaacaatgggtctttcactgtaaagtcctgagtttggggctctggttttgtattttgtgaagtatcatcatgccttgccagagctcagtaagaatgtgaccgaaatcaggtcatgagaaagataagatttcaaacatcccctcggagctgtttgcttgacctccactgacttaattggtttctatggagttggcccctgcctagaaatactacattcctactcattttcaacttagacagctcagtctttcacaaggttgaatcttcataccattcacttttcatctctttttttttggagggggtgttattataaaatatgcatatcataaaatttaccattgtaacctttttttgtattaaaaatggcatattctctattttgcatactttaatttcagaacaaaataaacaaaaaaaaatccacaatacacaacatccaatcctgctgtcagagtagggagggaatgggggcttgacacccttgtttcctgccttcaatacaaagacaggagagaaaaaaacactagacatcagcagggggagccaggtgggacaggggcacttgaggctgcagtgggagccattttaaccatttttaagtgtacagtacagtggcattaagtatattgtgcaaccgtcaccaccatccatccccagaactttttcatcttcccaaacagaaactctgtaccccttaaacaccaactccacgttcctctcttcccccagccctgggtagcctccattcagcttttgtctatgaatttgattactctgggtaatcaagcttacataagtggaatcatattctatttgtccttttgtctggcttatttcacttagcgtacataatgtcctcaaggcttatctatgttgtagcatgtattacaatttccttccttttaaagactgaataatattccattgtatgcatagaccatattttgtttagccattcatccatcaacgggtacctgggctgtttccaccttttagctattgtgaataatgctgctgtgaacattggtgtacatgtgtattcgagtccctgctttctcttcttctggatatatacctggaagaggaatttctgcatcatgttgtaattctatgtttaattttttgagggaccaccatactgttttccatagtacctgcaccattttacattcccactgcatcttttaaaaaaataaacaaaagccttcctatatattatgtatcctacatatttggatattctcttttaaaaaataagctttaaatattatgatttgtcagttagatactcagtgaagttagatgtgtctaaagaaaaaggagaatcttcaagtagaatatagaccaaggatccatataaaaagtgaaattttacacactcacaagaaacaatactttctcatctctctagtgctaaaactatcaacgattcagctagatttagggcccaaaggaaagaaaacacataattattgtttctgggtgttgtaaatgtataactaataggttaatgtttaatggagttcgttaagtacagatttgcacagcttttctgggcagtatcacctgttggattttagaggcttaatgattaagggccccttttactgtcactgagtgtgatgctcgtgtgttttctcataataaggcatgcgaagaagggatgcaagctgtaagctcttcaccatcgctccatcaactggagcaaaaacaggtcaatgtgaggactaggagaagaggtgaaaagaagttgaatttttagccagatattctctgggactgaggcaagagcggggaagtgtgggctttggggccatgtaggagagaactctgcactcttcctacagtggagagagggatctgatcgagctggaagacactgcttggcctctttgtgttttccttctcactcatgttttggccttttagaaaaccctgtaagacccgttgcttttatctctgctctggtctcttggtgtttacaaagtcagcaccaccatctctcatgatttccaggcaccaacatccaatcctgtgaccttcagctccggtgaccctgtagctccttggtttcagtccctgggatggtctaagcgttttaaccacggtgcacaaacatctgcgtgatggccgacagccctggccaggcgcccgccggctctctcctgccatctctgcactccttcctctgtgctctgccctcagagttcccctcagtgtctttcctcacctttgctccagttacctggacatctctcatctggtttcagagataccttctcttaccttcagggaagacttccctgactatctgccttctccagagttaatgggccttcccccaacacccagacactctcacagcctccacccttctccctggtgacttggtcagcctctggctttcccaccagggcattgggtcacatagaccttccatccactgccatatttgtggcacctggcttagtccctgtgacaaagcagatgctcagttaatgatgactggacgaagcttcagtgaaaaattgttagtgggcgtcccttgtccccagtgtcctgtgtccatgtggagtgttcctttgctcacccctcccccacctgtcctcaagggaggagcagtcattgcctaactcggggacagctgactctctcccccagggcacagtgtgctcttcttttcccgtgcaggctgttctcagacgcacaggtactggcccacaggacagagcttccagggtgggtccacaagcacccactcaggctgtgatgcaggagggagtgtgtcgagcaggcctccaccgcgcccatctacatcatatcctccagttttgcttttttatggaatattgcagactgctttttccaatctccatgacagatttgtgagcctacttccacatcagaagaggaaggaagggatgccattcattgccaccactgtcccaacatgaacaaatggggaactgcattttggagaaagcctagtgtgatttcaaaggcttagatggtcctaggtgaaaacttgatagttaacggccaagggaatcgttaggagttggggaatagaaaaggtgctttttggatttcttaggtctgagaatggcctgtaactgcatttcacaagtgggtttatatcattctaggggcacttggctgtcatgtggatcttacaaggtggggaaaagaaatgaagatcctcacaaagagcatttggtgacatgcctggctgtggttttgaggctgttccagctaattttccacaaatttagcaaaatcaccaagaacacctcgtcaacttgagcaacaggaacaattatagggagaaatacatcgagactaggaagggaagacaaccttttacttgtctgttctgtttcttagataaagcagttcaacactttttgtgggggatgagggacagggtcttgctctgtcatccaggctggagtgcagtggcaccatcacggctcactgcagcctcgacctcccaggctcaagtgatcctcccacttcagcctctccatggctgggaccaaaggcatgcaccaccatgcctgcatgattttttttgtagtttttgcagagatgaggttttgccgtgttgcccaggctggtctcaaatttctgggctcaagcagtctgcccaccttggcctcccaaagtgctgggattacaggcatgagccaccacccccagcctgcacactttttaaaacaacaatactattagtcaccctcaaatggaaatggtgacacctggaccgtgggtcagcttgcggggtgggctccttttgaaatcgcttttctaattgatggaagtcagaactgcttctgacaggtgtttgaagtatttctttcctatcttcagattaccgatcatgggttactatttacgttttaaatgggctcgtatctctgtgccctctatttgtcagcaatcatctctcttactttggcttttcttcaatgtccactttaagtatctcagcatggttctgaagggagcattcctagattgtctgagacatgaattttaagaattttaaggaaagaaatctgcttgatctaaatttatcactattggcagcctgtccctcctcccctaatcaaaacaaaaagcaaaaagaaaaggagcaaaaaagagaaaagttactggacaaggacatattttgttttgttttaattttgggacatgtttattttgcacatctaatggtagcaccaaatttaaagagaaacaaatcacgttttattctgaaatgttcttctcgtttatgaagctgtttctttttgtctgttgagtatgctgctcctaaaatgagataacagttaaaactgccaactgaaatataatataaatgacatttcaagtaattgctctgagaaatgtatttaaaatgtgtattgcagacatccttccttccctctcagctccctagcatctcagtttttgctagtttttgttgccacttcacgtgctgataattgactaagtgctttcgtgattgacacgctataaaactggaagtgagccatatctgcattggtaattagcctcctattaaatcactgcttctttattcatgagtagtaagtgttaattcaaatggtcattttacatttcattctctaataatttcatgagacataaatctcacagagcacaaaatcgccactttcacagggataactcagcaatattatttatcaaatgcacttaactgttcatctaaatctcttttgtctgggaaaagtttatttccttcatgcaagagagaaaacatgccttcattcactgttcagttaccaccgtggaggcaggtaggttcttttatggagaattttcagaccggagtcatgcctggtattgagccccatagatttcctgagagcctgcggagaacagctgcactttctgtggagaggagaggcttcacttctgtctgcacatgggaagttgacctctgatgctggaaaattaggttatctgtattttttagacatctgtgcctgagatggatttaatatatttaagttaagattgaggcccacatgaacattcctgtctggattccttttcagaaagtggcgtttgatgtgtgcctactttatttatgtgacactgtttatgtgcattccagtgatcattaacaaaggctacttggtggaaaatcgtgatgaaagtggatttaaaaatggctgtatcagctgcaggtttagcaagactacattgactctgagtctagtgagaacccctgcatcatcaatttgtgttcagccaaccttaaatccagagaaaaggcagtttagtcaaccatgcaaaaaaagggcaaaagaaatattgtggactttattgggacaagggtttaatattctatatactggccaggcacagtggctcatgcctgtaatcccagcactttgggaggccgaggcaggtggatcacctgaggttaggagttcgagaccatcctggccaatgtggtgaaacctcgtctctactaaaaatacaaaaattagttgggcatggtggcaggtgcctgtaatcccagctacttgggaggctgaggcaggagaatcgcttgaacccaggaggcagaggttgcagtgagtcgagattgtgccattgcactccagcctgggcaacaagagagaaactttgtctcaaaaagaaaaaaaaaatctacatactaacagacagtccttcagtttttctacattacatataagaccaatttgtcaacacatgattggtgaattcggcctgtattaatcaggtgagactgctgtaacaagtagcaccaactggacagcttaagcaagagacattaatgtcctcacagttctggaggctgaagtctaaggtcaaggtgtcagcagagtcggtttcttctggctcatagtggcttcttctccctgagtcctcacatggtcttccctctgtactgtctgtgtcctaatctgcttttcttatgacaccagaaatattcaaatagggcccactacaatgccctcatttaacttaatcacctctttaaagagcctatcgccagatacagccatattctgagctactggaagttagaacttcaatgtatgacttttgcgggaaacagttcagcccataacagggcaaagtgaagacaaattgtatttaggttcttcatagcaccctttgcctgtttatcagacttaccactctcaggacccctagtttgtttcctggtctccagtttggggaccttgaggactattgagagattgtgggaacaatggcccagcatcctaaggaagtctttgatcaagataaaagttaagtaactcctcccttgagagcttgtcctgaagtttttcactacggctgttcttccatttagtatcattttcttatatatgactaagctctcagaataaaagctggcaaaaggttggtaaaatactggaacatggtattgaaataattatgggctgggccaggcgcggaggctcatgcctgtaatcctagcactttgggaggctgagacgggtggatcacaaggtcaggagttcaagaccagcctagccaagttggtgaaaccctgtctctactaaaaaaaaaaaattaaaaaaaattggccggacgtggtggcaagtgcctataatcccagctactcgggaggctgaggcaggagaaccgcttgagcccaggaggtggaggttgcagtgagcggagatcgcaccactgcactccaacctgggcaacagagtgagactctatctcaaaaaaaaaaaaaagaaagaaagaaagaattttgggctggatgcggtggttcacatctgtaatcacggcagtttgggaggccaaggcgggtggatcacttgagcccaagagttcaagaccagcctgggcaatatagtgagaccccgtgactatgaagaaaattgaaaaaaatcagccaggcatggtgtggcttgtctgtggttccagagatttgggaggctgaggtaggagaatctcttgagcccaggaggtcaaggctgtagtgagctgtgaccacgccattgcactccagcctgggtgatagagtgagatcctatctcaaaaaaaaaaaaaaaaaaaaagaaaagaaaagaaaagaaagaaagaaatgacactggttaaagtgaaagggtggaaaaactggattagggcttatccgttgtctcagcctgggatttctttccttttctttgcaatatatagaagtagtgcagcatagtgcttaagagtacaaactgcctgggttcaatccctgctgtatacagtttagcacctgtgagatcctgggaagattacctaacctttctgtgccccaatttcctcatctgtaatggggggaaatgacagtacttactttgtaagaagaatgttgttgtaagaattcagagttgttggggcatggtgcctcatgtctttaatcccagcagtttgagaggcatggatcatttgaggtcaggagtttcagaccagcctggccaatatggtaaaacctcatctctactaaaaatacaaaaattagctggacatggtggcgtgcaccagtaatcccagctactccggaggctgaggcaggagaatcacttgaacccaagaggcggaggttgcagtgagccaagatcatgccactgcactccagtctgggagacagagcgagacactgtctcaaaaaaaaaaaaaaattcaaagcgttaacaatcctaatgaagcacgtggtattggtactggccacagtaagtgcttcgtggcattagcattcattaatctttgtttcttgcacactctccatcgtgttcccccacctaacagaataactggaagagctgccactatgcttaacatatgaacccggtctccaggtgaatgtaggaatctttttgtttgtttgtttcttggcattacaaaaatgaaagttcagtgaccctaggtgtgtgtggacatttgggggcaggcagcacgcagggtggctgaagggctctggagttgacaccacctggtttcttttgggacctgcaactcagtagtttgtttcttgacctctctcttcatcagtttccaaatgtgtaaaatgggcacaaaaacaataatggggttgtttgggattaaatgtgatgatatatgtataaagctcttaacacgcacgtggtaaacttgttagttctttccatattcaagtgtgaaactggaagacaaagtaattacattctgtttcagatgtctttgtaaatgaccttgccttctctccctccccaatgggctgcctgatcaccctggctcatgtggcgcctctgctttgtgaagtcaagtttcacaggtgcagcagtaatggatggtcacaacccacatattgagttcaacttttatgatgcaaacatttacaaaacagttggacagtgatgagtagctatgaggatgttctccgttgtcctccttgtcaaagccccgaacacattatttcacttctgtttttttttttttggagacagtctcacactgtcgcccaggctgaagtgcagtggtgcaagctccactcactgcaagctctgcctcccgggttcacgccattctcctgcctcagcttctcgagtagctgggactacaggcgtccgccaccacgcccagctaattttttgtattttagtggagacggggtttcactgtgttagccaggatggtctcgatctcctgacctcgtgatccgcccgcctcggcctcccaaaatgctgggattacaggtgcgagccaccacgcccaggccttatttcgcttctaatgtgctttagaaacagccattgtcttcgaaaggaaagtagctcatgctcagagatagccaaaacatctgacacactgaaatcactcgcagactgaagtcgattggagaatgtttctggcaggtggaaagagtgactataatgagatagaattgttagtccttattgattctgtggaattccagaatcagggaaaagaaaaacaaagaaataaaacccaagaaaatccaggcaataagactcagtaaattaacaacttccttcccaagacatacacatatatgtgtatgtgtgtgtacgtgggtaaattttttttttttttttttttttttgagacggagtttcactctgtcacccaggctgggagtgcagtggtgcgatcttggctcactgcaacctctgcctcccgggttcaagcaattttctggcctcagcctcccaattagctgggattacaggcatgtgccactacacccagctaatttttgtatttttttagtagagatggggtttcaccatgttggccaggctggtctcgaactcctgacctcgagtgatctgcccgcctcggcctcctaaagtgctgggattccaggcatgagccaccgctcctggcctaaatttttatatatacatatatatatttacacacacacacacacacacacacacagctgacccttgaataacttgagggttgggagtgccaactcccaaggcagtcaaaaaatccatgaataacatttgacttccgtaaaagacttaactactaatagcctattattgacttgaagccttgctgataacataaacagttaccacatattttatgtgttgtatgtattgtattatgtattatatatgtatttatgtgttgtatgtttatggtatattcttaaagtaagctagagaaaagaaattgttattaaaattgtaaggaagagacaatactatatttactattcattaagtggacgtggatccatcaaggtcctcatccttgtcatcttcacattgagtaggctgaggaggaggaggaagaggggttggttttgctgtctcaggggtggcagaagcacacaaaaaaattagtttataagtggacctatgtagtttaaacccgtgttgttcaagggtcaactgtacacacacacacgtttagaggtccatttacacacatgtattgcatggctattttacaaattaaaagtactggactttggtttttaaacaaatcacccatatccatccaggttagaggaagtctgcagtcagtagcagttcacctggagaaaggcatttttgttttttgttgcttgctaccccaacctgagttagtaatctaagtttactgtcagaaaagtgaatgcttgctaaggctgaataactaaaacaggggtgtgatattttcactacgttcttgacaattcagaaaacatttagagttctctattcaattcctgggagctgcattttaaaataaagttgtgtccagagccttatgacaaggcaaggatgtcttgttaaatgatgaatgttttcaggaaaccagaatactgaggataaaaacgagagattctggaggtgatatatgatagttatgttcagatacttgaaggacagttacatgaaagtggaatccaagatcttttctgcagctccagcatgtcgaatattatgggggagcttgaatcaatgtaaaaaaaagattatctggccaggcatggtggctcaaggctgtaatccaagcactttgggaggtcaaggtgggcagaccacttgagcccaggagtttgagaccagcctaggcaacatagtgagaccctgtcacacaaaaaaatacaaagattagccaggtgtggtgctgcatgccactctggaggccgaggtgggaggatcacttgagcccaggaggttgggactgccgtgagctgatatcgtgccattgcactccagcagcctgggcaacagagtgagaccttgtctcaaaaaaaaaaaaaaaaaatcctctaatgagggagttgtcataaaacaaaaggactgtcttaggagctaatgaatttcctgtcactggaagtacttgcagaaggcctggggtttttggagaggtaattccttctcagttttagattttgggctagatatctaccagggtcccttccaaatccaggatttgtctggctagtttcctcccgctgctaatagtcatctacattcatttttttttccccccagtttgtttcctcattactctggcttttaatttttttcaattaatagacatttttggaacagttttcagtttgtagaaaaatgagcagaaagtacgaagttccatactcctcactctctcccttccctccagttgctcccactattaccatgttgcattagaatggtacatttgttatcattgatgagacaatattgatgcattattattgttgagtccatagtttacctgagggttccctcttggtgttgtacattctgtgtgtttagacaaatgtgtaatgacaagttcccaccattagagtatcatacagggtggtttcaccgccctaaaaatctcctgtgccccacctattcatccctccttccctcaccctgagacgctggcagccactgatctttttgctgtcttcatagttttgcctttgacacagtgtcatacagttggaatcatatagtatgtagccttttcagattggcttctttcacttagtaatatgcatttgtttgtttatttatttatttattatttttgagacagagtcttgctctgttgcccaggctggagtgcagtggcacgatctcggctcactacaacctccgcctcctgggttcaagcgattctcctgcctcagcctcccgagtagtcggactacaggcatgcaccaccatacctggataatttttttgtagttttagtagagatggggtttcactgtattagccaggatggtctcgatctcctgacctcatgattcactctcagtctcccaaagtgctgggattacaggcgtgagccaccatgcccagtctatctatttattttttgagacagtttctctcttgttgcccaggctggagtgcaatggttcagtctcagctcactgcaacctctgactcccaggttcaagtgattctcctgcctcagcctcaaaagtagctgggattacatgcatgcgcctccacggccggctaatttttttgtatttagtagaggtgtggtttcaccgtgttggtcaggctggtctcgaactcctgacctcagctgatctgcctgcctcggcctcccaaagtgctgggattacaggtgtgagccatggtgcccagccatttttttttttttgatacagagtctcactctgtagcccaagctggagtgcagtggtgcaatctcagctccctgtaacctctgcttctggggctcaagtgattctcgtgactcagcctcctgagtagtggggactacaggcgcctgccaccacacgcagctaatttttttgtattttagtagagatgggattttaccatgttgcccctgggtgttctcaaactcctgggctcaggcgatccaccagctttggcctcccaaagtgctgggattacagacatgaaccactgaacccggccagtaatatgcattcgaggtttcttcgtgtctttttgtggcttgagaattcatttctttttatcataatattccatggtctgcatgcaccatagcgtgtgtttctatttacctattaaaggacatcttggttgcttccaagttttggcaatggtggtgcaagttttcctgtggacctaagttttcagttcatttggttgaattcccaggagcatgattgctgagtatggtgagcatttttattactgagaatggtgagcatgtttagttttgtaagaaactgccaaactattttccaaagaggctgtacctttttacattcacaccagaaatgaatgagagttcctgttgctccacatcctccccagcatttggtgttgtcagtgttttggattttagccattctgtagatgtgtagtgggctgacttttttctcaattttagatgtgttatctccaaatcactatgaaaaatacttttaacactactattaatgtaacataacactagtatctttcaagatccaaataaagacattggaaacaagaacaagctcttatgttcatatcaatattgttaataataataatactacatatttatttgtgagtactttttgagttcattctgaaaacaaatgctactaggagattattcacaagacacatttctgattaacatgtatgagcagttatactccaaagcttcgattttggcaaccaatgtataccagttctctcaaggtgcacttttgtttttgaacagttgctactgattctattttttaaaaaaattattgtgtatatttaaggtgtacaacttgatttgatatacatatgcaatgtgaaagaatcatcacaatccagataattaatatatttatcacttcacatagttacccttttgtgtatatgatgagcatacttaagatctacccttttaataaataaatttctagtatacagtacactattgttaccatccattatatctccagaacttattcatcttgcataactgaaacttggtatgcattaaccaccatctccctattcccctctcctcgcacctcatggcagccaccattctactgtctgattctaagttcaactatcttagattctacctttaagttagatcatgcagtagctctcattctgtgcctggcttgtattgattctggattgagacttttcagtgtctttgtttcaggtctttcaagttgcatatgtcatcattaaagctgccaatgcccctcgacctggaaactggattttggagcgttctctggatggcaccacgttcagcccctggcagtattatgcagtcagcgactcagagtgtttgtctcgttacaatataactccaagacgagggccacccacctacagggctgatgatgaagtgatctgcacctcctattattccagattggtgccacttgagcatggagaggtaggtatggtgcccgctgcagcaagatctgtttcctcatcagagtctccctgtctcagactcaaaattgatctctctcaatacaaagatctttaatataactatctagctctatttaaagtggccttgagtcatgtctattataagtaatttcacaaacaatatggtttaccttgttgacttcctctcttcaaggaggctctcagtcttcactctgctgtgatttaataacgcccttggatcctccttcagagcatcttccccacagcaccagggcaagaatgtttgttgaaatattagagagctaaaatgtcccccaaagttgtagttcccttttctcagtgttctcctcggtaggtggtgagcactggagactcttgaagtcttgcagcttagtgcccaacatgcccagattgtatacacttccttgaagtcagagtataatgagaaacagcccattctttagtagcacctggcttgatgagatgaaactacaaaaattctccagtgctcttcacagcgggaactctgcagcgagctgtgagttgtttcaagggcagagattaattaagacagcctgtatcattcaggctttgtggactttttctttgttcttctcgaagcctattcataacattttaaatttgcttcagagaagttgtagcccagggacagatgctgaaatattctaaccacttggagagaaacggtcttcttaaaagattttcagcaataatgccataatgtgatgaatgccgtagtctttgttcttcacattgtagtctggttccacatctgatctttggcaagtgagggttttcttttatatcaaattttaaagtttgagacataatttacattcaggaaaacatacagattttaagtatatagtatatctgagacagtgaaatagataccttcaataaactgaagacattgagatcatggtaattcacaagtaattaacaaatgttagacatatttttacaagaagctagttgttttgttttgattttagatggtatctctaaaagattctgtcctgacattagacaatcagggctatatttttgcatgcttaaaattgacatttgtggtcaggtatggtggctcatgcctataatcccagcattttgggaggcaaggcaggcggatcacctgagttcaggagttcaagaccaacctggtgaatatagtgaaaccctgtctctactaaaaatacaaaaattagctgggcgtggtggtgcacacctatagtcccagctactcgggaggctgaggcaggagaattgcttgaacctgggaggtggaggttacagtgagccaagattgtgccactgcactccagcctggaccaaagagcgagacgccatctcaaaaaataaataaataaataaacaattgacattcatctattttgatgccttcatcttcagattcatacatcactcatcaatggcagaccaagcgctgacgatctttcacccaagttgttggaattcacttctgcacgatatattcgccttcgcttgcaacgcattagaacgctcaatgcagatctcatgacccttagccaccgggaacctaaagaactggatcctattgttaccagacgcgtgagtatgggacggcagtcctgccaaataaaataaaaagattcattttatttaaaggaactattatttttcttctttcctttttggttgttctttccccgacatgttggccttttttcttgccagcagctgtatccttatttcatgtaagattgctatgttgttacagatgctgcctttaggtgatgggccaaaatcatatccttaggtccctcacccaccccgtccccatagtgccataatgtggtgaatgccatggtctttgttcttcacatcgtagtctggttccacatctgatcttcagcaactgagaattttctttcatatcaaattttaaagtttgagacataatttacattcaggaaagcatacagattttaagtatgtagttaagtgtgtaagactggtgtcgcaaaaattttcatatcccttcaataacccaggagtgggattactaagttatagggtagctggatgtttacctttttaagaaaatgctaaacttatataaaaagtagttgtattcagctgggtgttgtggctcacgtgtgtaatcccaacactttgggaggctgaaatgggagggtcactgaagcctgggagtttgggaccagcctgggcaatagagtgagacctcaactctatttaaaaaataaaaataaaagtagttgtgtccgtttttgtagtctgaccagcaatgtgtgagagttctggctgcactacacactgttagatatttagtgctatcagtcatttttatgcccgctgttcctgtgtgcgtgtattggcattttgtgacgttaatttgtgtttctctgctgactaatgttgacaatgtgcttactagtatacgatcagattttttttgtccatttttaaattggacaaaaaataagcctccttgttactgacttataaaagaattttatatattttgtatacgaatccttcatcagatatgtatatattgcaaacatatccgttctacttggtgtttgcttattcaccttcctgtgactttggatgagcagaggttttgtgacgaatcccaatttaccattttttcttttatgattaatgctttctatgacctcaaaaaatattagcttatcccaaatttaccaagatatcatggtaggctttcttttagtagctgtatagttttagcttttacatctataattcattttgtattaatttttgtgattggtgtgagggaggagtcagagttttttttgcttttgttttttttcctatatgtatatgcaattgttctagcaccatttgttgagaatgctttacttgttttggggccgttgttgaaaactattcaaccttattattgtgggtttatttctggactctctactgttctatagatctgtttgtctattcttgtgccaataacaagctttcttggttactgtagctttacagtaggtcttgagaggtcaggtttcttgtatttccttatgaattttagaatcagtttgttaatttctgcaaaaaaaataaagcctgctaagattttcattgggattccattgattctttacaccaatttgtgaagaattttataagacattttaacaatgttgagtcatccaatctgtgcacctgatatataacttttcacttatctaaatcttctttaattctctttggcagagttttattgtttatttgaaaaggtcttgttcaataatgctcaacaatgttcaataatgaaaaaagaaggccgggcacagtggctcatgctgtaatcccagcactttgggaggctgaggcgggtggatcacgaggtcaggagatcaagaccatcctggctaacacggtgaaaccccgtctctactaaaaatacaaaaattagctgggcgtggtggcgcatgcctgtaatcccagctactcaggaggctgaggcaggagaatagcttgaacccaggaggtagaggttgcagagagctgagatcgcgccactgcactccagcctgggtgatagaccgagactctgtctcaaaaaaaaaaaaaaaaagaaatcaaggcacacatagtaagactaaactgttattatttgtagatgacatgattatgtatgtagaaaagctacaaagcaactaccagaaataacaagtgaatttagcagtgttgcagtatacaaaatcaatgaacaaaaatgaatcacatttttagtcactagcaatgaacaatggaaaatgaaatctaaaaagaagtctattaacactaacatgtaaaaacatagagaactggtgagtgcatttcttcagaggaaagcactttgttctgttaatgtgatttacatttcttgatttttgtgtggtagattaactttgcattctagggtaactcttacttgttcatgatcttttctatagagtgctgtattcaatttgccaattattttacggttttcaataatgagttttgaaacattactgacttggtttaagatgcagttggggaattcttttagacttctttgggttctgatgagctaatttgagcctaatttattttaattgagcacaggattctttgtgcatgaaatataatttttaaatgtacatgtaattatattttagattaccaataaaaactcttaaactacatgagatatttgttggtgtgccaacattttcatttcactgaaatctaggttttaatttttgttcataactttctttttccttagtattattattcaataaaggacatttctgttggaggcatgtgtatctgctatggccatgctagtagctgcccatgggatgaaactacaaaggtgagttctagtatttcacattttactaaaacttcaaaacagaaattgtagctataatatttgcattactcttttttattccaaacaaacatgaaaggtataaaattatgctccaaaaaaacagattttcagaaatttaacttgtgtcatttttaaacaatttcattttgctttggaggatatgtttctaattaagttcttacaatgatttttttatgtgataaaatatccctaacataaagtttaccatttgaaagtgtacagttcagtggccttattaattttgaagcccttctgtctgtaagaaagtaaaaaaaaaaaaaagtgcaattataaattatgtttatattttttagaagaaaggttttctcttcctattttctccccttccgttttttttggtgctaaatcaagatttaaaaggggcatggtggcttacacctgtaatcccagcactttgggaggcagaggcgggtggatcacttgaggctaggaatttgagaccagtctggccaacatggcaaaaccccatctttgctgaaaatacaaaaattagtggggcgtggtggtatgcacctatagtcccagctactcgagaggttgaggcaggagaatggcttgaactcgggaggtggaggttgcagtgagctgagatcatgctgctgcactccagcctgggtgacagagcgagactctgtctcaataaaaaaatttaaaaaaaagatttaacagtttatctcttttagcattacattaaatgaataatatgacatcttctccttttattttttaaaatttttatttatttagagacagttttgctcttgttgtccatgctggagtgcagtggtgcaatctcggctcactgcaacctccgcatcctgggttcaagggattatcttgcttcagcctcctgagtagctgggattacaggcacgtgccaccatgcccagctaattttttgtatttttagtagagatggggtttcaccatgttggccaggctggtcctggcatcttcccttttaaaacacttgcatgaagttacttcttattttcttctaatctttgtaattctttacctcttgaataggactattctgttatcgatgctgaaaaatctgtagatgaacactaagaaaattattaataggagtttctaaacccttaataagttccatgtatatttttaaaaaaagtttttattagctaagtcgtattctggttttgctttattcctcttcatttctgtttgtaaccaggttatttgtatatattggcatctaaaaattaaatgccagtttgctttgatgataatcatatatcctctgttgtgaggttcttgccacatatttgacagataggttctttttaccatgaaattaagaaacataagcagatacattttctaattcagttttggcttccttattgtgtagaaactgcagtgtcaatgtgagcataatacttgcggggagagctgtaacaggtgctgtcctgggtaccatcagcagccctggaggccgggaaccgtgtcctccggcaatacatgtgaaggtcagtatacttagaatctgaaggtcagtacagttttcctcttaatacgtcccaagtttatggtgtcttaacaacttttatagttagcaggtaacttgttttcttagaaatttaagtagtttccaaagctgcagatgaccttaaaattttaactattgtggcctaaatgtatctttatgggtttgctgttttatctatgagtcccccttcccgtatagtctattattctgtattaattttacttttgtttttgtttttttaccatgggatatgccaggttgtatattctgtattgatttggatttaagttttaaataagcaatatattcacaagattcctagatctaacaatatgtaaaagtatgtagttaaaagcatgacttccacttcatctccctccttcgcactttttattgttttctagtatgtccttcctaaaattgttatgcatataacgcatatgttaacatatccctccagccaacacagttcttacgcagaagacaatgtactatgcatgccattgtacatatcgctttttttttttttttttttttttgagatggagtctcactctgtcacctacgctggagtgcagtggcgcgatctcggctcactgcaacctctgcctcccaggttcatgcttcatgccattctcctgcctcagcctcctgagtagctgggactacaggtgcccaccaccacacccggctaatttttttgtatttttagtagagacggggtttcactgtgttagccaggatggtctccatctcttgacctcgtgatccgcccgcctcggcctcccaaagtgctgggattacaggcgtgtgccatggcgcccagcccacatcgctttttatatttaacaatgtattgtgaaattctttccatattagcaattagaaatgctgtttttaaaaacagttgcacagaattccattatacaaatgtagtataatttattaaacaaccacctatcggcggttattttgatggttattagtctgttgtccacacaaacaatggtgcagtgattaaccctgtatgtgtccttctcaagtgggcaagtacttctgcgaaatataatcccaggagatggtttgctgggtcaaatgggtatgtgcatttattattttgatattaatagctcttcccaattgtcctccataatactgcccatatcttattaaaattacttattctaggattttaatttaatctaaaatcatagaacttacttagggaggttaagagttttctttgtataaggcatgctatgtaaattaattgagatgttaaaaatattctcctagcatgtaattgtcacaataaagccaaagactgttactatgatgaaagtgttgcaaagcagaagaaaagtttgaatactgctggacagttcagaggaggaggggtttgcataaattgcttgcagaacaccatgggaatcaactgtgaaacctgtattgatggatattatagaccacacaaagtaagagtatttctttgccattgctgatcttcatcatcttccccaggtggaaaagagactttgtcaagtcttaacctctgtattggagacttttgtaatatttcatttatatccttgttatgccagtagtgtttttatatatatatttcctactctatcctgcttttcttgctcaaaataagatgtcagtcattgttatttatcttgaattcaggggtccattagctatgtaatcctgggtcataatactaactacagatgtgaaaattcagctataactaaagcagctgtctcttgcctgtaggagatgttcagccaatcttttttttttaatttttattttttgagacggagtctcgctctgtcgccaggctggagtgcagtggtgcgatctcggctcactgcaacctccacctcccgggttcaagcgattctcctgcctcagcctcccgagtagctgggattacaggcatgttccaccacacccagctaatttttgtatttttagtagagacagggtttcaccatgtcggccaggatggtctcaatcccttgaccttgtggtccgcctgccttggcctcccagagtgctgggattacagatgtgagccaccacgcctggccgtgttcagccaatctttaattgacttgatatgtagttcttacatgagtccttgtggtgtcctggttataacgtggctctgagagacagcagcgcgaggggggctggagagcagggataatagaaaaagatgacactttgctaagggtactaactactgccaccatcaaaaagatgtttgggcttcctggcttgggatcatcttatcttcctcaaacctaacccccacccccatgcacaaaatcatcgtaatagtcccatcttgagtaaaaagccaataccttcttatttatactattgccaacattgctgttatttctagtaagagaatccagggcaacctctgcctttcaggtgtctccttatgaggatgagccttgccgcccctgtaattgtgaccctgtggggtccctcagttctgtctgtattaaggatgacctccattctgacttacacaatggtaagtacttgattcacttttgtgcttgtaattgattttgtgtgtgtgtggaagatttgcacatactggaactaatggtaatagccagttggtaacatgattattgattcttttgttcaccaagtacgtatcaagcacctactatgtgtcaggcagtttttgaggacctgggaatgtgtacttaacaaggtagtcaaagtccttgctcacaaaaacactaaacaaacaggtacatgggtaatataatgccaggtcgagaggtagtgtcatggacataaagcaaaattaggactcatgaatggagggagatggggtaatgaggtgacaatgttggggtgatgaaatgacatttgagcagataattgagcatttggtgaaggaagaaataaggcccagtttaaagccatgcgtggaacacagtaaatagcaattgctctccttagcttttagaagacatttggagggcttttgcataaatcatctcacagatcaagcaagtcctcccattaacttggtaaatgtcagagttctctttccgtttcaaaaactggcaaattgacttgcaaataccagagtctcctgaataggttgcgtctgttcaaagactcttgtgaccccatcaagttctcagccactggcagttaaaatggatatcgaccagtagggatgggtgggccccccagcgatggggagggtaaattacccaactgaattgattcttacgtgcacctggtgaggggatgatgacgatgataataatgaagatgatgatggtgatagtggtggtgacatttaccctcaattgagttcatttaaaaaaatatatcatttaaactttgcaaccatagcagatagaaattacttaacccactttgctgtagctcagagcagtcaagaaggttaactgcctgaaggtttcaaaactgacattaaaagcaaagatagtgcttgctgctctctgccacttgcctctgtgcttttttttttttacaaaacagttttataatttacaacgatacagttctcccatttgaagtctacaattcattgttttggtgtattggtgcaaccatcaccacaatctaagagtcgaacattttcatcatcccataaagaagccccttacaaactagctgtcacttcttactttcctccagccccttctcccggcccctggcaatcgttaattacctttttctttgcagatttacctattctgaacttagaaatggaaccatatatgttggtttttggtgactggcttctttcatttagtataatgttttcaaggtcatccgtgttgtaccatgtatcagtatttcaaccctttttattaccaaataatatttcatagtatggacataccatgtttcatatatccattcatcagttgatgaacatttgaattgtttctactttggggccattatgaacaatgctactagggacttttgtgggtgtatgttttcattattttattgggtgtttacttaggagtgcagttgctggatcttatggcaactctataacttaacattttgaagaagtgtcaaaaggttttccaaagtcactctaccattttatattcccagctccctccacgggtttcatctctgttttctttctttaaacaaggaattggcaaactatggcccatgggccaaatccagcacactgtctgttcttatgaataaagttttattggaatggagatatagccatttgcctgtgtattctctatggctgtgttcgaacaataatggctgagctgagcagctgcaaatgagactctgaggccaaaaagcctaaaatagataccctctgaccctttacagaaaacatttgccaacccctgctttaaacctcttttgccttcatgttgggtcattgccattgttgtctttctagggaagcagccaggtcagtgcccatgtaaggaaggttatacaggagaaaaatgtgatcgctgccaacttggctataaggattacccgacctgtgtctcctgtgggtgcaacccagtgggcagtgccagtgatgagccctgcacagggccctgtgtttgtaaggtaagtggggaggtcagagacacccctgagcttcctttgagcttctctggaaaaggagtgttttccattggctccaatgatcagttcttgagcaaagtggtaaggtttaagcagaactccccttgccccttctctccaagccacaccgagttggctgtattatatatgcttggactcacatgggcatctggcttctttttttgtacctctggtaatggtgatatattccagaggcatttctgtgacttcttagaggacaccaaacactgcatacctttatattcccacctcctctgtgggcctcatctctgttttctttctttaaaccaggacttggtaaactatggctcgtgggccaaatctgacacactgcctgttttgtgaataaagttttattggaacagagctgtatccatttgcttatgtattttctatgactatgttcaaccaataaaggctgagttgagtagttgcaaaagagatgctgttgacccctagcttaattctatggtattcttttccagctttgtattcggaagagaaccagattaacattaaatttctgagaacaccaattaaacgcagatatgctattttgagtgtctgttaaaaaggagttgaatagtcataagaaatgcattaatatggtgccagtgaggggttttatttggccttacaatattaataacaatttcttcataattcataggacattccattgtacctatgtgcttattcccacctgtgcagtcttaggcacatgttatatactactggaaataatcttgagcatttatgaataagagaaaattctatagctctcttcagattttgaaatgctggaaagatcagtaaaaaaatgaaaaatttaaaacaaaacaaaacaatttaaatggaatgaccgagttctaagatctccagccttgttcttgagtacaaaatcaaattatatataattcaaaatctctattctggaaatattgactttatgaggcctcacctttactttggacgtttattcacctgtctctgtggatcaccgaacacctatcttgttaatgtcattttattctctctggacagacacattggtttcaaaagctaatcttttaccctaacttacaggaaaacgttgaggggaaggcctgtgatcgctgcaagccaggattctataacttgaaggaaaaaaacccccggggctgctccgagtgcttctgctttggcgtttctgatgtctgcagcagcctctcttggcctgttggtcaggtgggaggcgccatctgcgcggcgggatttaatgagcaggtcgtattgcacaagcttggcacgagctgtgtgaggaggaaatgaggatgacttcccgtgacaccactctcatcgctatgcaatgatactgacgtgggtcaaaggcagccgtctgcctctcaagattctttataggtcatgtgcttactcccacacacatttctctatggaaaaaacaggatgatgtggcactagagaacacgtcttgtttcaatttcttctgtggggaaatggattgggtggggaggtcggctctccctccgcccgcccctgctgctctcaggcctgggagcccagagggccgtggggccatggggattttccagctcaaagacgctaaggagtaggaggccctccagtggcgagggtgggaacagcggcacgtggtgcagggtttaggaatgcaggccaagttgtttccggaacagggagttctggggtgatgggttcaacaggggtgtccagtggtggctaggagaggtggagatggtgtgatggctgcaggcaagggaggagctgctcggtagggacttacccagcagtgactgctgtggacaccacgctggggggagtaccatcacctctatgtcggtgacgcattgggagtataagatctagaggttatctttgtacatttttcaacatttgggtaaaaagcagggggcaacgaagaagagggagtcagacttagcaagagacattttgctgaatgcatttatgatgttctttgttgttttaaatctaaaatctatacccatggcctttatggttttgctcatttatttgcttatactggatctggatttggagtagtgagacttgttctcaggtcctcctggtcctttacaagtggaagggtcaagggtcatgaggttcagcagccacaggtgttatgttaatgccatccctagagaagctttctggcccatttcttcattgtgaaaatattactgctgcactgggtgaaatctaaggtaagttctatttcatacttcaaaattcttgaatttgtttttaaggtaaacagtatgtccgggtggctggtcaccgacttgatcagtcccaggaagatcccgtctcagcaagatgcactaggcgggcgccatcaggtcagcatcaacaacaccgcggtcatgcagagactggctcccaagtactactgggcagcccccgaggcctaccttggaaataaggtgcgtgtgaccctgcaggtagcgatgtctcagatgaagatctcagggaacactgagaaagaacttgcgctgcctgcattttaggtagtctcatagggcacctgagtgttggacagcatttcatagcctgtacttgcatctgatgatacaaagaaggttttctagccttgttagactttatgttgtattattcaaataagaacttctgctcttctggtctggttcctgagcagtgtgtttggtgaagtctcatccccgtctctgagataaactttctgggtccctggatcacttgtttatgaagtgttcctcacattcccgctttgtttagtttgccataggctcagcttagagcctccatggcttagtggagggcctggcatacaagaaacaacccagggaaggttccagcaatgggactgctgtgctgctccctcactttgagtaccgtggcaggctgtgctcatctgaagctcacatttaggaacagatggaatactttctgcttttgttatatttcaagaaaatgcaaactggtgattctgcaatgtggaggttggtttgtaggcttgggccttccttgcaatgatgtgttcccattcccccctccccacttatgccgcatctctccagattctgattgatacgaaaatttattcccgagaatgcatctcaattattatagctccctgcttaccttcccgggtttttggttttgttttgttttaaagtaatggcatacaggcatgctagtgtagtcttgtagcttggtacgcttctatttaatttgatgatattttcattttaaaacttgttttgtatatttttaaggagtatttatttttgaaaattatttttttctcaaattataatcctagaacatgtgctctattgatatgattttatcaacagagttcaatgatttttttttctcttgatatcacttctccaattttatggtgcaaagttgggttctgaacaatatattgctgtcatatacccatcagaaagaaaatcttaattttatattgaaggacatctaatcagaagaaacacctttagtcctttctctaactagcaaatcagacatattctttgttgtcctatgaggaggatgctgaaatgaaaatgtggagattgtagacatgggtcaaactcctcatcccctaaattacttaaccgaagtaaatatctattgtgtgattaacaaaagtttatagtaatttgccttgtggtctctaacaaagagtacatttttcttctgtgctttcaaacagtgtcctgcatgttggtaatattgattaaccaaaatgtttatgaatatactcccctttcactgcctttaatgtgaatttccttgtctgtcatggtcaaggggatagttgtagcctagttgtttgcagatggatcccagtgaccacttcctcttacttgattgttgctgtgattgtcttcccctttcgtgttcattctcgcttaaacatttcagctgactgcgtttggcggattcctgaaatacacggtgtcctacgatattccggtagagacggtagacagtaacctcatgtcgcatgctgacgtcatcattaaggtgattgtttttgctttgattctgctatagagcttagggcttagtgggctgatagtttatgactgaaagttactaggtgaggacatcccagcaaggagctggtggccaggtggccattcagtagaccctggacttgcgtggggactactgagatggtgagtgtgagaatctgtctttgagcccatttctggagttgcctcaggacagcacccgccactcttctcttcatctccagggtgtacccatcttttcacatttaaaaagaaagggagctgggcttggtggctcatgcttataatgtaagtgctttgggaggctgagacaggaggattgtttgaagccaggagtttgagaccagtctgggcaacatagtgagacccccgtctctcaaaaaatattagccaggcaccgtggcacgtgcctgtaatcccaggtactcgggagggtgaggcaggaggatggcttgagcccaggagttcaaggttatagtgagctgtgattgcaccactgcactccaacctgggtgacagagagagagcctatctcaaaaaaaaaaaaattttaagtaaaaaggagacaaatttttgctctgaccttgaatcttctttttgaagtctcttcttccctgtgccactttgcctctcagatgaatggattaggcagtacttggcggtctgaggacagtagacgtgttgccatacttgtcctcagcctctgtccctatccccacatcctcagtctccataaaaagatccagctcagtcaggaggactccccaagtggtaatgtcccagggtctggggcatgtctgggcagaaaccactccaggttcttgtctctcatgtcctttcacctggagctatcttcacctccatctccagcctgaccaattgcagaccgcacacggtaaatcacttttgtgaacagcaacttgatgaaaagctggagctatgtttacatactttttctacttctgtactttagttaaagattagaggtgtcagatgggttgctttgataaaagctgtgggcaactgcacgactttctttcttttccaagatcccagcgaagtacacaggctttcagtttattaccagaacccctctaaaaataatacaatgaaacaccttttctctgataattctgggccaagagctgtacacaccattacacgtttgccacaagaagctaggcacgaatgaaaaaccacgttgctgaatacaaaatttgattttatttttattttatcattaaattgaatgacaaatatattttctcttgtttttaaatgttagggaaacggactcactttaagcacacaggctgagggtctgtcattgcagccttatgaagagtacctaaacgtggttagacttgtgcctgaaaacttccaagattttcacagcaaaaggcagattgatcgtgaccagctgatgactgtccttgccaatgtgacacatcttttgatcagagccaactacaattctgcaaaaatggctctttacaggtatgtattgaaaatggaggaaaaacttacggtgaaggtacttccattttatgtttgtttattcatatatatttaaagctcaacgtattttacattcattatattaaggacacagctacaggatctggctgtcttaagaattattaagtttataaatgtaattttattgaaaacgtaagaacagttatccacatcaagtgtatccagtagaagacagacttgacattaggatgagaaactttcaaagggggtttctgggaaatgcacgatgagttagcgattgtctggaccatgttgcacctggttctcaccatcctaatgttaatggtcttagcttttactcagtccatttaagtgaacgtatccatcgttggtcatttgattactttcgggaggacaatttctggcaatgccgtgccaagcataaaagttgtatgcagctaggctgggcatggtggctcacacctgtaatcccagcactttgggaggccgaggcaggtggattgcatgaggtcaggagtttgagaccagcctggccaacatggtgaaaccccatctctactaaaaatacaaaaaattagccaggcatggtggcgcatgcctgtagtcccagctattcaggaggctgaggcatgagaatcatttgaacccaggaggtgcacgttgcagtgagctgaggttaaggcactgcactccagctggggcagcacaacgagactttgtctcaaaaaaaaaaagttgtatgcatctaacacaaacatagcatgacacatttaagggtaatctttctatttgtgataattgaatggattaatttttctgaggtgcttcaactccaaataggcaacaccagacctttcccacagtcatctatgggcagcagcatgactttgtaccaaacattgaaggcatttccagggaataatgatggctcccagataatatattgttgtgaaagacctttagttatttacaaaaatcacatcacccttttattggatttaagtctttttttttttttttgagacagagtctccctctatcacccaggctggagtgcagtggcgtgatctcagctcactgcaagctctgcctcccaggatcaagcgattctcctgcctcagcctcctgagtagctgggactacaggcacatgccaccacgcccggctaattttgtatttttaatagtttcaccatattagccaggatggtctcgatctcttgacctcgtgatccacccaccttggcctcccaaagtgctgggattacaggcgtgagccactgcgcccggccggatttaaatcttttaggagcccatcttcattgagatgtgagatgtatttgcgagcgtgtgagtcacataacaatctgtctatttgtaggttggagtccgtctctctggacatagccagctctaatgccatcgacctggtggtggccgctgatgtggagcactgtgaatgtccgcaaggctacacagggacctcctgtgaggtgacgcttctctcttcctgtctttttcctttcgttccttcctaaggggaaaacagtgcactgaaggggatgtcatggcaaacatttgatttttagctttagcagcccaatgtttggctcagtcttttttgggcaatagaaatattagaagtcacattgtttaaaaaaatcagattcctccaccaggaatgggctggagcaccggacaatattctgacttagtgctgccctcttgccttagtcaacaagaaacttgcaatactcatgccattgactgtgtttctaaggaggatggaacttgatcatatctgaacatttacaaatcaccagcatgtgacctgggtagctttagacaagccagccctattttgagaccttttatggcccctcgctattttactttggtgggctccaccttacatgtgaaatatatgaaaatgcgcttggaatcctcaatgaaagtaatctgttgctaaaaatattttgaaatcacttggacaaacatattgatattaataccataacaagaataggccgtaagactcattgcacaaccattacgtttttgtgtgtgtgtttctacctttaaaaagaaataaggaactggattatggtgatggttgcacagctcggtaaggtttttactaaaagtcattgaattgtacacttaaaatgggtgaattgtgtagcatgtaaatgatacctcagttaagatgtttaagaaaaaagacatttctgtactctggcaactgagcagtttctgtttgtaacgtagtggaaagaggatgactttcccttctcttgcagtcgtgcctctctggctattaccgcgtggatggaatactctttggaggaatttgtcaaccctgtgaatgccacggccatgcagctgagtgtaatgttcacggcgtttgcattgtgagtctctcactgtagttcaggtgccctctcctcctcaattcagagccatttgctgtgtacaagtgatttttttttaagtgcttcctccacggaataaccctagcctcatagaccccaaagaaaatttacagatttaagctcatgtcatgaaatgtttcccgtttttttttttgttttttttttgaaaaaagttactttggtaatagtggaaaagggatatacaacttcattatagttctttttattagattaatataaagtaattgtttttatttgctgagactataaagcaatagaaaggtaaaaaaatgttgtctacttattaaatacaaagcataggatctttagatgacagtgctaatatttatttatttatttatttgagacagggtcttaccttgtcacccaggctggagtgtggtggcaccaacactgcttactgcagccctggatcttctgggctcaaatggtcctcccacctcaaccctccaagtagctgaggccacagacaatgctagtattttttttaaatcatgatattacataatataccctaagaagaagaataaagtataatcacactcacttatataccatgctttatagttagttgggataaattaatcaaacaggtacttctttcatgcaatatgagttgaaatagggcttaagaaataggtagttaatcttgagaatgaactttggggcaggtgtggggcaagacttgtttcttaacttcaatcaggaattcttctaggccctatgccctgaagccaggccacactctggggtctcatgggtttgatcctcagaggtggagtgactgcatatgctgatcagctgtaccctggtcgcctggcagggaaatgttcatgctttttccaaaagagattgactgagtcacagagttagggaaaattaattaccagacccagggagaagatcttagaatgatgtccaggatggcttatgtccaggatggcttagaacttaatttttctttattctgtaagtaaaacttttgttttgccctttgttctgtaagtaaagcttctgtaggaattgcatgaaggggtggtttacgggcagactcagtccctccaggattgctttcctcaggtgcacagcttccaaccgcttgatgaggtggttgctttttttttcacctcctttcctttgccatttgggtttgcaaggcctcctgccagcatttggggtggggtggggtggggggtacagcaggctgtggttctgccacttatgtcttttgtagctaggctgaaagagtagatttctcatgcttccattaatgtatgtttacaaatatatattcacattaaagtgataatgctaaatagcaactggccttaaagctttaattttaataaataataattttatagctttaaacatgttttggaaataattttagacttacagaagagctatgaaagagttacagaagtacagagagttctgaagtaaccttcccccagcatcccctaatgctaccatcttgcataactagagtggagttatcagaatgaagaagtagcacgataagatgaactacaccccacattctgatttcatcagtttttcactcatgctccttttttttgtaggatcgaacccaggaccccacaccattcagtgactttgcctttttagtctcctctcctctaggaaagttcctcagacttccttgtccttcatgactatgacacttttgaagagcactgagcattctgtggaatgtcccccagccagggcttgtctgatgctttcttatgactaggttgaggttacacatttttgaccagaagacgtggaggtgccgtgccctctcattgagagcagatggataggatatcattgtgtcttcttcctggggatcttaatctgggtcacttgaattaggtgatgtctgctaggtttttccactctgaagttactatttctcccttcttaattaatgtttgagagggcaaaaataataaaaatttaaattagaatttaaggaaatacaaaaaacgtggtagcatcatatatctgttaaatctaaccttgctggtttttttttttctaatatattgtaaaaacaagcttgaattcttccttttgtgtagttgttcatagccctgggccttgcgtataactatctagcttccaggagttaattctttattcacagttcattagagatgaggttccagttgctcttagagcccctgtttttctctctgagctctcttagctctttattcaaaggagaagtctgtgtattttccttgcagcttggcatgatttagaaaagagaatggcatcacagtaaattgtgcatgtcttgggccctcatgtctttcttttttcaatcgaaagatgtttttcctccccaaggagaggaatagtctcattccttcacataccagattcaccaacagggacagtcaggtaaagggctggtggcacacgcctgaaaaagcactgaaacagaccctcagtgggtttttcaacagaactacatactagtttccccaaagagaaagaaagcactatctgactccttgatcaaagaaaacataccatagacatgttccaaatgagcattatcaaatatttttaaaatgaaattgcagttactctgcagaatacttttagctcaaccatgtaaccctttactaagaccagttgcatcttgaattaatttggattcattatcaaacccaaggtcctatgaaggatgggaaggaaaaaagggtctaagactctgttgtctgaggaccagcagtgtgggcatcacctgggagcttgctagaagtgcagaaactcaggccccacctcagatcccctgaaccagagtctacaggtaacccaggtgcacttattaatagattcatattccagtttagatgctctggtctaggataaccctaagtaaaactgatgaaaccctggagtaaaatggatgtaatacaaatgcttacaattccaaattaaatgtggtatatgggaaaactttcatcaacctgaggaatgatggaaatgtatatggtttagaaactgaaaatactaaattgctagatgaaaaatgaccaatgaaagtatgtaaaatgagtggccgtaggagaaggggacacggggaaatgggagctgaggtgcacaccaagaggagcagcgacacacgtgtgcagaacaagccccgctcccttcgagcccgtagctgcccgggggtcagtgctgcctggtcctggccccagtgccgacctccgcacccctcccctttgctcctgcacacctcctaaccaccgactgcactttcttttagaatgttttaaatgagggggggaaggtttttcatattttttcatgtatgtaccatttccagtgctcttcattcgctggtataaatctatgatttcgtctagtaggtatcacctttctacagcctggattgttagcctttctgtagtgcagatctgctggttgacagattctcttaactctcctttatctgaaaaaggcttgccttcagttttgaaattgatttttacagatttctctttcagtactttaatattgttctgttgccttgtggcttacatggcttcaagtgagaagttagttggtggtcatctgcttatttctgtgtgttattctgccttttttctctgcctgctgttaggagggtctctgtgtccctgggtttgaacactttgactgtgccttggtgtgtatttctttatgctggggtttattgagcttctagaatttgtgagtttgtagctatcaacttatgaaaagttttgaccaaatagcttttcagcttcccacgccaatctaattgcacgtgacattgatccacagatgatagaggctgggatcttttgttttttcctgaagtttgagtttctgttgttgtcttcaaattcactagtcttttctcctacaatgtcgaagccgatgcccacccattcagtacttcattttggatatggtagcttctagttctagaagttctacttggtcctactttatatcttgcatttctcttttcacagtttttatgtttccttcaagtctttgagcatgcttataatagcttttttgtttttgttttgagatggagtctctctctgttgcccaggctggagtgcagtcacgtgatcttggctcactgcaacctctgcctcccaggttcatgcaattctcccacctcagcctcctaagtagctgggattacaggtgcacaccaccacgcccggctaatttttgtatttttagtagagatggggtttctccctgttggccaggctggtctcgaactcctgacctcaggtggtccacccgccttggcctaccaaagtgctgggattacaggcgtgaaccaccgcgcctggcctataacagtgttttaaaagcctgccaattccatcatctctatgatttgtggacatgtttctaatgactgggttttgttttttttttcccctgattgtggatcgcttttttttgttgttgttgttgtttctcatgtctagttattttcattccccataaaaaaaaacccagctctttatttggaaataattaggagtttacccaagatttgtaagaataagagtggtacgtagaacacctgccatttatctagactcccgtgttgttgccattttccccatttgccttattaatatcattatctgtctacctatctaattatagtatgtttttctaaactccttgagaatagtttgcatagacaatggccattttggtgtgtatattgcaagaataaggcttgtctcttgtataaccatagtacacttatcaacttaagtcaatgtaacgctggtactctactttttctaacctaccacctgttgctcagttttgtcagttgacccaattatgtcctgtatagcatccttccctccagcacaggcccccatctaggatcagatgttgaattttattgttgtgtctccttaggcttttaacaggaaatgtttctactgcctttctttgtattttatgctattggcattttgaataatataatcttttttttttttttttgagacggagtctcgctgtcacccaggcagtggcgccatctcagctgactacaagctccatctcccaggttcacgccattctgcctcagcctcccaggtagctgggactacaggcgcccgccaccaagcccagctaattttttgtatttttagtagagatggggtttcaccgtgttagccagggttgtgttgatctcctgacctcgcaatccacctgccttggcctcccaaagtgctgggattacaggcatgagccaccgcacctggccgaatatgatcatttttttaaaaaaatacaatgtccttggttctgggcccttcttttgtttctcttggattattcaggccggaatactttgtcaaggatgagtctctcagagcactgccaatgggagtcccagtgtctgtctggccctcactggtgatattaattctgattacacaggcaaggtgttggtcaatttttccactatatatgaacgattctttccttttgcaactaaaaaacagttggaggcggacactgtgagaccacgtgcatatcccactcttcatcagaattccccttagaggtagcagtcggaaggttctggccgaagcagcacttgctgtcatgtttgcaaaagcttgatcctccatctcctgcccttgtccatgctcatcagtcagagagaaagctctcagatttctcatttatacaaattacacttgctgatattaatctgaaaacaggaggccttcctcatatagctcagaggttggtgactggttttagcattttgtcttttttttttccgcttggacttcaagttgcttatagataaatctgaaaatcctttaagacaacctgagctgattcttctggtgcatgttcctaggcgtgtgcgcacaacaccaccggcgtccactgtgagcagtgcttgcccggcttctacggggagccttcccgagggacacctggggactgccagccctgcgcctgccctctcaccatagcctccaacaagtaagcctcggacctcatcagcggttcctgccagcatggccaggattcccacccagatgcgtactaatgacttcagagcaagactgtgtgtgtaatacgtgtgtgaattttgcccagtgacaattgatttggattaaagacagaggggtgggttattttcttgtaaaccaacgtttggcttatgaaagcaggcaagaagaggtgtgtgccagcaaggacctatacacgccgttttccctcttgattcctcttggtcatcagttgtttcacaagtatatgttgtctacttaccagtgggctaggaggtggagggatacagagaggaataaaacattgtccctcgacttagggagtttttgatctaatgaccaaaatatgtacgcatgaggctaaacaagagcagtctaaatccattcattgattcaacagatatttatggagtgcctactgtgtcctgagttttacagcaggtgttctgaatagcaaactgttctcacctggccgtgggccccaggggactcagtgtggtcgtgactgtagtgaggcctgtccaccagatggtggggaggagggagagcagtgtccagcctacctaggtgggtgcaggaagctcttctctcagatttgcaggagaaggagtttcacaggcagcatagacgggcgttctaggcagatggagctgggcgtgccatggcatggcagcaggaacaggcatcgcccatttgaggaactgcagcaggccatggaacagaaggcatggagggaggtggaaggagatgtaccaggcaaggtcttatagtcacactggggcaagtgcatcccacaggccagcagcttaaaagcctctgtctctcgctggtttaacctttagaactcttccttcacccactctcaaagaattcccagtatataaaaaggatgcagtcagggttactcatgatgaaattgggggtgggtactgtcatccaccctgcacaggatcctcaaggtttaggaatagggttggaaggggcatccgttagcagggggtccctggagaggtgcgagagcctcctgaccactttgtgtttgagtgagctcacttttgccctggtatgggcagtgctctgaggtgggaagtcagtgccagggaacccgagctggggaacccagcatcctaggagcacccgagcaggcctcctggaggaagcatcagctgagttgggcactggggctgagctgggttaacccaggcagacagcgagagaagcaggcgcgctgtgggctgagaatgagaggagtagggagcagggagtgaggagtgagtgtcagtgcctggatcatgggaccaggagtctgtgaggggttgagactcacagggtgggctgggtgaccagaggccccggattctgagctaaggaggtctcattgaaggtctggaagcacaggagtagtagaaatgaagcattttaaatagttagaaattcggcttcatccattggaaaattttgttcatttctaatgttttgacagtttcagccccacctgccacctcaatgatggagatgaagtggtctgtgactggtgtgccccgggctactcaggagcttggtgtgagaggtactctgcatccactggcttcaacacattttcgaaattaaatataaattctatgtgtttatttttaaatgcgtagttaagtgtggttttggagttttgatgcataattgttatttcatagaatcattgagaaaaatcagtatttcatgttttaaaattaatgttaaaccttactgggaatttttaaagaacggtactcttttcctggctaatctgagttctcatcaagaacaataggccgggtttggtggcccacacatgtaatgccaggactttgggaggctgaggcaggtggatcacctgaggttaggagttcgagaccagcctgaccaacgtggtaaaaccctgtctctacaaaaagaaaaaaaaaacaaaaggccgggcatgacggcgggtgcctgtaatcctagctacttgggaggctgaggcaggagaatcacttgaacctgggaggtggaggttgcagtgagtggagattgcgccattgcactccagcctaggagacagagtgagactctatctcaaaaaacaaaacaaaacaaaaacaataggaagcagcaaggagtcggtatctgtggttcacacatttgaatattccattgctccgggctgttctggagatgacaggtggtttgctttagtagccgtcttctggctcctgaaggccagtgctgtctttcctatgtgtgcgtctcagtgcccagctctggctgagcctgcaggaggctgtgcggcatccggagtggtcaggggtgggtcagagttggccctggaaacaggtgcatgtcccctggatttatgcctcattttggatgctctcccccttcaccgcgacaggtgaaggagatctgggaatgcccgagtggggagtcatatccctttcacagtaaatctcagggaacagagtccgtctgatttattagccattcagggagtccctggatagtgcggtaaggccttaagtaactgcatttgtctgatcccactttcaatctttgatacagatgtgcagatggttactatggaaacccaacagtgcctggcgaatcttgtgttccctgtgactgcagcggcaacgtggacccctcggaggctggtcactgtgactcagtcaccggggagtgcctgaagtgcctggggaacacagatggcgcccactgtgaaaggtgtgctgacgggttctatggggacgctgtgacagccaagaactgccgcggtgagtgcgtgagcgtgaagtcaggtcagctgtttattgccataggaagtcttcaaccgtatagtcacatgtgtcacacagggccccgcctaggaggtcacactctcttgaggggttacttgcattaatgctgggtctctgatcaaatacagacccacgacccagttcttccctagctaccctatcctgagcttggttagtcataacccataggggtcagtggcctggaaagatgcagcctgccacccgagcggccagtgtgacttgacagagttccggctctgctccccgtgactgaaatgaaagtggggaagctcagagcctgtcacattcgtaagggagatgcttcagaggctgcacgaggcagatgggattccaagatgaagggtgggaaatggtaagactgtaaccccagaaactgcgtaaagcaccgtgtggtgcatcttagccctctgtgccagaactgcccgacccctatggcactctgctgaattcgatccttgaaattatggatcgtggagaaaactagattctcctgcacagcagatgacctggccggagggatgattcagccctcagattttgaaggagtgaaagaacaaaagtggcaattataaattattttgagtatttcatataaacgccagtcatactatggtactacgacatggggacacaagagggcaccagctgtacagaaaacatactttcccaggcacacgtggagagattggaaatgttttatggccctgggccaatcaagctgatctccagcaggtggccaccttgactggctatcataccaggataattatgataacagcatttctacaaggcttcacgatttgtagaatgtttttatcattttcatgtcatttcttttcatcattactgcaagccttggtgattcattcctccgttcattcattgtttattaagtgtccggtatttcccagacactgtactaagaactgcgacaggtagttgggaaattgtgattcaagtctactgggaagctacacatgatgatggtatggggggaaaacatacctgtggatccaggtgttggagtctcgactaatgtgagttttattccaggaccaactgtgtgacattgggctaatttattagcctctctgagccactattttgttattcataaaatagacataattatatgtgtatatcaaggcctttctgagaagtcagtgcggtaacatttaaagttctagacatgaaataaatggcagctattataattactagtaataaaccaattattattatattttctaatatataatatatataatataatataatatattattatattatataatatatattatataatataatatattattatattttcactccactgctgtccaacagaaatacaatgtaaaccacccatgtaatttaaaattttttagtagtcacatttttcaatagtaaaaagaagtaggtgaaatgtattttaataatacattctatctgagctgatatattaaaaataagcattttgtcatgtgatcaggttttaaaagtattaagcaatatttactttcttttttagtactgagtcatcaaaattgagtgtatattttatagcccagctcaattaggatgctacattttcctcagaaatacttgatctacatgtagattacagaaaatttacaattgaaaaggtagttcaaacatatttaaaatttttccgtcctgtaccaaaaattattttctttaatattggcatccacattgacaaaaccgcttcagtatttaaatttaaactcagagatttggttcttcgcttgcatcagccacatctccagcatttggtagacatgtgtggttagcggccacaggacaggactgtgaaggtcaaggcgatgaatgactgtcgggggttgcacttgaaggcacggaggcgggcaggcccatcagcccagggtggcccgggctgcctcctgaagggggtgctgttcatctgagacctgaaggatgggaagaagagccccaagaagagtgaccagcgtgggaagacgggcccaggcaagtaggcaggccctgcccgaggtagacactggagagagagtgaccagaatggaaaagacagagacagggaggggaggtctcgggctgataggtgggaagcagccacgtcggaagggtctcctgtgcagtgttgaggtgctgaggtcacctcgtcctccctgtcctgggactcaccagcaacttgtgcagacatggagtgggccagggtgtgattggagctgtgtgtttgaatatcgccctgctgccagcgttgaggagggaatggctgccaggggtgttgggttaggagacaagacccgaaatgaatctttctggtaagcattgatgagggcttcaggtagggcctttgccatggagataaaagagaagacgtaaaataggtcttgatgacaggttggaaggtggaggaaggacggttagagcagctggggtttgggtctgggcctgggctagtagggctgatgctgaccaggctgtctctggtttctgaacacttaacagcttttatcctttctcatcccttctctcgcatcccctcgcttcgatgagacaaagtcctgtgaactgtttctgcatatcccacgagcagtccttccatttctataacagggttccctctgtggacttcttgtagggccccccattcttatataatactatagtctgttaggttaaaccaagtgcaagtgccggtgttgtgtgtgattgaccttctctaaagcaagcgcgtatagttcaacccagtatttatctgtttcccctcaccccccataactctcactcacttgaagcttggtaggaggagaaactgatcgtcaggttcacctcctgcctctgctgtggggcagcggctgcagccggaggtgtggacaggccgtccaggtagagtagagcactgagggagatgagggtggtgagaaacctcacagaactctaatattaaaggactcttatattaaataagttaaatgaggataatttttatattgtgagctactcctgagaattaaaatatatataaagtacctggctattcagtaattggcctaaaataacactattttaaattagtactatttataacataaatactattttaattaagaattactataataggccgggcatggtggttcacacctgtaatctcagcactttgggaggctgaggcaggtggatcacctaaggtcaggagttcgagaccagcctgcccaacatggcaaaaccccatctctactaaaaatacaaaaattagctgggcgtggtggtgagtgcctgtaatcctagctacttgggaggctgaggtgggaggatcacttgagcctgggaggcggaggtggcagtgaactgagattgcgccacggcactccagcctgggtgacggagtgagaccctgtctcaaaaaaaaaaaaaaaaaaaaaaaaagaattaccataataattattactgcagagagagaactagtaatagcagtgtgacctatggaaagttatctaatctttccaagttgtagatttcacaccgaaaatagagaacattatttcgcctccctccttggtttgtggtgaaagtacaaagaaatactgaatgtgacaggcacagactaacagacacatcatacagtgaatatgattttttaaattatcatcaatagtttacattgatcatacttgcattgaactttaaatattccccagagaaagaggcggcttgaaatgaaacacggaggggagacacacgagaaacaagagggagggcaggagagtgggcgtcccaaataccacaggaagagggcgatgcaaaagggagagggaggtcacggggtcccttccgcagagccacggggtaagagggggaccgaagtctgctccctgaatttggtgcctgggaaatctctggagactttagggagaacagttgcagcagacaaggggccaggaggacactatgcgaaacttggattggacggacgtgccagggaggtggatgttctgatggaggataaaagggagggggtgtcttgtgtttgatgggggcagtggagaaggatgtgctggggagttagcagcagagtccgcacggtccagctacggggttgatggagcaagtccctgaagggcaccggtgaatggggcctctcgtgggactgcagcattaaggcccccactccaggaaaacagacggccagcctggcctagatcatgaaggaggcggatcccagcacgtttcctctgcccctgaccttcccatgtcatgtcccatgtccagcactcttgctgcagcctccaggtcgtgtttaggccttccattatttgtgaagtttttctctcttttttcttacattgttatgtcatgacacacactgtacatgttctgagtccacacatttataaagagtgcctgggggcccggcgcggtggctcacgcctgtaatcccagcactttggaaggccgaggcgggcagatcacaaggtcaggagatcgagaccatcctggctaacacggtgaaaccctgtctctactaaaaatacaaaaaattagccaggcgtggtggcaggcgcctgtagtcccagctactcgggaggctgaggcaggagaatggcatgaacccgaaaggcggagcttgcagtgagctgagatcacgccactgcactccagcctgggtgacagagtgacactccgtctcaaaaaaaaaaaaaagagtacctggaatattttgtcaggcaacatattaaatgttcttttttttttttttttttttttgagatggagtttcacacttgtcgctcaggctagaatgcagtggtgtgatcttggctcactgcaacctccgcctcccaggttcacgagattctcctgcctcagcctcccaagtagctgggattacaggcacgtgccaccacgcctggctaatttttgtatttttagtagagatggggtttcaccacgttggccaggctggtcttgaacgcctgatctcaggtgatccgccttccttgtcctcccaaagtgctgggattacaggcatgagccactgcgcacagccaacatattaaatattctaactgaagtgcttattaagggttcccctgtgaatattgattaaatatattttggacccgtaagattgtatcactttgcaaaggtagggaactttgtagctttaagcatcaatgttgtaactgtagataaaatggaaccatctgacctgaaactacaaatgactcatgacttagaactgggatatcatatttaatgaaaagatatttttcattaaattatgaaatataatattaatatgtacttatttagattacgttttaactgagctttaaaatattgaatatgtacctgattggaatcagggcaaatggctaagttgattttgaaatctccattgcatgtttttcatgggaatttgtagctcatttaaaatatgtcgaggaagtcatgaaattggtgaagcgaattcgctaattattgtcttaatagcttcaatgtgtttttcctgtgatggatccttccactaaccctgtttcagtttactcttcagaaaaatgctaaacttctaaagttattgccaataatattatttttagttttgtgatttgaaacattgaaagtttacattttttttttcctttggggatgacggatcttatgataaccatcctcagaagtgagggttaatatgtctttgtgtgcatgtgtttagcctgtgaatgccatgtgaaaggctcccattctgccgtgtgccatcttgagaccgggctctgtgactgcaaaccaaacgtgactggacagcagtgtgaccagtgcttggtaagatgcatgtgactaattgacaccttagccttggtacagaggcgattgaatccatgactcagaaggagctaagtccccaagtgtattagtttgttctcacactgctatagagatactacccaagactggggaatttatcaacaaaggaggtttgattgactcacagtttcgcatggttggggaggcctcaggaaacttacaatcatggtggaaggggaagcaggcaccttctttacaaggcagcaggagagagtaactgtcaacacttataaaatcatcagatctcatgagaattcactatcaccagaacagcatggggagctgcccctatgatcaaatcacctctctcctttgacacatggggattacaattcgatttgagatttgggtggggacacagagtcaaaccatgtcataaagtgtggctgacaagtgccgtgcctgtctagagagtggatgtttgctataaagggatggggatggtgtcatgaatactttatgattctatgaaataccctgtgtgtgttctggaacatactaatatgaggagtcatttattaaaacgtatgttggtttccactttctccccctttggtgaaacagcatggctattatgggctggactcaggccatggctgccggccctgcaactgcagcgtggcaggctccgtgtcagatggctgcacggatgaaggccagtgtcactgtgtcccaggtgtggcagggaaaaggtgtgacaggtgtgcccatggcttctacgcctaccaggatggtagctgtacacgtaagccttgatttccttgtttgagactttgtagtcattcccagagctttccttgggccctccctctacttccaactaattttggttaagtgcctttactttttctcttctttccctggaggatttcataccttttttctggtttctggtccctatcagggtacaagcctaagttttggtcatggctctgccgcctactaattgtgggagcttagattcattacttaactttgcttggcctcagtttcctcatctgtaaaatggggatgctaatgagaatctgcattgagaagttagtgtaagtgttctatataaagtcctcagcatggcattgggcctgcagtaagtgcttagtaaatattggctccctctgtgatcacctagtgagggctttttcactcttttctctatttcccctgtcctgtccccatttccccgcttccctcagcatctcctgagatggagggccggctacctccatgagacatggaggggtcttgggaattgtgaggcgtcttttaggagtgagaagagtggcttggactcttaataaaagggaaataacagcatcagctcttagccctttaatgacatcacccagatctgtaacccagcattcatctttatttcagcctgtgactgcccacacactcagaatacctgcgacccagaaactggagagtgtgtctgcccccctcacacacagggtgtgaagtgtgaagaatgtgaggatgggcactggggctacgatgcggaggtggggtgccaggtgagcactgtcatccacgctcttgcttaactgagagttgctttgctgtagcaagtttcaggcctgttcttctatatattttctggactttaatctgttgaatagctttgtgaatttaaaaaaaaaaaaaaaactcaatgtgggccaggcacagtggctcacacctgtaatcactgcactttgggagactgaggcaggaggatcgtttgaagccaggaattcaagaccagcctgggcaacaaagcaagaccctgtctttgcaaaaaataacgattaaaaaaaaatttagcctggtgtggtggcacacgcctgtggtctcagctacttgggagactgaggcaggaggatcacttgagcctagggattcaaggctgtagtgagctgtgatggcaacactgcacttcagcctgaacaacagagaaagactctatcttaaaaatcaaaaacaaaaacaatacaccttaatgcagatgataggaatcaaagtggaagacaggacacccttaagacaccttattctaggttttcttcaagaacctagttgttgcattgatggttagaaaatccaaaaaatggctgggtgcggtggctcacgcctgtcatcccagcactttgggagaccgaggtgggcagatcacaaggtcaggagattgagaccatcctggctaacacggtgaaaccccgtctctactaaaaatacaaaaaaaattagctgggcgtggtgatgggcgcctgtagtcccagctactcaggaggctgaggcaggagaacgacgtgaacccgggaggcggagcttgcagtgagccgatatcgggccactgcattccagcctgggcaacagagcaagactctgtctcagaaaaaaaagaaaagaaaagaaaatccaaaaaatatttgagtgtcctttaataaatattgtgcaatgtatactatcttccaagagaaagtaataaatcactttattgggggtttatgtccaaaccatgaggcctccagttttctatgtagccttcttcagttaaatttgggtatagtttgtgttttggaaacaagaggaaattactttttttttttttttaattgagacaggatcttactctgtcacccaggctggagtgcagtgacaccatcaaagctcactgtatcctcaaagctcactgtatccttgacctcttgggctcaagcaatcctcccgcttcaggcccccaagtggctgggactacaggcatgtgctatcacgcccagctaattttttgattatttgtagagacgggggtctcactatgttgtccaggctggtctcaaactcctgggctcaagtgatcttcccacctctgtatcccaaagtgccataattgcaggcgtgaaccactgtgcctggcctgatttctacagtaatttcgttagacttgttttgacctagtagatttaatttcagttcacaattctggccccgtgcgcatgtgccactaagatgcacagatttccggcaacacaatgcctgtctcctgttggcacatggcaacgtgaatccatgcagcaatagcaagagagagatggttcatttgtagaacttccccacatgtagtgttttcctgtaattcaaatatgtgtgcatttggaagcatcaaatctgcctttttaattgagttggttttcccttctctcaggcctgcaattgcagtctcgtggggtcgactcatcatcggtgcgatgtggtcaccggccattgccagtgcaagtcaaaatttggtggccgggcctgcgatcagtgttccttgggttacagagactttcccgactgtgttccctgtgactgtgacctgagggggacgtcgggggacgcctgcaacctggagcagggtctctgcggctgtgtggaggaaaccggggcctgcccttgcaaggtatttaccatccatcctcctctttcatcctgtctctggctcctcatcatgactcctgggctttgactacttacctaagcagccaggttttggatgcttttcctagtgagttcacactcccttccgcatctgagttcaaagtctcttatgctcctctagagtgacggatgatttttgaaattgaatttttactgttactagtgtcagttgatggaactgatttgaaaactgccctgaagttttaatcatatatcccagaggctgagtggctgcgtatcttgagtatgcaggtgaggtgggtttctcagggcttcgggatttgtgatgtgatccctgtgaggttattgggctcccgtatgtgctggccacattgaaggaaatcggggtttattattttcccaagaggtaagacttcaatgtcattataagttttgtgtgtttccgttagttttcccaatgtgctttgctattaggaggtcagagccacctcctctggtccttttcccatgggtggtgagatgggagccctctggcttgatgatggtaatgagctgatgggtgactggagataggaaggaaaactcatgtacatatcatggcctgggagtaatggaagcatcagtctccccgttttcggccttatttatttatttagagacagagtcttgctctgtctctcaggctggagtgcagtggcacaatctcggctcactgcaacctccgcctcccgggttcaagcaattctcctgcctcagcctcccgagtagctgggactagaggtgcccaccaccacgcctggctaaatttttgtatttttggtagagacggggtttcaccatattggccaggctggtctcgaactcctgacctcaggtgatccctctgcctcaacctcccaaagtgctgggattacaggtgtgaaccaccgtgcccagactctgccacatcttatgataacagctgtgatgatagacgagtagagcagcaggccttgtcttaataatcacctgggccaagcacggtggctcatacctgtaatcccagcactttggaaggctgaggtgggtgaatcacttgaggtcaggagttcgagaccagcctggccaacatggcgaaaccccatctctactaaaaatacaaaattagctgggcatggtggcaggcgcctgtagtcccagctactcgggaggctgaggcaggagaatcgcttgaacccggggggtggaggttgcagtgagccaagattgtgccactgcactccagcctgggtgacagagcgagactctgtcttaaataataataataataataataatataataataataataataatatttatcacctggccggtggctctcacacccagggatcatcagaatcacctggagactcgaggcggcttccagagttgtctcgggacattctcatcagggactctgtattttccaaacacttccaagatgattctgttaatcatctgtgtttgagaatcactgattggatctttgagaaaactgacactcagaaagctccgggcctggctagaggaaactaatgtttgtgcatctataattatgtttaaaattatgtttgtgctctattttgtctctgtttgttcagaaatcacatctcttttttaggcaaaaacgagtcctttatttgctcccctgtaggaaaatgtctttggtcctcagtgcaacgaatgtcgagagggcaccttcgctctccgcgcagacaaccccctgggctgcagcccgtgcttctgctccgggctgtcccacctctgctcagagctggaggactacgtgaggaccccagtaagtcacacacagcgaaagtgttctgcttctaaccccactcccctgggaggtgggtgggggtgggaaacacagccaagtgttcacattaaattttgctcttatggcatccaaaattctaggaagctaatttgggttagaacaggaatcagagctcagcttctgctggccgaggaagtaaatggagcttgaactaaaggctgtccatgttgttccttagctaatctatgaaaagctttcattggagagaagatagaactgcaaaatctcagccgtcttctgcatatcattgaacgtttccccagcgtagcaacagtttggccctaaatggcagtagtttaaagcactttcagttcattttcttccagatgtttagtttaaaggaaaagtctttactgtttctgttttaataatgaagctgtttcatctgtgaaacaatgatggaatctaaagaatgaaactggagtggaaagttcgcattttgaagtgcactttcccctcctttcgtggtttaggtaacgctgggctccgatcagcctcttctgcgtgtggtttctcagagtaacttgaggggcacgaccgagggggtttactaccaggcccccgacttcctgctggatgccgccaccgtccggcagcacatccgtgcagagccgttttactggcggctgccgcagcagttccaaggagaccaggtgaggtgcacgcccagccgagagccagtcggtgcttcctaggatatacagaaattgtttaaaatcaccatagtctgggccggcctgtcatttaaagaagtagttattaatttcctcttttaagtgggatcagagaagtttaatgctcataaaagtctcctcaaatatatggttccttaaaatttttcattaattttaaaagttttttaagttcacgttatattaatttggttcttcctaaagcagtcattcaacagacatatacagtcatgtgtcacttaacaatggagagacattctaggggaatgtgtcattaggtgcgaaagttattattataatctcatgagaccatggtcgtatatgtggtttgtcattgactgaaatatcattacgtggtatgggacccactgtgtttactgatatgctcttggtacaaacctaggtgctatggcctgggagtcccttttcaagaaattatcactcatttggggggaaaaaactactataaaagatcatgaaaggcatcacttggatttttgtttatataaacattggagtctgtgtgtgaattcaccctgatctttacaatttgcaaatatgcacccagtgctcctggagatagagaaatttttaatctaaaggagcttgaaaataatttgcatcactaccacattgatttgttattttggagctcacttttgtttgttttctcgaaaggaactatataacttaggtcaacttaataatccataattaaatggaattagaaggaagcaaattccagacaacaaatttcacccatgtgatgtatttttaagatacaagatttctctcttatggtggcagtcttgcaataaaatgtttttgaatgaaagctttgtcagagaagtaaacaacactttattatttgatagctcatggcctatggtggcaaactgaagtacagcgtggccttctattctttggatggcgtcggcacctccaattttgagcctcaagttctcatcaaaggtggtcggatcagaaagcaagtcatttacatggatgcaccagccccagagaatggagtgagacaggaacaagaagtagcaatgagagaggtgataatgggatcttttcatagaagttccttaaagacattgactttgctatggatgtagtgaaagatgaaagccattaataagagaatgagcagccaggtacggtggctcacacctgtaatcccaccactttgagaagccgaggtgggtggatcacctgaggtcaggagtttgagaccagcctgtccaacatgatgaatccccgtctctactaaaaatataaaaattagccaggcatggtggcacacacctgtagtcccagctacttgggaggctgaggcaggagaatctcttgaacccaggaggcggaggttgcagtgagccgagattgtgccactgtactccagcttgtgcgacagagagaccgagcaagaagaccctgggatcaaaattccagtgagattagcaagatctccaaaaacagtttgaatttcaaattctcaagaaatgtatattagttttatgtcaatttagtgggcactgcatcttaaattctttatcttggcgtactattttcaacctgcatagagatagtggtacaggagactttggacttgctcagatttgggaagtgtttattcttccagcagatgtttactggatgtttgctgtgtggctggcactgccttaggtaatgcatatctattgataatggaactgacactgcgcctgtccatggaggtttcaggaggtctttgtcagttacactcagtggcatgcacagaacatggctcatttctggagaaatttataaaagaatttattctttataagttttatgcctgtcagaatttggcctctgagcttaattgaatgtgtttctcattctacagaatttttggaaatattttaactctgtttctgaaaaacctgtcacgcgagaggattttatgtctgtcctcagcgatattgagtacatcctcatcaaggcatcgtatggtcaaggattacagcagagcaggtacttggagcttctagaattttgaccgttattttcatatttgaaagcaaactgaaagaatttgactcacttcacttccattacctactatttttattaatccatgtagttcagttccttaccaaaacattgttaaatattaatatcattatggaatgtgcgaattataacttaaagtatccacctagcatgctaatgtcgatataaaatataaggacataatgttggaatcttagctgaagataaaatgcaaaaaaaacaattgctgtttctgcacatgaaaactgaaatgcccatgtcttcgtagtgatgtataaagaatgctgtcacctactcatctcatactttagcccaaaaagaaagccattaggtcttggccaaatcagcacttcaagaggtcttttaggtgtacttgtgtcacattatttttaaattctaaaatgtctaaagtgtgtcatgacagttagtaatgtgctttaacacacttcacttacaatcacaagcaggaactactccaaacagggaagaaagctctggtttcatatatatgcaagtgttaggtcatgtgctatgtttctagaaagtttttcaaatgttagcgtttcctctcttaacatgatggctgcacagaatctcagacatttcaatggaggttggcagaaaggctgaaaagctgcacccagaagaagaggttgcatctcttttagagaattgtgtctgtcctcctggcactgtgggattctcatgtcaggtacggagactctagtcgaaatctatttcctgggtttgagttgaaatgtgcttgttacagcaactcccagagatgaacagaacttatgtgtatctactatatcatttttttctctttttgaattaaaaagaaattaattttggtaaaatgtacataacaaaatcttccatcttaaccattcttcagggtacagtttagttgtgttaagtacagtcacgttgttgtacaactgtcaccactatcatcctcagaactttttatcatccgaaacgcaaactctgcactcattaaacactagctccccatttcctctctccccagtgccccaaaaccaccattctccttttggtctctatgtatttgaccactctatggccctcttatatgatatatatatatgcatggcacatgcctgtaatcccagctactcaggaggctgaggcaggagaatcacttgaacctgggaggtgaaggctgcagtgagccgagatcgtgccattgcactccagcctgagtgacagagagatactccgtctcaaaaataaataaataaataaataaataaataaataaaagtggagtaatacagaacttgtctttttgcgaatggcttgtttcacttagcataatgtcctcaaggctcatccatgttgtagcatgtgtcagaatttccctcctttttaaggctgaataatattccattgtacatacatgccacattttgcttattcgttaatctgtcagtgaataaacttgggtggcttccccatcttggctattgtgaataatgccgctatgaacataggggttcaaatatctctttgagattctgcttccagttcttttggttgtgtacccaaaagtggacttgcagaatcatatggtacttgtattttccatctttggagggatggaaatggtatagctactggtttttcctgtgccattttccattctcaccagcagtatacaaggtccagtttctcaccaatacttgttagttttttttttttttttgatagttgataccctaacaggtgtgcggtggcatcaccttgtgttttttcatttgcatttctctgatagagatgtcgaacttcttttcacatacctgttggccatttgtatgtctcctttggagaagtgtctattcaagtccttcactcactcattaatcagacttttttgtcctcccttttgcaccccctcaggactgcgcccctgggtaccacagagggaagctcccagcagggagtgacaggggaccacgccctctggttgctccttgtgttccctgcagttgcaacaaccacagtgacacctgtgaccccaacaccgggaagtgtctggtatgctggtttgtgggggtgcttgcctgagtttagaagtaaagtggacgctgagtgtcagatttccggtctaagtcatagccgtgccttggtttagtgagaggttaaatttagctaaatataaaatataaacctatttccttgaggacggcatagcttagtggttctgaccttatcagtggaaattcttttataaattttcctttcttgatgaatttatctgtgggcatcaatttgggaattatagtcgtgcaccaaataatgacattttcatcaacaacagatcacatataggacagtggtctgataagactataatactgtgtttttactgtaccttttctatgttagttatagttagatgcacaaatatttcctgttgtgttgcaactgcctacagtattcagtacggtaacatgctggacaggtttgtggcccaggagcaataggctctaccatatggcctaggcgtgtagtaggctgtgccatctaggtttgtataagtgcactctatgacgttcacaccgtgacgaaatcagctagggatgcatttctcaggcagtatccccatctttaagtgatggatgactgtagttgcatgccttgtttttaattgcagtactggttgccgtagtcaaaatagatgagaactgtatacgatgaagtttgggggctcacgtgggaattttaaaataagttaatgccagtgttgaaaatgtatttctctgtgtaaagtattgccctctccttgcattttttaaaaaaatgcatattctctaggggatgataacagcacattattcacatgttagtgtgtgtttgcttctcagccaccttctcctaggccaagattggtctcggggacacatggagagctctgaccactgtaaacgactaagcggcccagacagaagcctcgcagccctgaccgaggacaaattcctgtgtccatgatttagcttaagccaatgaggcagataacaaaataatgtgatattcgtttcctactcctgaagcctcatgctttacagtcactcaggtggaaacattgattactaattgttccaagattaactcgccttgggtaaaataatgcattgaagggaaatgagctgcccaccaaggacacacccgaagcctcggagatcctgggtgtggcccaatcacaaggaaacactggagccaaaacagaggaattaggactgcaggctcccaacctgcctcccgccacattttgattctggttttccctctttttgacaattcctgtcactgaaacccattataaacaaaaaatggtgtctgggcttggaggatgggatttcagggttgcagtggtccttctattcttgtcagagtcccttcacatttttttattattattatttttttcaagatggaggcttgctctgtcacccaggctggagtacaatggcgcagtcagctcactgcaacatctgcctcttggcttcaagcaattctcctgctcagcctcctgagtagctgagattacaggcgcctgccaccacacccagctaatttttgtatttttagtagaggcagggtttcaccatgttggccaggctggtttcgaactcctgacctccaatgatccacctgccttggcctcccaaggtgctgggattacaggcatgagccatcacgcccggctgtcccttcagatattaagtctgaactatagcagccatgccaggcagtaatttagtgtacattttacacacctgcaacaatggggagctcactcccaaaacagctctgctcatctttgggcagctctgattctttctaagccagtgcccctgaccatgcatctgttggtgcagttttattctttggagctgttgagataaaccatgagttcagattattcatgaaaagtgatgggatcttaacagataccttgtgaaactacttgatcaaatccctctttcccatgtccaaaggccctgaatcttcagccctccaagtcacgtaccctcacatgcctggaggccagatggagtggtcgtgggtccgttcaccagcctgtggtgtgcatgtcactgtctgtcttcggtatcctgccctgagcctaacgcctttgctcccagagtcagtgggagcttccctccttaactcgaggtgctgtgtctccatggcccagcctggacagggtagtcatacctgccctgtcactgctgcctcacggcattgactagacacaagacccttgaactcttcccatcaatatagcgcctcagtcccttcttccttgctctttgagctcaggaccttcccttccatcctcagtttttcaaatccttttgtggtttagtgcagttcatttcccttcaacataatctcctaagcactccccctgtgcttattgtacaggtagatatgaagacctttttggatctgattttgtcattagtatataggatgttcaggtcactgagcatttggtgttatcataaaaatgattggggccgggcgcagtggctcacgcctgtaataccaacactttgggaggccaaggtgggcggatcacctggggctgggagtttgagaccagcctgaccaacatggagaaaccccatctctactaaaaatacaaaattagccaggcgtggtggctcatgcatgtaatcccagctgctcgggaggctggggcagaagaatcacttgaacccaggaggcagaggttgcggtgagctgagatcgccccattacactccagcctgggcaacaggagcgaaactccacctcaaaaaaaaaagtgattgattggaagtatgccttggaaggggctggggagactgaggacaagggcggtagcctgggagctcctcgtcctggttacccactccctaccaccgccttctgggagatacgactgaacctttttacatcagtgaaatattggcaggcattctctgtgaatttcccatagcaactaattcagcccacactttggttctcattagggggtccttgtttccctgccactcttggggcagcttgtctttgcttctctagggagcccacagtctgtcgtaagtcagagggagttggtgttagccatggaaaacctgaaaatcttcaattctctctcatcatctaatatttattccttgtcaggtttaggccatgccattaacacttttacttttcaagagagagattacaaattttacttctacagagagatgagtttgagaggtcaggtagatcccagtaaaatttatcctcatcagggaaaaaaataggaatagaactttaaaatgaaaaatactagaattttaaaaacatttaaatgaacttaaaatagtcctttttaacatgtaacaagatgtctttctgtatcacctctcactgccaaggataaaagtgtgagtcagcctgggagtttgctcaggtgttcctcactgatcctggaaacctattcagctgcatcagacatggaatcttgtgcccagtggctgagtaaatagagatgaattgagcaaatgccaatttcaaattggaatcagatggcaagaactgcttgttcttttagctttaaaaatgtgtacctttttggccgggcacggtggctcacgcctgtaatcccagcactttgggaggccgaggcgggcagatcacaaggtcaggagatcgagaccatcctggctaacacagtgaaatcctgtctctactaaaaataaaaataaaaataaaattagccggttgtggtggtgggcacctgtagtcccggctactcgggaggctgaggcaggagaatggcgtgaacccgggaggtggagctcacagtgagccgagataatgcctctgcactctggcctgggtgacagagcgagactctgtctcaaaaaaaaaaaaacaaccaaaataagtgtaccttttttaatagcaagaccgtaggtccaaaggatgatataaaatttaactggaaatgccacatggggtggctcgtgcatgtcgtcccagctacttaggaggccaaggcaggaggatcacctgaggccaggagtttgagaccagcctgggcaacatagcaagaccccctacctgtacaaaaaagttaaaagttagacaaacatggtggcgtgtgcctctggtcccagctactcgagaggctgaggcaggagaatcacttgagcctgggaggtcaaagctacagtgagctatgattgcaccactgcactctagcctgggcaacacagggagacctcgtccttaaaaaaaaaaaagaaagaaaaaaattaactggaagttagttgttggttgcagtaatctatcagtggtgctctaaaaccatgagttttcttccctcattgtctatttcctaaatcatctatccattcttcaactccttacatgtggttgttgaaccctgactgtgtgcaaaactggtgcttcaaattgttttttggggcactaaatattttaaatctgtgttttaaggttctgcaaactgcttttagggctcctatgtctattttccttaagaagaatgtactagtaatttcttggctgtagtggatgaatgcagccttaggatgaatgaaagccacagagcgggaaatgttttcaggattttaagaatatggaggaaaatgctcccctttcctgaagaatatttttaaaagctagctgatataaaacgtggcagtgcttagctattaccagataagaatgatttctaacaatttcccattttttcccccttcctttaaatgtgggctcccagaactgtggcgataacacagcaggtgaccattgtgatgtgtgtacttctggctactacgggaaggtgactggctcagcaagtgactgtgctctgtgtgcctgtcctcacagccctcctgccaggtgagtccccacaggggcagctggcatgctgggctgcccagggctgcttccagttcagcctcattttcaagggtctctgagtggtctgttgttaatgaatattctccattggttgcaaaaggctaattttaagaaaaggtgttcattctcaaaagcattggaagagaatcttttcaaaagcaaagtatctgttttggtattggatgtttggatggaagcaattaaagaaaggacttttaggttttgttttttaagactcattttagcccacagcatatgtatccaatctgcatggagataaattgctattaattttattgataatgatacaaaagaacccaattaccatttaagggaatggggttagagtttatataagggaatggggttagagtttatataagctggtgcctaagtgctgaaataccacatggtgataaaattgggactagtttctaccttgtacttatgatgcttgtacagaattacctgaatgcaaaagggaaccagaaattttaagtgggaattagaatatcaaagaatcctctttggatcaaatgaaaattataactcatcaataatattttattattgcttagaatatttggcaaggtattgaacatacaaagatcaaatgttaactcttggtatactgcaatgaagtattccttttaatatttgtctgaatcttctgttttttattgcctccaagtaaatgatgcctgatggtgagtaccaaatgagaggcactatgtacacttcccttgcaagctatgaagcatcctaaaatttgttgttactagtgcttattttttatattaaatgtatatatataaattttgacttgtcaattccacttctgtagtctgtgctatagaaatacttgcatgtgtgtgtaaagatggatgtgtttttgcattgctttttactcatgaggaatagggggaaaacggaaatatctacttacggggaattgattatatacattgtgttacattcctagagtgaaatattttacaaacacggagaaaagaataaggtatatctgtaggcacagaattggagaaatggccaattgaagtatgtaattgaatatggagtgtgatgccattttggaaaaaattcatatccacgtctattcatacccatattataggtggctatatatgtgcccagagaagtattgggaaggacattctaccctactactttgcacgtttctgtgctgtttgaatattttacttctgcaatcataaaaaggttataaacatccccaaagtccgcattaataaattaaagtttgtgctatcaggaagagattgtcaggttgtgaacattcttgtgtgctctgaatctcagatgccctaaaacacacgctttattttctacatattttgtttccactgaagtctatccctttactattttaaggaggaaaaagagtcggaagtggtatggggctgataactgacgctggaaacttcatcttgctaacgaaaaggaaccagacttggctctaactggttttgttttttattgttgtctccagtagtttgcatgcacccagctcagcctctagatggcacattggtaatttaaaacgtgaaggcagagggtagaggatgttgagaaaaaggagtaaaacaaaagcagaaatccatgaatgaggagatcaaatcccagtcgatgattaaactttgagaggctctgtcattttgcttatggcagcctaccacataactccctgcctgcctttaggtgcatccgttctccagttctgccttatttccttgcctttgcctccctggctttccttcctcgcctttcgttacagtcaataaagttcttttcgtcagcgtgtgttcagccatcttccctctgctgtttttcatgcttgctcatagttgtttcagctctcttaccaccttatcacttagtaagcaaagaccctttttccttgggacactctcttgttgggtggccaattagtgataatccctaaggtcagtcttcttccacttaacattcacatgattgtccctggacagggtcttatgaatgtcttttggatacaagatgtgtgtgcacttactgattacttttattttccttctttttgccaggtagattgtaagctctaaaaagctatgtgtaatcacataactttgagaccagtatggtgtatcctaagagtaatgaataagtaccttaaggaaagatggaaattgtatatctgaaaattcaaaaagaaattcttttcctccagttttagtcccacttgtgtcttggaaggggaccacgatttccgttgtgacgcctgtctcctgggctatgaaggaaaacactgtgaaaggtacatgggtggattgtcatgtggaaatccctgggcactctgtttcttttataaggtattgggcatatttactatagtaatctgggagccattatcaattatcagtttggatgtgcttgattgaaataagacctcattactgttccagaacaagttttcccaaggtgaatggatctgtgctttgcatttcatttggcggaaatgattactgtcgcaagttagaagctggtattgaccatcctgtctgcacctatgtcccttcctttctgtaggtgctcctcaagctattatgggaaccctcaaacaccaggtggcagttgccagaagtgtgactgcaacccgcacggctctgtccacggtgactgtgaccgcacatctgggcagtgcgtttgcaggctgggggcctcggggctccggtgcgatgagtgtgaaccgaggcacattctgatggaaacagattgtgtttgtgagtatttctcctctaaatgtgtaaagatggtttttcctcccaaatgtgtcgggaaagaagtggtgacggcacgctaaagtgtctgcagaataaaaacatcctattttattttcattttcttattttctaagcatagatcactgttgcatctgctgaactgaacctttcatcatgtgttttccagctgaggcaggaggttctaagatagcagtttattcctctggcactcagagcagcacagtgatttcaactttctcctttagtggcattaatatttcctttagtggagccaggagtgatttagtgcaggagaggaaacagctttgtggggttgtcatttgtgttaccccaatttcatgatagcttccactcgtgactatcatggacttaaaaaaaaaacaaaaacaaaaaaatggagtcttgctctgtcccccaggctggagtgcagtagcacaatctcggcttattgcaacctccgcctcctggactcaagtgattcctctgcctcagcctcccgagtagctgggatcacaggtgtccaccaccttgcctggctaatttttgtatttttagtagagacagggtttcaccatgttggccaggctggtcttgaactcctgacctcaggcaatccgcctgccttggcctcccaaaattctgggattacaggcatgaaccaccatgcccggcctgtcgtgggcttttgtaaactttttttccagttctgatttattctaccagcaagtgcatgagatagtcagcttgggatgtcttctcaggggttaatggggaagatagggaggcctgttaggaccatggcattggaggtcttttttgctttgacttttgtgtgggttataagcacaaacacccccactattctctccagtgtccttcacttgtacttgtgaaagatgcatttgcaaactgcctgaggaggtgacagagcaggctgtggaagggaatgctgggattcagtgcagtgggtcctagttaaagatgagccaggcagcataaagatgggggcagaagaatgaaatgtgtgccataactccctgcctgtctttaggtgcatccgttctccagttctgccttacttccttgcctttgcttccctggcttgccttcctcgcctttcattacagtcaataaagttcttttcgtcagcgtgtgttcacccctcttccccctgctgtttttcatgcttgctcatagttgtttcaactctcttaccaccttatcacttagtaagcaaagacccttttgcttactgggcgccactcttggcctcagctgtttctttctgtgtgacctctgggaagttacttatctgatctgagtcttggcgtcatcattgaataggggcctagcacttcctgccgtgccacccatggcacagttggagtgagaatgagatcagatgtggtgcacggggtcttggagtgtactctgaccgcatgtgtcattttcacaaaacaacttgcgcaactccatgaaaaaatgggcagaccacatcgcattaactttaactctcctttttaaaaatttgtcttgtagcctgtgatgatgagtgtgtaggtgtgctgctgaatgacttggatgagattggtgatgccgttctttctctgaacctcactggcattatccctgtcccatatggaattttgtcaaacctggaaaatacaactaaatatctccaggtaggtactggaaatacagagatgaacagacacttgtatcattaagggatatagtcattgggaatggtgggagtcattccatgtgtcctccccacattgtgagagcccaacttccatcagcccctgcgggcaggtgtccagtctttccttgactgtgaccagtgacaggcacttacttacttatctcacacgctagcttgtttcacggtgggacagctctcatcatttcagtgctctctggaggactcctcatcaatgctgccctctgtggccctcattctgccttttgggataaggccaagtccacttgctcttctgtaagacaactttgggtatttgcaaacagctgccctattagaaaagcagaaaataggccaggcacggtggctcacacctgtaatcccagcatcccagcactttggggggccaaggcgggtggatcacgaggtcaagagatcgagaccatcctggccaacgtggtgaaaccccatctctaccaaaaatacaaaaattagctggatgtggtggcgcgtgcctgtagtcccagctacctgggaggctgaggcaggagaattgcttgaacctgggaggtggaggttgcagtgagccgagatcacaccactgcactccagcctggcgacagagcaagactccatctcagaaaaagaaaaagaaaaagaaaaagagaagaaaagcagaaaataaatctgaacagtatcttctttaaggtatattatttttaaagtgtattattcttcactgcactaaagttgcagggcacaaaatctctcctccctggaaggctacattaaatgtctggcagtaaatcatagttttatgttttcatcaacagagcctgggtcaaaaaagggtgaggagttaagaaattaacttagtagacagcatcctactatagcacttatttatttttattatcttatttatttattttattatttttttgagacagggtctccctcagtcacccaggttggcatgcagtggcgcagtcatggcccactgcagccttaacctccatagctcaagggatcctcctgccttagcctcccaagtagctgagactacaggcacacaccaccatgcctggctagttcttttatttttatttttaatagagatgagctctcactatgttgtgcaggctggtcttgaactcctaagctcaagagaacctcccaccttgacctctcaaatttctgggattataggcatgagctaccacgcccgacctacttttaattctaattggaaaacagtgtgattcttaaattttgctttatatatgcgttagaatttgacataatctatgcagtgcaccaggtagcaataaaagggatggccattcctaaatgccttttcttagataagagttttcctcaaacttaggacttccttaggtgtgtgcgtgtgtttatgtgtgcgctgggatggggctggttcttgaatccgtcttgatttgcagtggtcttttctctataatggtagttcagaaaggttagggacctctaagagatgtttttatgttatactttcctcaaacgtcacaaagtgtttttgaaaaatgagagcttttacctctataaaaaaaagaatatttaacttttttttccaatcactatatacacgatcagtataatatctgccagtcttggtcccagggatataactattttatatatatcaaataagacaaatatttgatttaaattttaactcattttgaatgatttgctctaaataaaccacttgtccgttttctttaaataactttttgtgtttatgtaaagtattcatcaagttttaaggttgaaataaaattatacaagaaattagaaggctgttggcataaattaagcactttatttttctttatttttagtatttataaagtctttctttattgaattcttttgtagtttagcctaaaaggcatttttttcttaggtgttgcaattatagttaaatttgtgtgactctgctattgagataaagccagacttttatctgagaattgcagcagtatcagattctgctgaacacaacagattttaaatttatatctatatcagaaatataatgcaaaggatggcagtgtagaatcatgtcgctataatcgaaacctaagtaaatgtgatccatttttttttaaaatgacagttccaaggaaagaagaatttctttctgtgaacaaaaaagaaatgcaagtgcttcttagttaagaatcagaacattttacttcgaagcattgtaatttgtttcctccattcttcctaggaatctttattaaaagaaaatatgcaaaaggacctgggaaaaattaagcttgaaggtgttgcagaagaaacggacaacctgcaaaagaaggtaaattctttccataaccaaccaaccttcctcctggtccctcccatcagccctcctgagcagttgccttggggctgtctggaaggttctgattagatcatgccagcctcttcctcccacgagctgtgctccaggtacttaatcatcaaattggttttgaccctgccagtttctgtggtttagtgggaaaaggctcccgacttaatgtctgttgtcatctctgctgaggacagagttgggcagtctcttggctctgactttcattttctcctctgaaacaaaggtggggcggggatgaaaagattgctgaggtttcttccttctcctaaattcattcagtaacgaagtacacggtgagcccaaaagcacggactgaacatcagtaatgctctctgcagcttgctgggtggagcagggagggcacagacctcatgatgaggcatctgtgcaaacttcaggcttcaggctggggtggttctgattttagggccctgaatggcaagtgagcttgtttttctgtcatcagggaattatttattctgtttagcctgtgccagaggaatggcatttagtgacctaaaaaagaatctccccttctgcagatggtgaggaaggattattgtcaaatttactgttttttcatttatgaattttgtatgtgtgtgtgtgtgtgtgtgtgtgtgtctgtactgtgatggtgtatctatacatatggatgtctaatctccatcaacacatgcacacatacacaaacatcaccctaggaagtatagtttggctcctgttaatttagaattaacgatgttttggaaagagttgaagggtttaagtttgggtttaagtacctcatcaagcaaacatttggttggaaataggctgattaaaataaattctctgtatccgttattctctttggtcttgactagaaaacaccaaactcagactgggttactctacattcttggaaattacaaacaacctttcctttaacaaagagtaaaaatcccagtagaaataacagctgaggacagctaagtgtcagcctctgggctgctgacttcctggctctcgtcttgtgtagttctcgtagcagccctgggaggtaagcgttgctgtttcccaagtgttacagacaatgcttggagatgtctgggcctgtccacagcctggagaatcaggtctaaaatcagcttgcctgactccgtgttcttaactcctagagactaacatctcataggccatacaaatcagtaaggtttactttctatattctgtatatttgggttttaaagtgaatcgagggccctcacagtatagccactaggagaatctgtagtttaatacacaattagcctgcttttaaaaacatacccatcttttcttatgctgagtgagttgtaaattatttcattaactacttagtccatttctaaccccaaaatattaagctcggcttgcatgataatgctcatctttactctatattctggaatatatgttgttgcttataagcggcaacagtggaatattacaacttgcgtattatttaaagtcaaactaattacttaaagtcaaactaacctgagactttatttttccaccagctcactaggatgttagcgagtacccaaaaggtgaatagggcaactgagagaatcttcaaggagagtcaagacctggccatagccattgagaggctgcagatgagcatcacaggtagtgtgggcagtgtctagtttgaagtatctgtgcttatctagtaagaagtcaccattgctttattaaacatatgaatagatgtatatctcttgcatcgggtttccggaaccagaggggctggaatagtttggggatcctgagatgtgcaaactttagtctttgactgagagttttagctttaaaaaaatgcatatttctttttttattttctgcattatgcctaaaacttagatcctaattctcaagccctgttatggtaaagttagtatggtagctctccatccatttgcccagaataggagctgacaggatttgggacttcagttaggtaccaagtatatccatcacattagaataatttaatcacttctcagttgggtgtgctgtggcttttagcatactattttcagttttctggctaccagaaacatatgatcgctcttctttttatattatagtgtaagggcttaaaaagtacagaatccaataaaaatcagactttatagggcaaaaggtaaggaaattattagaacaaagtatacttaataaaaaaagtaggatcaagcattggtggtttatttatgcagtaaatatttattgagaacatttatttttcatgtgcagatgtctctgccaggtacaaggaaatgctgaggttgacaccatgtccttgcctttagggagtttattggtgcatgagaagactttgaaatagaccagtaatcccaagttcatgaatgtttagttaggggatgtgcagagtacactgggatatgccaggtggcctggcctgacatggaggtccaactcagcttaggtaaacagagcagtcctcagcagagaagtttctaagttcttcacttggtactagccacttttgagaggcttattaaataattgatgaattttctccatagaaattatggaaaagacaactttaaatcagactttggatgaagatttcctactacccaattctactcttcagaacatgcaacagaatggtacatctttgctagaaatcatgcagataagagacttcacacagttgcaccaaaatgccacccttgaactcaagtaagtttctaattactgtgtgcaatgcaaccaagtagagagagaaacttgcacgctatctccaaaggagaaggaggcatcgtggaagaaaagtgctcactggaaatgaaatatcctaagagaggagaaggggccctgtggtcaagtaaatgaagagatgggtactgacccctccaaatatagaaaggtgtaatctgtgcagtcagtgtaatctatctttgtgctatcatgcggtagcttctgtccttttctgtgattccgggatgtttccacttagcacaaacagcatagcctcatggtactgtagatcaaggataaggcagtaaactctcatagaaaaaaatcgttggtggccacccataccatgaactctaagacaggtcaatgttatgccagaataattgagcttagttatataaaaaagtatagttacattgaaacccacgatgtgaagtgacacagagatcacaaagcattcttacatacagtcacaaggagtttggagtttcctttccagcttttatcttagcatttccacacaggtattacttgatatactagcacaggctgtctctctgcaggttgtaatgaatgtctgaagtgctgttataaatagttacatgatactttattaaaactctactctggacgttactatctaaactataatctaatgaaatgatatagtcatgtgagatatttaaactttaatattttgctattttaaattatgttgtgagggacttcttattcaaatgttttatatctttttctatattgaaatatcaaatatttatttatactgtatatatctcttctttttctgtatttcagattattttcagggtagatattaagaagtagaattattggctgggcgtggtggctcacgcatgtaatcccagcactttgggaggctgaggcgggcagatcatctgggatcaggagttcaaaaccagcctggccaacaaggcaaaacccgtctctactaaaaatacaaaaattagctgggcatggtggtagatgcctgtaatctcagctactcgggaggctgaggcaggagaattgcttgaacctgggtagcggaggttgcagtgaactgagatcatgccactgcactccagcctgggcgacagagcaagactccgtctcaaaaaaaaaaaaaaaaaaagaagaagaagtggaattatttagtcaaagaatttgtgttttgaggattcctaacatgcacttccaaataattttttttttatattttttaaaaacaatgttcactgccaccagcaacacactagagggttgggtatgtgtcttttttcatcatagagcataatttttgacgttgttgatttgttaggtgaaaaacaaaaggaggtgcttacagttggatggagtttggagagaggactagtaatctaattactagaataatagggcctggaaagggctctgagagaactaggatctaaaggccttgcgcagggggaatgagaggaggacgtggtcctgggagatgggcgtgagcagctgtctgtggagcccctcctctgtgccaggagagtgctggcttctcttctcacattgtgttctgtgatcatctcagtctttccaagtaggggagaacccagttgaggaaactgaggcccagggaatataagtaacttgccctatgttaagcccccgggacaatatgaaacctgaccacaaacctgaatctgtttgagtctaaaccctattattttcccacccagaacaaaaggaagtaccatttgagacccattccataaaagatgggcaggtggaatttggacagtcggagacatcgagggcctttcaggggcggggaaacgagatctaagtctagcataggtggagagccattgaacaagggaacactggagccaaagaagctcagctgaagtttgcatcgaatttgagaggcaatgggtagtggtgacagaagccaaggtgcgaacgttagtcctgcagccccgactgcacactgaggcttcagctgtgctcttctcgggcagctccaaccagggcttcccaggacctgcccaccctggaggcgatgcccctgggtggggctctgctccctaaccttcctcagccccccacacatctgagttggtggggagcatgtgaaggatggagattcccaggcccaccctgcagatcctagagaatcattttgtggggctctcccctcccaccgttacccttctgaggtcagttcattcattcattcattcagcaaagtgacctgaaccctggttacaagcattgtgccaggagttgggaacatacaggggaacaatagagccttttgcccactaggagctcctggtcaatttagggaaagtttattttctgaatatgcactttaaatacaataagaaagtttaaaatagaggtcaaattttcatctataggatgatgttagtatctaaaccacaatcacatgaaatgatatagtccttaatgacttgaacatgattaaccaccaaaaacaaaacaaaacaaaaaacccagcactcttcattagcttcttctagcaaaattgacagaggaaactggtgtttctcaagctatgtgcctctataacactagtgtcccatgaactcctgggcagattccttgaacaaatattaaccttcctaggatctgcaaggcaggcctgggactctccatccttaacaagctccccagcaactcagatgtgtggggggctgaggaaggttagggagtggagcccagccctggggcactgcctccagagtgcgtggttcctgggaagacctggttggagagacctgaaaggaggtgggtaggcagggccagcccccacccccacctgttcccctcagtgcctcctgaccctcccctattggcgagggcctctaggatccctttaatttgtaagttaaaatactactaaagagaccttttattttaaaaatcaagagtttaaaatgtattctctggcctccactttctgattttccatagataatccctatatatatgccatttcaaaatacatggattattttaggaattatctgctttttaattataattcttaaaacattggtggttcatgctgaagcatggcaattgtatagatgagaagtttagcacacagactgattacttttcatgctgggtcgggggtctccagaactaacaccacattcagagtttcaccaggacccccaggattcagcatataactgtacttacagctaagatttattaaggaagtccagccagatggaacaaaaggacacagcagagtctggagaaatccctgaagtcctctccccatgtgggatcccagagagcactcctcccccagcaagaaaaatgcagcaacatgtgtgtgatgtttctgcccagggaagcctgtcagagatgcagtatccagggattttgttggagctgtactggtaggcaccctctgcctagcacatagcaaaagtcgactcccagaaggaaagcaggtgttcagcataaaccatgttgcttgcacaaacagcccaggtagtgagctactcttagcagttagggatcagtgggaacgcagcccacctcgccagcaggcctttcagaggagagcagactccatccagcccgccacgttgactctttactgtacacttcggattattgtttgtagctgtttttcaaatgatttccatgctggtatctcagacctattaaaagattttttttttttttttttttttattgagacggagtctcctctgtctcccaggttggggttcagtggtgcgatcttagctcactgcagcttccgcctcccgggttcaagcgattctccctcctcagcctcctgagtagctgggattacgggcacctaccatcatgcccggctaatttttgtaattttgtatttttgtagagacagggtttcaccatgttggccaggctggtcttggactcctgacctcaggtgatctgcccgccttggcctcccaaagtgcggggattacaggcatgagccactgcgcccgaccaaagatatgtcattaaagaagcacattccaagacacagtgtctactaaggagagccaagttctgtactgcaggtcttctcaaagcttttagtacgctgacgcacatcagcagccccgtggaggatccggctcacttctttcaccctggaatatttgttcaaggaatctgcctggcagttcatgggacattggtgttgtagaggaacatagtttgagaaacaccagtttcctctgttaattttgctagaagaagctaatgaagtgctgagtggggtttttttgttgattaatcttgttcaagtcattgaggactatgtcatttcacctgattgtagtttagatagaagagtcatcttgtagatgaaaatttggcctctgttttgagctttcttttttctctttttgagacacggtctcactctgtcacccaggctggagtgcagtggcgcaatctcagctcactgcaacctccacctcccaggctcaagcgattttcccacctcagcctcctgggtagctgggactacaggcacgcaccaccatgcctggctaatttattttaaattttcttagagagatatcttatttaataataaggaataatagattcatgatcacacattagaaatatattgggtttatttgtgttttcttacgtatgtgttttagttcttgttgcctgctcataatgcaacgtctttattatcgttaaaaattatatcattaaaaattataagtgccgatgttattctaataatgtcagagttcaaatttataaccttgaaaaatgtttttggtcgtgtcttaacccagtgacctgacacctgtgaaagctgagggtgttttacagggcattttccatagaatttttcaaaattgtcctgacaaattaaaatgaagagttaataggatatactccaccactgcaaggatttgtagcatgaaattttattattctatgcagctataaattcaaaattgatttaaatcagcaatttgatggcatatttataaagacataggaaaaaaatcttttggtattctaaagcttgcatttatccatggtacaaatcatatctttttgtcaatttgaatttgaaagcttttatgaaatctgtttcttcttaactagctgcagaaaatccttttatcgtatatataaattggtaaattcttaacaaatcactgaatagctttctttcaatttcttgctgtattatatataatgaaagattgcagttcccatcaacacagaatgttgtcccaatttcctgaatccagattcatggagatgatcttttttaattccattactaaaatgtattagaaagtttaagtgttcggattcccacaaagcccactggacccaagtttaccaggaaatttggggaggtgggatttaatgagcttcatcatttataaaatcatcagagctgctgataaaagaagtaaagctttgggccgggcgcagtggcttacgcctgtaatcccagcactttgagaggccgaggtgggcaagtcacctgaggtcaggagtttgagactagcctggccaacaggtgaaacccaaaccccgtctctactaaaaaaaattagctgggcgtgatggcaggcaccttaatcccagctacttgggaggcagaggcaggagaatcgtttgaacatgggaggtggaggttgcagtgagctgagatcaagccattgcactcaaacctaggggacaagagcaagtcttctctcaaaaaataagaagtaaagctttgaaagcttcaagacttgtgcctgcttgtggtcatcctaaccggcttaacttgaaatacacatgagatgaaagatcaccgtgcctgtaaatttcagcaaactatatgggaacatggaacatcactgtgcacttatataagtaccatttacttcctgtcatgaataaatgtatctgtgagatgcaccactaaaaaaaaaaaaagacaatttgttaaggataaaatataaacctgccatacctgtagctatcttagaaaaattgtttccattcttaagaagttatgatgtatcacttacaatttcaaaaagagactaggcataaatacgtaaaaattttttccactattatttcagagataggagctttgttgttcatttacttactatgtgaaccattcatatttatcagggctgctgaagatttattgtcacaaattcaggaaaattaccagaagccgctggaagaattggaggtattgaaagaagcagcaagccacgtcctttcaaagcacaacaatgaactaaaggcggctgaggcgctcgtgagggaagctgaggcaaagatgcaggaaagcaaccacctgctgctcatggtcaatgctaatctgagagaattcagtgtgagtctcacttgctctctccttctcaattagaacaggtaacaaaatactccaacgtaagcaattaaaagtgagccctggcctggctgggtggctcacgcttgtaatcccagcactttgggaggccgaggcaggcagatcatgaggtcaagagatcgagaccatcctggccaacatggtgaaaccccggtctctactaaaaatacaaaaattagctgggcgtggtggcatgcgcctgtagtcccagctactcgggaggctgaggcagcagaatcgcttgaacttgggagatggaggttgtagtgagccgagatcatgccaccgcactccagcctggcaacagaatgagactccatctcaaaaaatgaaaataactttaaaataaaataaaagtgagtcccatgcactaacttctgcacgtagcattaggcaccaaaggtcagaagcagggttgcttttatgaagcacccttaaaatgccgtttctgctgcaggataaaaagctgcatgttcaagaagaacaaaatctgacctcagagctcattgtccaaggaagaggattgatagatgctgctgctgcacaaacagatgctgtacaagatgctctagaggtaaattacatctcagcacagccacagtacagtttttaaagaatcttcacacatcttttctatatgcacacatatctgttattaagtagatgtgcatatatttacaatattaatttctccatgtagcacttagaggatcaccaggataagctacttttatggtctgccaaaatcaggcaccacatagatgacctggtcatgcacatgtcccaaaggaacgcagtcgacctggtctacagagctgaggaccatgccgctgagttccagagactagcagatgttctgtacaggtaggaacacgcctttgtgggaactcaagagcttgcagtctattgatcggagaaatagatggatgtttctattcacagtgatgggtcactcttcctttgtgtaaaaatgagcactcctgttttatttacctggcaagttggatttccttgtgtctgctaacatagtttaccattggcctacatatatggtggaaaaatgcaaataacaggagaagacttaaaacacataatatgctacagtataatattaatataataaaacacatattatgctacagtatcaagccatcaaggctttattaagcacctactgaatgctcagggctttgttaggttgcaggtggaacagaatgaggttattaatttctttacagatcttgcctctttggagtttattatttggttggaggatgtggctgcccactctctacctatagaagtgttgggagtctcttttccaatccctgagagataccacctccaattattttctactgcctgaaagtctgccattgtaatacaattactttaacttatattttttggatatttaaaaaatatgtactcaacttgctaaaaattcctttaaacgagaagcacaattttagccatccgtttcaaacttgtctgcacattggaatcacctggggagcttcttaagccaccgatgcctttgtcctttagctgccttccccccaaagattgtgacttaatgggtctggggtgtaggattttgtgattttttaaaaaccctcaggtgattctaatgtgctgcaaatgtgggaaccaaagttttaggtgttatcagtgatttacataatactgtgagttaattggtaaatttctttctttaaaatttgctatgcgttatgggtgacaagtctgaccacactgggaaaatgtatgttcttgtgcatgttctgtggaaggggaaagatgcgtgtctccttattggaaaaatgctgacataaaagattagttcacacaacaaaagcaattaaaaatcgtataagatagaatattgcataaattatgcgctaaattgagtactgcttcctaatatgtcttagggatcagtagtggaaaatggcattagataccagctcctctcttctcatcagttttcatcatttcccccaaagagaaaaaaatattctgactccatacctagctaaaacaaaatctttattacttcgtatgagtaatagaaacaatttgttgtgatttaacacaaagttaaataattatcttttatttataaatcacagaattttgccagtccaatagtaacaaacaatagctgctaatattcggtctgggaattgcccgactcaataaccttggaaagaaaatgaagtgagttactcagcaggcaaagatgtgcccattgccagactttattttcaagacagagagcactggatgacattgtgccattaccagttaccaagttcctaagcaatgtgcccacttgttagaatgatgttaagctgattgaaatattagctgatcttcctccaaaatctctagtgaattttgtaaaattgtcgtatgccattagagggataagattcagcggcctcaggtatgcttagaaacacttcttggaggttaccaagtatgttgcaggaagtttataaccaatgcaagcatgcagtggcgccctagacacgcgcaggggattggaacagagattgaggaatgctgagggcagctggtggaaagtgatgaatggtcgtctaagggaaacagcaatagtctcttcttgggtattgattgaatagcagttctgagtgttatgacaaagtggctacggcttctcaaagattacttttgaagttacatgggaacccataggttgttattttttatggatgatactcttctaaggggaaagaagataggaggctttcaaaactggtaggcatttatgatttttgtgagtgaattggcaagtttgatttagtttatcataacgtatctaaatatgctgctttgatagtggccttgaaaacatcagaaatgtgtccctgaatgccaccagtgcagcctatgtccattacaacatccagagcctgattgaagaatcggaggaactggccagagatgctcacaggactgtgactgagacgagcctggtaggaaacgacgtggcttctttttctgggctctgtgggagatttttctgtaccgggtttgagcagagattcagtggccccaatttctgcctattaacattcttttctggtggaatctgtttctggcttctgtcatcatatgatctgtgttttaattttttaaggtcataaatacttctttatacagactagaaaccagtgtggagatgagaacaatctcacatttccttgcgctaaaaatgatgatgctacttgatacctactggagacatttttctataaccatggtgaaaatctttattgaatggctggtttccttccttatctacttaaaaatgtctttgttttctcttgcctcagccattttaaattgtccctacctggtacctggctgactttcttgctgggaatgtgtctgggggctactctgatggagtcacttcctctgtccccagcaggactccaccctgccctgctctcaccacgcttaagtggttctgttttccagctctcagaatcccttgtttctaacgggaaagcggccgtgcagcgcagctccagatttctaaaagaaggcaacaacctcagcaggaagcttccaggtcagtatgtggctcggacggtgtagacaggcagagtgagcgtgagcgtctcgctgagcagcctctaagaatgttctccttgcatgcagcaacttgaagcttagcatttctgtgtcccatttatattccaatttcctatcatataaattttcctatcgtataaacttcctatcatataaacttcatataatttggcatttttattctagtgatatctgttcctttattgtgcagtcatctctatctttaacctgtccataatcctccactcattgccttagcttggagccttcactgttcttcctagtgtctgttgggttatctttgattgcgtgtgctcctctagtttttccttgaggagatgtattatgcttgatatttcttttacctttctcatggaactaatatcatattagactcatggtaggttctcatttaataatcattaaattaaatcctaattgatttagccatttttcaaaaaatacctatgcagtttagtttgtcctaaagtttcaagaaagaatgacttggcatatgtaagagcaatccatccaataaacatgaaccaaagtggcagcaggaatctgttatgtaagagaaactacgtaggcctacaattttttataacaaataatgtgctttccaccttaatatattctaatagatcaaaaataccaagatttctggaggagtaaatagtgggccaggcacacagctcataccctttacaggtgacttacttccgagtctaacactggatccttccacagctgtctgaactaaaggcttggatatgtacataatttttttttctcattgagtgacacagtttaaaatttatgttgtcatctcacagtatcgaaaatgtataatgtgttgatgggctgtaatttcagtctgtacaactagaggtacttcataggtagtgaaattgggagcttgctggcaattaaaatttcacgttttaaccatgtgctcaaaatccaaatgtgattgtatgttatgaacagaaattttaaaagtaaaagctgtgatcaaacttgagaaggaggttgagttgagttccagttgggtggccagaagggaatagtaggggatggaggattggccagagatgcaggtgggagactgtgaggaagactcccaggtaggagcccaccctaggggttttacaacccagaggagaaaggtggccaggattcagatgggaatagaaagttagtgtgtctgattaagactgagtgacttaaacacagctcttcatccttgagctctagtaaaattggacatgaaatttaagtagaaatattagtgaaaaagtcaacaagcaaagtagagaaaatgatcgagcaagctagaaacacattcttaatttctttttttttttttttgagacggagtctcgctccgtcgcccaggctggagtgcagtggcacgatctcagctcactgcaagttccacctcccgggttcacgccattctcctgcctcagcctcccaagtagctgggactacaggcgcccaccaccacgtctggctaatgtttatttttatttttatttttagtagagacggggtttcactgtgttagccaggctggtctcaatctcctgaccttgtgatctgcctgcctcggcctcccaaagtgctgggattacaggcgtgagccatcgcgcctggcccatactcttaatttctataatgagtggtgctcagtcttgctggaaaaactgtcaatattgggaatctctttagaaagctatgaattctgtcgatggtcaagaatgataaagctgttgcctaggcaacttttttgtaggctaacctgaaaggaaacatttttctccctttaaataggtattgcattggaactgagtgaattgagaaataagacaaacagatttcaagagaatgctgttgaaattaccaggcaaaccaatgaatcactcttgatacttagagcaattcctaaaggtaagtggaaaggactttcttctgtaaataacgtcttctcattgtaaaagcatcactcaggaacataaggaagtcctgcctcaagactgataaaggctttagctcaaaaatgagactaagattggcaaaatttttacttgcaaaggaatatgatttagaaatgaaaatcattggtttttaaaataacatcacaatacttgcatcaagctactagaattatagtcttaaaaacagagactgcatagtatctgaattgcttacttttgaaatgggattgacacattgcttagaggaagaaggaccattgaaagaagtcagcaagtaaagaagctggaatgtgctttacctgcctaaggggaaaatgccagattcattatcagtgtggcgaactgaagactgctcgcttggccatcttcctcagtgaggcagtaaaacattaggctcactgatcactttaatactgatggtttagaaatgtggtattcatgaaattttttgggggggtctacagtaattttattgtaacagagaagccaggccgcaataagtctacatgattagagcagatggtggttctttccagtgggtgaagcctgaacccggctagcagcacacattttttgagacagagtctcgctctgtcgcccaggctggagtgcagtggcgcgatcttggctcactgcaagctccgccccccgggttcacaccattctcctgcctcagcctcccgagtagctgggactacaggcgcccgccaccgtccccggctaattttttgtatttttagtagagatggggtttcaccgtgttagccaggatggtctcgatctcctgacctcgtgatccgcccgccttggcctcccaaagtgttgggattacaggcgtgagccaccgcgcctggcctaaagttttaaataggataatttttttatgtgtaatacaaatgaatcgtgctgcacctcaaacttctcttttgttcttttgttgttttttactttgaaaatttcaattgttttatagagaccgtgtcttgctatgttgcccagattggccttgaactcttggcctcaagcgaccctcttgccttggtctcccaaagttctgggattacaagtgtgagccactgtgcctgtcctcctttttttcttaataagcatcttttgaaaaagtcttataaagtgctttaaagccattaaaaacaggaagccccaaagtcctgtttgtaagcatggaagttacctggggaaactgggcatgctgcattgggcttacttcttactttgaaacaatggagcattttctgatccggaagattttttttttccttttctttttttataaggatgccatggtatattttgactaaatgcttaataacgtttttatttgaaaataatttcgagcctacagaaaagtttcaggaaaagtaaaaaggccacctgtataccctttttccagctttttctgctgtaaatgttttgccccacttgtgattaaatgcttcgaaaatgaatgatagtgtcttttaaaaatcctcacccagattttctagaataactgaattccaatttaccttgagtggctgtttgggctttattctgctgttacttctagcagccagttgatgctatgggcaaatacctcttcctttaacttaagacattcccaccttagctgcagacctaggatccaaatccttattatccagacatgaaaggaggtggaggacatgtttcatgaagctgagaaaggagtgatggaaaaggacccaaataaagaagttcagcttattaagatgtaagacacagctcacacagcgattggccattacttttgtgatctcattgtttattgaaatcatattccagagaagtattaacaaaaattatttcatttgtccctaaaaggggatagtagagcatatgatatgcagctttaatattgccattagaaacaagaagctcttagttcattgaccactgcccaaaagaaaaaaaagcaaacagacaagcctcagtttgtgttcagcatcagtaatatgacaataatatatttctgtgcgaaattacatttgttgtcgttttattcttttctctgtgtgtaagcaccagaagtgcatgcttttatatacatttattttaggtataagagacaagggagccaaaaccaaagagctggccacgtctgcaagccagagcgcggtgagcacgctgagggacgtggcggggctgagccaggagctgctgaacacatctgccagcctgtccagggtcaacaccacattacgagagacacaccagcttctgcaggactccaccatggccagtatgtcagcgcccttccttccagtcatgatcgtctgcgtcatgcagacgtggagctagctaagcacacagtggtgcgtttttcacaacattcctgaaaagtagaagtatgctaacatctggattagcctttattaagagaaggaccttgggaaatgcatgctacttgtgcagttttcatctttgtaccacaatgtcatggctttgattgttagggtgttgttttaccaagtgcattgttaatggacaattaattatcttgtttttccctctccccaactttcttgccaccccttgccttcttgtatttgttagctctgttggctggaagaaaagtcaaagacgtggaaattcaagccaaccttttgtttgatcggttgaagcctttgaagatgttagaggagaatctgagcagaaacctatcagaaattaaactgttgatcagccaggcccgcaaacaagcagcttctgtgagtttggggccccgtggctttcgtaactgggctctcagtcatgtggggtcccagggaattcatgcagacatggccctcagtcacactgcgccccttagggcttccaaagacccagatcccaataatctgggcttcctcatagccctgtcttggtatatttaaagccaataactagcttcattttctttgagttctgcttttgttcaacatgcttcaaaatgttgttagcaaagagatttccatgtctttatggagatttatcattatagactaaatttaaaactattagcctggacagtgcggaacatgtcaaatctacgtgttaacatcactcttaagtttatgggttgcatgtggtgttagttcttcgttttaccaacttagttttaataatccaagtattccttaaaatgtttgtgtagtatgggcctcatccttgaggtgtctgagaaaacagtttgtatgcaacgaaggctgcacaaatccaggtcactaaatgcctgaggcactggacacctggagcagttcacacatgagaagatgttttacccatggcacatggcactggctgtgccctaagggaaaaagtttccttttgagagaatgtgcagtcgtcatgtgattggggacttcgagaggatgaatgcagcctctgggcttgcatttgtccacctgaggctttctagggaagagaaaggagcacagggctctgtcttttccaaaacctcaagtgtccttgctattggaaaaggaatgttggtttccatgagctctggcttgcatctgtttcagttacaattgctaaataaatacaggctgggcctggtagctcacacccgtaactcccacaatttgggaggttgaggtgggaggattgcttgaggccgggagtttgagatgagcttaggaaacataataagatcctgtctctactaaaaaaaataataataataaccaggcttggtggtgtgaacctgtagtcccagctactcaggaggctgaggcaggaggattgctcaagcctaggagttcaaggctgcagtgagctatgatcacgccactgcactccagcctgggcaacagagcaagaccctaaataaataaataaataaataaataaataaataaataaatataagcccaaggaatgcttcttgatgctaggttaataccaaacttagactctttaatgtaagatacatatgcaacgaattactagtcaaagaaatatgtagtaagtgcaataattgctctataaatatctgctgagtgaataaatatattacctctccatttattcaacagatgattatcaaataccctctttctttgtgtcaggcggaaagattccaaggtgataagatccttgtctttaaggaattaaatcttatatgagcaagacagtttcctatataaaataacttattaaaaactaacactgattttctcatatttaaacacttaatgaaatcatttttgttaccatctgatatgtcacttcatgaaacatgaaccattgtatgttatcaagagaggaaacctgcctcagtgaaaattcattacagaatagcattgttgagctgctggtgagctgccggtgtgtgtcactaaatgatggggacactttcattttccttctacagattaaagtcgccgtgtctgcagacagagattgcatccgggcctaccagcctcagatttcctctaccaactacaataccttaacactaaatgttaagacacaggaacccgataatcttctcttctacctcggtagcagcaccgctgtaagttatggacctttggaaagcgacactgaatcttttatgcacttctagatttttctgaattttcacttatttgacgaaaaaaaaataggccttagtgaaatctctaaatctcccatagggactaacctttgttaaaatggtagcattagatgaaaaatgaacaaactaccaaatggaatgcctgtgagaaggaaagtggcgtttctgaaggatgccatcttaattgtaagccttggggatggaacttttttgtgattcccccgttgacccctggagtgactgagtagcagaattgtcaagcttctgtcaggtttttcttgccaaggattccagtggtctccagatggcaagtgcctatgaaaggtcttcgataccttggctgtgccagtgagaacaggtcagaagcctggggtgtgtagggcagaaaatgttaacgggcacatatagtatctgaaatgtcttcaggagatgagatgcaaagtgcatgcaagtctgtgacaggggtgggacctcatggctcctgtcttactgcatatttcacatccatttcttacctcggagactgggcaaaggagcaagctcagtgccttccctggtgctccctgtggactgcctgtgacctgcagcgaattttcctggggactctgtgggagacattgaggagggccatgccaggcacgcagggaggcgctaatgtccccggggctgtgagtcatgccccagctccagggaagggaccatttcaaacaaaagaaaatagatttggggggtttgctttttatgtatttatttttaagaaaagagaaaaccccgtaagaattgactctgtaaagtgttgtggtggtcagcaaacagtccagtgtgtaaactgatccccgttcattcctcgccccccagtctgatttccttgcagtggagatgcggcgagggagagtggccttcctgtgggacctgggctccgggtccacacgcttggagtttccagactttcccattgatgacaacagatggcacagtatccatgtagccaggtagaagagaatgttctctcaaagcagctctcttttttaaagtgtgtctcataagtaattacatgcttgtaacatcatataataggctttgaaacttctggaaagtcagattataaccaaacaatacttggtttaggttagctgtagaaataagcatttgtggccagtggctcacacctgtaatcccagcactttcggaggccaaggcaggcggatcacctgaggtcaggagttcgagaccagcctggtgaaaccccatctctactaaaaatacaaaaattagctgggcgtggtggtgggtgcctgtaatcccagctactcaagagactgaggcaggagaattgcttgaacccaggaggtggaggttgcagtgagtggaggtcgtaccactgcactccagcctgggcaacagagcgagactcccatctcaaaaaaaaaaaaaaaaaagaaaagaaataagcatttgttacaagtgacagaacttcttttttaaggctgaataatagtattccattgtgtatttgtgtataaaaccacattttctttatccattcacacattgatggttaatcattccacatcatatccaaaaatcataacaacattttgcacctcagaagtatatacaactataatttgacaatatataataaaaattaattcaaaaaatttttttaaaaacttaaggtttggatttttttcttactgcaggagaaacaaactttgataccaaaatcaacaatcagaagaagaaaaaactgaaaagcttaggttacctttagaatgtctaaaatgtctaaaagtttaggttacctttggagaccaggcatggtggctcactcctgtaatcccagtgctttgggaggccgaggtgggaggattgtttgagcaagaaggagtttgaggttagcctgggcaacatagtgagactctgtctctaaaaaaaagttaaaaatttatccaagcacagtggtgtgtgcctgtagtcctagccactcgggaggttcaggcagggaatcactggagcacaggaggtcaaggctgcagtgagcaatgatcacaccactgcgttccagtctgggcgacagagcaagaccctgcctctaataaagttaaaaagtaaagaatgttacttttagaaagtctacgtgtaaggcagccaacctggtaaaattcctcaggagagaggtgtaaggtgtggcatggtagacattgcatgtggctggcagcacattgcacttaagtcaaggacagaaaataaggatgcaagtggggggtgcattttcttaaaattcaggcacaaagcaaaattcttctttttaaaatccttcagaggtaatcacttttgagcagctttaagtgtatgttttcacttttctataatattatggtttgttgggatttttttaatttacaaaatgggataatatttacggagtagacatatcttcagatacagtttagctcatctcagatgttttaagcagggacacaacatgatgaaatttctgtttcggaagagacactcttgaagatttcgggcagtaggcaagactggaagccaggaggccagcaggggggtgctgttgcagggcccttggggagaagcagatggtgggtgtgaaggaaacgggattgtatgtgcgctgactggaaattctgaaaatttcttttgcaattctttgtaacccttagatttggaaacattggttcactgagtgtaaaggaaatgagctcaaatcaaaagtcaccaacaaaaacaagtaaatcccctgggacagctaatgttctggatgtaaacaattcaacactcatgtttgttggaggtcttggaggacaaatcaaggtaacattacgaaagttcttctgaacaggactgattgactgattttacctatatataaaagtcatgggccgggcgtggtggctcacgcctgtaatcccagaactttgggaggccaaggtgggcagatcacctgaggtccggagttcaagaccagcctgaccaacatggagaaactcttgtctctactaaaaatacaaaattagccgggtgtggtggcacatgcctgtaatcccagctactcagggggctgaggcaggagaatcacttgaaccctgggaggtggaggttgcagtgagctgagatcgcgccattgcactccagcctgggcaacaggagcaaaactccatctcaaaaaaataaaaaaataaaagcatatgtttagatggttgaatatatcctaagcagatgaagatgtttctgcttttgttttgctttctgacagttcctctgcagagttaggctggttttgtacagtaaagggtgatgcttcatcagtagcataaatggagaaaaagccaatggctcatcttgctgtttgggtttctttcccagtgatgaacaggaaattcagtgctccacgttaatttctgtaaagtttctttatctctagtctagctctagttagtggtcaattaatactaatcagtgtttagcaaaaaagcccaccatatttattttattatatcagttctcctctcaccaaatataattgtgttttttggatctggttcaatgctctgaagtgggagtctaggtctcaggtccagctgggccctcactaccaatcacattctctggctctctgttttctcactcgtacaacacgattctctccatcaaccctagtcactgagatgatctttaagatcctgcccagttgttactcattctaggattccacttcataactgaaaggaaatccagtgattacaaactggcttttttctaatgtggctctctcaaaatttggatctgttagattgaagctcccagagagaagttttgtgcacttggagaatgtattttgcttggtcagcttatatattggttatgtttgtttgcttgtttgcattagaaatctcctgctgtgaaggttactcattttaaaggctgcttgggggaggccttcctgaatggaaaatccataggcctatggaactatattgaaagggaaggcaagtgccgtgggtgcttcggaaggtaagatgtcgtcacggtttagcacatagtatgttattctgttaacatctgagaagtgctgaaagaatgtattaatacatgcacgtcaaggaatagagtttgtgatatcgctggtaggtgtttagctgccaattacaaagccatgctttttcatacgtttattgtcaaaaaaaaatcctgtgacattggtataatgtagattataccaatctacattatattattatattatattgtcagatgatataatgtagattagttactgagagaagcacaggtatcatttttaaccctttaaaaagaagtgctctttttcctatgtcttttatgctttgatcatggatcataaaccctaaacgtttcagacaatttctcaaacaaccttctgtctcagagagccacaaccaaatctttataaatcactgtacatttttattttgaaaatatctccaaggataagaattttttcacgtgtggtcagtttttacagctaagtactttccaattccgaaccaagttctataattccagaaataaaatgcattaggaaatagagaaaaatgagtatgtttctgcatatattgatataaaggcattcaatgacttaaccttaccaagtgcaacatcttcccccccaacccattattttataacaaaataactgcaactccttaagtatataaaacctgttttccatcactttagtaattaagacataaattgcttttttccgttagagaaatgtaacatctgatataatttctcttgtctaatgggctgctctgtccagatggatatctgcaattatccagtgacaagatcagttaaagcaactcacagcacatttagaaactcacgggtgaatttttcattttgtcattgtcaggtctgtagtttaagccttctcttttccccttccttcgcttgtttaaaaagttaggaccaggcggtcatggtggctcacgcctgtaatcccagcactttgggaggccgaggcgggcggatcacctgaggttaggagttcgataccagcctgatcaatatggtgaaactccgtctctattaaaaatacaaaaattatctgggcatggtggcacatgcatgtagtcccagctactcaggaggctgagacaggagaattgcttgaacccgggaggcagagccaagatcatgccactgcactccagcatgggtgacagagcgaaactccatctcaaaaaaaaaaaaaagttaggaccagaggtttggtgattgtagccttaagattgaaaaagaatatagggtttggagtcttgagtttctcaggcttctggcccaggtcccccaccaaaattttcttccctgactttggataataagtctcttcacctcactgaggtttggtttctttttccagaaaagaaaaatgatcatcgttcttgtcttacccacctctataaatcacagtgatgaacacacaacatgatgcgtgtgaaaatgctttataaactggaaacactttaccagtcttcaccactggtctcctacagtgatgtggctttgctttgtagataaatgtcacaggatttttttttgacaataaacgtgtgaaaaagcatggctttgtaattggcagctatgataaaaaatgctgttgcctcgtgaggtaatgacacaccctgctctggaacttcagtggaaagagcatctgaattcaggctctctgatccgccactttttccttattctgtgtttccagcaaggaactcttccagcaatttagtaattctaacatgaaaaacaccccgacccctagactctatcccctccactgaccccagatcattaacctcactgttagaaagaaaaatggttaacagaaattaaacatttctagtatgaaaaagtccccctactttacctgtgaccatatcctctattttcatcagtcatttccagaggtattttgaaatcattgacgtcaagctacagcactgaatgaattgaatgatttccggctcttctttttttgttgggatgaggaagtcagctttttaggtggtcacatgttttgttccccttgaaatacctggcctgcctccggatttccacacaccctggacctttgggtcaaagatgctgccctcctgccaactcgagactggctttttgacggagggctggccacccagctgagtagtagaaccacattgactcatcagctcaaccaaactagggtctgattaaatatgtttttctggggactgaacaaatccactgttatattggccaacatttccaaaaatacgtgtttgtaaagaatgctagtttggtgtagggtattaataggtattgtgtactgatcataaatgtttgggaaacactgagttaaaaaaataagcatgtttcttggctgcgaggccatcggagcctttaattagcattaatatgctgacatgcatggtaaccctgtcctggggagaggctagagttgcagcatttcccaaactcacttgagcttgaaccctttctgaaaaggtacctctgggtgagggtcacgcctgtaatcccagcactttgggaggccaaggcaggtggattgaaaaagattagccaggcatggtggcgtgcgcctgtagtcccagctactccggaggctgaggtaggaggagcacttgagcccctgcacttctgcctgggtgacagagtgagatcctgtctcaaaaaaaaaaaagtgcatctggagttgcatctgcctcgtaaaacatattttgtgaagtgctgatataggcacagactggcactttacgtctgtttgtaaattgattgaaccgtcttcattttaggtaacatcccccactgcaccccttctcctgttagacaagaactttagttcaaagagttaataccctaattctagtaacaatccattttagcagacttagattataattccttgtccctttctgtttgtgtataatttgccattattaaatcattagtgtagcccatcgatgtcctctaaatttttaaaaaatttttgactgtttactcttaaacgtgatttatattaccaagtaaatgaattgaaacttttttattcctccttgaatatattattacacttgtacatggggtcactctgtaattatgagcagtctgttatattctcaaaggatgctgcagaattaaccactgattctaacagtcctcatcaaaatcaatatggaaagaccctttatttaattaacaggcataatccttgtattatttacgagtggacattgtgagagagtgctggctacgtggctggcctttgacacgagtcagtcacctgcgttccgggccctctgctaggtaccggccatgtccacatacatcacacatttatgtcctcagacatctcatggcgtaggggaaaatgcctgtatagaaagcagaaaatgcatgggctgtggcaaggggccagagttggagaagcagcatcccaagcccgggccagggttatctcatgccctcgcatgacggcagcagggcatgctagtaggtcagctccggattatccacatctcatgagggagccctcggagaatcagggaggtctggtgattcttccagactcacggggctgagcgctggggagggcggacgctctcctaattccaggctcccacttgaacctgcgggtgatggtggcatttccaaggctggaacagagctgtccacaaagtgctgtgatgaaccgagctttcatttgtcctgggcccttaccaaggcagagacccacttggggaacaggcacctgggccgactgttgaggcacatgtgcctctggtcatagtctggaaactggcaggggctctgggagaagttcagggaagtgactgacatggggacaagccttcggtcatgttcagtcatcatttcatttgaggtccccctcttcgtggccacctcactccagcaggccctgtttggggagagaacccagtagcagagcccccgcgttcttgagagaggagggctcacaggctctgggaagggagaaagcccccatgtttttgggagaggagggctcacgggctctggagagggaagggccatgcactgaggaccaagacaaatttctggagttttgtttgaaacctggctttgtgatttcttggggtgtgtccttgaacaaggtactttaatctttgaggctcagcttttcataggcagaaatgaagaccggcccatcgaggacctccgaacactgcagaataatgagagaaaacatctgttgtgtgccaggcactgttctaagaactgcctggggcagccctcccagagaggttttatggttatccctgttttatagctgaaggaaagggcacacagagaggttaggtgagttttccaagttcacacagctagtatgttggggacctgggatttgaaccctagtagtctagctctagagtctctatcctccggcacatgcactgtggttggccaagaggtagaacaatggaacatatggctaggaagccacaggcttaagaattaaagaattaaaccatagttgaagaatttatctagagtgcatttcttttaagttataattcctcaaagagaccacatgatggaaatttttgaaaaagcaagagtgcaggtagttatagttatacatttgaaacctcaggtttcacaaagcactattttttgttttgttttcttttatcatccatggaaacgattttactgtttggttagactgccttgcttggaaatgtggcactgagttttgttgttacacctctaactgggaacagttcaaattcttacccaaaaactatcctcatccaagtttcactctcaagcctcatgatattccagaaaattatttttggaacataattatgatctgttccagatgaatggctttgcgattgaatagtgagtcaagtcagccttttgctctgttgggggagaagaccagaaaacacactcacctgaaaatgccctgggccgtattatatccctgtttcaacctacgtactcatctctaagtatgatatgggtctttaagctcatcctgcagatttttgaggatgtcagtgatgattgttttgtgaagtgatgcttctggtatatgggcacatacttgctttccatcataactctagtttccctaaggtattagataaaacctcatcagcaaagtgaaaatgtcaatataaaaattattctgaaggcaccagagttaagagaggacagttatattaaaggagattagaataaataaatccagttgataaactgaaatatttatagcagttatcctcctgtaaagaaatgtatttttaccacaatgaatactgcctacattaacattattttccttataaagcagctgggcatttgtcttgcatcttcacatggcaagcatatttttaaatattatcatctacacttgttatgaaagtatggaactaatagctctacagtgatctttgtgaaggagaactcagtaagtgtgttcttggttctttctaccctcctgagaatggattctatttcatctcttctgctttgcagctcccagaatgaagacccttccttccattttgacgggagtgggtactctgtcgtggagaagtcacttccggctaccgtgacccagataatcatgctttttaataccttttcacctaatggacttcttctctacctgggttcatacggcacagtaagagtgtttgtgcggccctaggccctactgtatacacacatttagattgctatgtggttgtttatgtttaatgaggatttactaattaaatatgtacatatgtataccatacaatttttatgagcatatgctagtattaatatatgtgtgtgctaaacaatttcctcattttaaattatttattatcattgtagaacctttagaaaaatatagaagaacaccaagtagaaactagccttctagtctttatagatatcaattcaacatttgttattaaatttcgagctcaaataatatgtcttgttctgggttcactgtgaccaccgtgacattgtttgaattccatccatgggaatttcatgttcttgtttgcatctcatgggctggtgatttctgtctttcagtcttttggttttattttttagaacgggccccttgtcagtctcaatgaaaaagatacgaggagattccacttctcttactgaattgtggattttggtaacaacagatgacatttcatttatattagtgtagtgttctagaaagccttcgtgggcatttttggtttcgtagccgatagacctctggctgtggggccagatccagttttctcagtttgactttagaaggtttcagccatccctgacttgaagggaaagggaaacctgggataaagctataacctggggaactgtgttctcttttttacagaaagactttttatccatcgagctgtttcgtggcagagtgaaggttatgactgacctgggttcaggacccattacccttttgacagacagacgttataacaatggaacctggtacaaaattgccttccagcgaaaccggaagcaaggtagggacacagatggactcaccagatgtcggtcaccctcataagaatagaaatcttttcaaaatcagcattctttttttccacagtagtttcctgggtattgaatgatagtctacttggaagccagtgttgtctttggaatactaaccaacaggattcacattttgctggaggagggttatacttgtatttgcctgtgatttccaagtgtgttatttaacagtaaatgctggattggaatcaagaatcaaatccattctgttttcttccacatgcatactgctcttatttagcaatgtgtattgactttgatagagaggattttcacttgtccttcaatagccaagaacattagctgatcaaattcgcagaatctaaaagaatatgcatttgtaaatgagctttgttgccagaagtttgcattttaccttaacatggaaagggattttccttttcttatctcttgcctgtgctctccttttaggagtgctagcagttatcgatgcctataacaccagtaataaagaaaccaagcagggcgagactccgggagcatcttctgacctcaaccgcctagacaaggacccgatttatgtgggtggattaccaaggtcaagagttgtaaggtatattaaactgcagaattttcatgtcgctgatttccaactttattagcttgctagggctgagaatggactgtatcacaaaccaggtggcttaaacaacactaatttattctttcccagttctagaggctgcaagtccaaaagcaaggtgttggcagggcttgcttccttttgagggctgtgagagagaatctgttccatgctcctagcttctggtcgcctcagggattccttggcctgggtcctgtgtccacatttcccctttttataaggacaactgtcatgttgcataaggacttcccctaatgacctcatcctaacttgattacctctgcaaagaccttttccaaatgaaggccacattcacacataaggaggatcaagactaccacatcttttgggaggacacggttcaacctgtaacatctgcttctatttattcagagtactctatgccatgtgatttgagaagtaaagcaggccttctgcagaaaaattagtgattttatatgtattgcctttagaacgtctaaatcctgttaccgtgcaatatttggagaccctacttgctgtcatacttcatctccctctctctagacattttagagaagtagatctcttttaaggcaaaaggaaaaaaaaaaaaagaaatcatgctttctgcagacttttctggattctcctttgtgtggttagactgaataatgtatgtgcaagttgaaagaccagcatcaagaagtggaatgaaatggcacaggacacacaatggaatccttgtgtaagactgattcatgttgagctttgtgattttaatgatttacagaaactttgtgtggctggttcattgtcctcagttttgtaattttggttgtaattaaactctaaggttctttcacaccattcaaaaaagacatttgtgaaagtccaatagtcaaggtaagacagcttgcagggagtggggtcattagatgtccaaactgggccattcagcgtagtggttagcaaatgtccatttgtagcagtgctctatctttaggtcaagttctttcatagactcctcttatgtggcacagagctgcagccattcagttgctatgatgagcagccttttgtagagagagccacttctccactgtgccccttctctttgccaggtatcttagaaagtcccagggaacacagtttgcaaccacagccgcctcctgatcttagaattgaatccatttaaacctcagcggagttggtcacttgcgaagtcttaccttcctgccaagacggagccaggactggaagctgtctccagatcccatcccagattcatgccctgtcatgctgggaccaggactggggtgttcctgtagcctcggctatgtcctagtacatctggactttgcccagacggcccagtgtagacaacgcaggaaaggacagaagcccatatcacagatgttctcagtagaagggacttaggtgtcatcaaagccagcctcctcgtttacatggaaagaaattgagatctagaaaggctgaaatttgtccaaaatcatatagttgcttaatggtccatagctcattgttcaacatgagaaaaaaaaaaaatgaggtgtggctgtaacaggaaaccatgttattgcaaagctctcctgtgaagagctggtacagaagagtgcagctgggagatgttcagtggtctccatattttggaaattagagctggactacattatagcctgacctcagccaggagtgtggagacttctggtaagaaaaatatgatattgacttgaacattgagaagtagagtttcggataatcccagacttcaccaaatacagttacttcctttaggacaaagttcatggatatgcaacgtaaacaacagccaatgacttcctttgttagcagtcagatcctggcaaatagcattacctgcacttgtccccatgggaagcaaacattctactctacatggagactggattataatctatgtgctgcaatgcactgtgcactgtctttcttataattggcctgtgttttctgtaggtagccatccaagtagccaaactcactaagtttgatccctttctctagtcctaaggagagtaagagagtatttgtttgacctgaagttctcactatcaatattgctcttagagggaggccaagacatttctgcagagtaacacatggaaacaggtattccagaagtatagggttccccccaccccccgccctttcttgttttggggggcaggatcttgctctgtcacccaggctggagtgcagtggaacaatcatggctcaatgcagcctcaaactcctgggctcaagcaatcctcctgcctcagtctctgggactacaagtgcatgctaccatgcctggctaattttttattttttgtagagacagggtctcactatgttgccctggcttgtctcaaactcgtgggcttaggtaatccttctacctcagccttccaaagtgctgggattacaggcataagccactgtgccttgcccagtggctttgtattccttctttcaaaaatggaatttaaaaacccaaattttgtgattgttctcatgcccttccctacaggagaggtgtcaccaccaaaagctttgtgggctgcatcaagaacctggaaatatccagatcaacctttgacttactcagaaattcctatggagtgagaaaaggctgtttactggaggtaggaaacattgttattaatgttcaaatgagtttccataagtgtccattgatttatcaacatcataacacaacaaaccagtggggatagaaaagagatgatggggaaatcagcagtgtcctccccacggaaggtttggccgcagctaggaactcaccatgctgttccatctcctctgtgtccagcccatccggagtgttagcttcctgaaaggcggctacattgaattgccacccaaatctttgtcaccagaatcagaatggctggtaacatttgccaccacgaacagcagtggcatcatcctggctgccctcggcggggatgtggagaagcggggtgatcgtgaggaagcacacgtggtgagtagggccagtgctcctgagccccaagctcaggaaattacttcgggaaacaatgagtggaaaatgactgactcataaacatttattgtcaccgtgttcctggttgtttatggatgtgcattttcaataagtaaaagttattgttgctgaatgtcatcccattatgaatcaatgatttctcatattgcataatccatcttcattgtctggtgactgaggaaaaagttatttgctgtctacctctaattttttaaaaactcattcagatagcatatacggagttttcttccccatgttgtggtcatttttcttcattccaaggccaacagcagtccttaaatcctgtcgaggtcttcagtctactgctggatgaagcaagactttctttatctattataggattgaaaggagcagcaagggaaatgtgggctgtgataagcacagtaaactaacagggggaaaggagagaaatgatgaccattttccttatttatgttccttttcaagagcataggtgatatttccccatcctctgctcaaatttgtgtctatcacataatttgaagagactttacagaatgttagcacactgtcttaatcaagttgagtccatgcagctaaaatctatagaatgccaccttgtactctgcagggtactttacagacattgctgtgtaattaatcacaaccatgctgcaaggggaatgctgcttcctacattttgctgaggaagaaatgtgctgagagagcctagtaaacctgaccaaggtcacaccactggtatgagtcacagtcaggactggaacacaagtttgcagaacccaaacatgtcacgacatacttggggaagggctgacagtgactacgactggttaatgagttccactgatctttttttttttttttgtagttgagctgaaattcatataacctaaaatcgaccatttcatagtgaacaattcagcagcgtttagtgcattcacaatgttacgaggccacctttcctatctagttgcaaacattttcatcactcaaaagcctatgccattaattagtcactccccattctcctctctccccactcctggcaaccaccaatttgctttccggctgtatagatggatttactattctggatattttgtacaaatggaatcatatgatgatgtcttgcatctttcacttagcatgtctttgaagttcatccccattggagcatggatcagtacttcattcctttttatggctgagtaatattccactgtatatacataccacagtgtgttcatcagttacttcatggatgaactttggggcatttctgccttttagctattatgaataaatgctgctatgaacatatgtggataagtatttgtttgagtccctgtcttcagttcttctgggtgtatacttaggagtggaatcactggttatatgataattctatgtttaactttttgaggaactgccaaacttcttctccattagtcttagtaaggttaccttcaaatcaaagtgtgcttactaagtcagcaaaaaggaatgatattagccattgctagcaagggtattgtgagatactcacgttccaattcttctagtgtataaactacctcttttcaatgtgtcgaaaaaaaattaaaagctttaaacattttcacatccttcaaatgtttaattctacttttcataatgttggaaacaacatcacaggcaaaacaattaaacattcacatgtatggtaataaaaagttggaaaatactttaaatttcattgataaaaagacaaattacaatatatctacttattggtatctaatgtagcaataaaccataaatatgaggcaatgcagaatggaaatgtttgaaatcttcagcaataatagcataatgcagaatataaattatatgaacagagattagaaagtaacatacaaaatgtaacattgtgacagctgaagagattcttaaggaattgctctactcacttgatgttaatcttctcacgttatcttcataagatgaaagttttctaaatcatatagtaatgtgttttgtctgggaaattctctatgcaacctccccagcccttcttttccgtcatgctgatcggaggcaacattgaggtacatgtcaatcctggggatgggacaggcctgagaaaagctctcctgcacgctcccacgggtacctgcagtgatggacaagcgcattccatctccttggtcaggaatcggaggtacttgcacgcggccaggcagtgtgtaatgaaggtgtggtgagctcagagggaatgtgggaggaaccttgcggtggtgccctgggcggctagatgactggggtcatcggcatccagacgattctagaaccttgctaggattctttcctgggaaccagtttcatctgctttgtaataagatacttgtagaatttttataattaaacaactttagctctgccctttactggggcccagcataaattgtctttacattggattgattctgtggcaaatagtagtacactattagtaaatagtattatatcaatagtaaatagcattatatcaacattcctgtatatttccctccaaaatatagactgaatgctttaaaagcacactgggcattttcatcataggtaaagaggttaaaaaaaaaagaaaaagaaaatctctccaaaaagcaatctcattcaatggatatttaataacattccattcgtttctgaaaaatcttcagttgtgagttttaattttcaagattcacctttttggtcacagacagtgtcttgttaaaatgaacctttagggaacttttattattcagtgagaacttgtgggaattatggactaaaatggaattattatttcattatgtttaaagcttttcatttattttctccattggtcttttagaattatcactgtccaattggatgagaacaatcctgtggaaatgaagttgggcacattagtagaaagcaggacgataaatgtgtccaatctgtacgtcgggggaattccagagggagaggggacgtcactgctcacaatgagaagatcgttccatggctgtatcaaaaacctgatcttcaatttggagtaagtgtacctgctctctgcatgttcttgcactttctgacctttcatggtgagtgctaacactaatctgaaatctcattgtactgtttgagattgaaaactttgcaaattcccaaataatgagtgaaccccattgttctatcatgtaagtctccccagatggattttattggattagaatgttagacagatctggtcatcatactttaaaaaccatcgctgaacattagctctctgtggctgtccataaagagccgggattttaatatatttttgacatgcatttgaaggaacatagggattttgtgatgtaagtctcttgctgtcctgagagcattgctttgaaggagctgtttactatggggctactagcagcttcaggttatcaatggcttccccaaaaacaattactgtataattaagaaccagaagcctttgggggtccaaggcaggcagatcatgaggtcaggagtttgagaccagcctggccaacatagtgaaaccccgtctctactaaaaatacaaaaaattagccgggtgtggtggcaggcacctgtaatcccagctactccggaggctgaggcaggagaatcacttgaacccgggaggcggaggtgcagtgagctgagattgcaccattgctgcactccagcctgggcgacagagtgagactctgtctcagaaaaaaaaagaactggaagcctccattccctgtgtggagctcatgatgaggaaaagaactgacatgtgcccatgagcagttcattcctccttgctcaccctctgcctctggacagggtgctgatgggacacaagctgtgctctgctctgtgggaccagcatctgcccaggaacacctggaagtgccctgggcatcaggaaattgaagctccctcctggctgggtcactgacttgtctagtgaccttggacaaagacttggatctttcatggtcacagtgtccttatctgtgaaattacctcttaggagtccctgaaatttgcaagaataaaacatagcgttgggtttgaatacaatcataatgtcagagctctggtttagatttttgcacaggtttatgtttattcccccagttgtctgttcattcattcattcattcattcattcattcatgaggcatcctcatgctcctgaaagtcatgggtttgtggactcggtagagcagaaacgtttctgtggagttcccagctgtgcccgggaaagtgccagggggacgtgcgcaggcacaggacacagcacaggagctgcagagtgaaagtgcatgtgacaagcgtagcccacaacctcctggcaaggggaagcacgtaaacaagaaatcagtgtttcgtggaggtcactgtgcagcgcttgggaactagagacaaaaacgtgtccctgaggcagcccagtcaaggctgcaggaggaggcgatggcatcggagctgacctggggggtgctcaggaatggccagggtctgacatggggatatgctaggctgggtgccattgcaagcagaagcttcagacaagaaatattaagatagcatgtttggactctgagtcacagtgaaggattggcactttggttactctaagagaaatatatacatggtttttaattgattttcattgtacagttatcagatgacttgggttcatggactggtttgtgatatcctaattttgaaaacactctcttgtttctacctagacttttggatttcaacagtgcagttggccatgagcaagtcgacctggacacctgctggctgtcagaaaggcctaagctggctcccgatgcagaggacagcaagctcttgccagagccccgggcttttccagtaggagcggcttcctttactatcagtcaggtccagtcagcaaaggagggcctaggacagagggagttaaaatggggccttgctgtaaaggtgcctgcgaaagctggagctggagctggagctggagctgtgctaaaaatcagagcggggacagggagggaaagggtgcctcaagcaactcagatgacacggcccaatccatagattgtaggccccaacacccaggccgcgcattgggctgatgtataatatgcttttggcagagcttctataaggactcattatcaatttacatttagccaggaaagcatgaaaataagtacttcatgtaaagccattgtgcacatatttgttgctttaaaaaaaaaaaaagattcaattcattaggaaaagccagttctggccaaatattttgaatggcagccattgctatttttcatgttctccccttttgctttctctgtttccctggtttaaagtgtgcactctaataatttagaagatggcagaagcattcaagagcaggaccttctgagcagggcgaggctttgagttcggggcagttttcatggtagcatctgcctgtgctgaagcagaaaacagcatctgggacccccatgacttgggcactcttaggacagcccgcagatggttgcgtggggttcaggggcccttcccgcctggctcctcttgtctgcatcctgccctgtcagtgtggacctaggttcacactctgaggccctgcaaaacatgtcacctgtgggcacctccagttttccagtgcctggtccgcagctcgtctcggcagctgcatccttagggccattcccaaaacctcgggtcacggcgggggcctagggggacagcaaggcctttgccccttaagcctgatgaaaatttgtaggagagacttcagtgtccttatgaatttcagtgaagccgagtgggattaaggtgacagacagaagctctaagtgctttcttcagggagataaagcgctggcgagtgcatcatttaaaccgaagatggagtgagcgccaacaggcactggtggttgttgctgttctaatgggattgcttcgtagatggcccttcatggcggaacacgcgtgtgtcagtggggttcgggctgcgggtggcggctgagtgtccctgtgtgtctcttacaggaacagtgtgtggtggatgcagctctggagtacgttcccggcgctcaccagtttggtctcacacaaaacagccatttcatcttgccttttaatcagtcggctgtcagaaagaagtaggtatcattctaacatccttatgcggcgtctcattgctagatgtatgggggtgttctgcagccacagagtcttttccaaaagaacctgcttttattttatgatgaagtgcttgatttgcaaccaaatggcaaagagaaggaattcagtgttggtgcaaatcacaacgctttcatggtggttcactggggagtctgtggtttctgccttttcccttctggagagtggctggcttcccctttctgtgtgcatgtaaggaagcgtgtgggcatctaaattaagtctcctggatctattattgtctggactttcaaccccattccactttaagcattccctagtctgatgtctttgtctacccaaactcttacactgtggtggccaaaatcccgagtgccacacccacccctctctgcaccttctggccctcatacctgcctgtccctgggacccttctgccaagggaagatctcaaggcctggagcttggggctcccggactccatgttgctcctctctcctcctgaggtcctccagctcacctgccaggcttgcctgcagtctctgccatgccctgcccgtcttgttgtcattggctgtgccaccctgtcatacccccttagacctgggctcctgtctgtcttctgcagctcctgccatcactctctgtgaattcaacagctgcctaacacctgacctttctgtgctcaaactgtgatctgtggaaggtctttccctgctccctcctcagccagcctcttccgtggccatacccttgacttcttcacaggtatccatccctctcacagtctcgactttaaaagcctcctattagcacacccctttcttcttgtctccactctgtgcctccccactcctgcagtttctcagctgcatggagacctctaagccgctagccctaatgccctcccaccactatctcccctcttctctagccccaaatcacaattcatcccccagataggttccaggccagtgttacaggtgtcctctgcaaaatcccctaaccctttctctctcccactcctgcgagcccaggtaaaagccaacattccgccttctctgtgccagaacccacacgggagaccaaggccaaggagatggatgtctccttcctagctggtttgagctggatatcatagccgtcaatctcagatggagcctccaaacgacatggggagccagtgcattgctctaatatgttcatggtttttattctccatgactacttcctcatagctgctcttagctcagagccctgtgcaccgcagtccctcttcccaccccagctgatgacttgcctcgttgagaagaaagagctccttcatccgtccaccaccaaaaagaccagcccctgcttttgttcctgaccctctatctcttctgctaccacagatgaagggtacttgttcctagcaaagcccacccagccagccccagcttgtcctctggatcccatccgccctctcctcctaggacatgcacagcagccactcctcacagaccagcacacagatgccgctgtcaccccatcgtcagcagtgacagcaagagcagcaaactattgtgctggaggttgacacaaagatttttacacagatgccctaatttactcctcataattctcctatgaggaaggaattgttattatctccatttaacagataaggagattgaggtatagggagcctgaggcatctgctcaaagtcacacagctggtaaatggtagagccgggattcgaacccaggccttctggctccagagtctgtgcctgtagagtagtttccccttctcctcgggggatacgttcaggacccccagtggttgcctgaaacctcggctagtacctaaacgtcatatacactgtgttttcctatgcatgcatatctatgataaagttgaatttataaattaggcacaggaagagattaacaataataataaaatagaagaattataacaatatgccagcatcactcctcttgtgcctcgagggcattattgagtaaaatcagggtgacctgaacacaagccccgctgtactgccacagtcgatctgcgaacctagacagctataaagtgaccaatgggcccatggctcctatggtgtggatccgctggacacgggcagacatggctcccatggcgtggatccgctggacacaggcagacatggctcccatggcgtggatccgctggacacaggcagacatggctcctatggtgtggatccactggacacaggcagacatggctcccatggcgtggatccgccggacacaggcagacatggctcccatggcgtggatccactggacacaggcagacatggctcctatggcgtggatccgccggacacaggcagacatggctcccatggtgtggatccactggacacaggcagacatggctcccatggcgtggatctgctggacacaggcagacatggctcccatggcgtggatccgctggacacaggcagacatggctcctatggcgtggatccactggacacgggcagacatggctcccatggtgtggatccactggacataggcagacatggctcccatggcgtgaatccactggacacagacaggattcactttctgggcaggaccgagtgggatggcatgagatctcatcacgctactcagagtgatgcccaatttaaaacttatgtattatttatttccagaacttcccatttagtattttcagacctcagttgactgcaggtaactgaaacctcaaaaagtgaaaccttggaaggcaaaaccgcaaataagaagggactgctgtaacctctgtgctgcactccctctctcactttgacttctaaagcagaaccccccaggagacgtcacattcccccgcacacacatgcacagtacctggctctgtttcccagcaaggctcttgaaagagctgccctttcctcagggactgtttcctcgtttaaccatccggtcagcctcccgcacacccccagctgctcttgagagagttactcgagacccctgtgcagctacatggtgcggagccccctgcactgggctctcagcagcccctggacttccttggctgtcacagatgcacactctcctagttccctgctctctctcggcccgccttcctcagtctcccagctgagagtgctgggcccttccacacgctctcccaggatggccttctatgttccgatcaccttaaaatgccacctagatatggcagaacctacctgtgtagctctggcctccacttagaactcaggatttgtgggcccaccagccactcgagatctgcatgtggactgggacaggttcctcagccactcaacatctctgtgtggcctgggacagtctcctgggcctcatcaccccgaatggaattcgcaggcttccctcagtcctgctctcctgctctttgccgttgccgcgggcacaatcaccattcacctggttgcccaaggcccaagcctaggggctatttttcatttcactttttctcactctccaaatccagtccattggcaaatcctgttgcttcttcctccagaacgtttcctgaatctgttctgagtccccaccgccaccctggtctaagccacccgactccctcccgttggctgtcgtaacagctgcctgatgggacccgcttcacccctgaccccctgacctgttcttcagtttagacagaggatctcttaaaggaattctcggccactccccctttcaaagccctcctgtgacttcccactgtgccgaaaatccaaacaccctcaaagcccctcctccctatgttggagccacatctgccctggtgctgtccctgggtggtccagtgacaccgtggtccctctgacagggcctacccaggcgcagccttcctccacacctgcagtaactctggttcccccacggcctcaggtgggcttcctgatgtcccctgccatcaagctctcactttgcaggggcttgcccctttctgtcattcagacctcagctgagatatcagctttgcagagttacccgcgttgaatgcttaaggtagccactggttggcctctacaggacccactttactgtctgatgtgtttctgtattagtttcatgagcaaagggatcttcctctttgttcacagctttatcctcatcctgaaacagttcccggcagacagaggtaggcactaataactcattatatgaatggatgtgtaaatggatgaaggaatgaatacccctctctcctgagatgttcaatgtaaacgctgaaacaattgttgggtcctcttttgaggttttaaaaatgaaaagtaaaagtttcctttctcaacgctgagcacttgttttccccaggctctcggttgagctaagcatccgcacgttcgcctccagcggcctgatttactacatggctcatcagaaccaagcagactacgctgtgctccagctgcacgggggccgcctccacttcatgtttgaccttggcaaaggcagaacaaaggtctctcaccctgcactgctcagtgatggcaagtggcacacggtacgatctcaggaggcttgtggtggctgcttctgagttctgttccatctatcactcgggttcactccatttctcaaaggcacattatccccattaatctctatctcgccgtgtgtgtctggtgtctcccccagagactacaagtcttgaaggcagggatcttttctgcttccgaaatatccccagggccttgcttagtacctgacgtgaaatagacattcagcaaacattggcgggatgaacaaaaggtactagacatgttcttgacttggcaaggagtatgtaaagcctagcctcccctcatggcatttgctttctgataaccggaactctggagcactttctggtgtgcagcacgctttacctgtgcctgtaatcggccagctgggttgttcttgtccactgcccagaaaagcaaatgcactaagagtggcaggttttgcagcaaagaaagagtttaattattgcataggcaacttgccaggagataattctcaaagccgcctccccaagaattcaaggactagggttaaaacctcgtgtaaacaaggatagtttggcagccgggggataaggaatggcaaatgctgattgattggattggggaagaaatcacagggggtcgaagttgtcttcttgtgctgagccagttcctgggtaggggttactgctctgggtggtgccatttggttcatactgaatgcaaagtctgaaaaatatctcaaatgccagtcctaggttttacaatagcaatgttatctatatggggcaattggagaaggtataacacttaacgactattggctacgtgattcctaagcaataagtagtttaaaagggcaaagtataaacaatgactggttagagtttatgcctacatcttagcaggagaaacaatggctggttagagtttatgcctgtatcttagcagaattcaggcccctatcacaattccaaccttgtggcatttccttaattttacaaaggcgattttggtccctgagcaaggagggagttagttttggggagggactgttaaccatctttgttttaaactgtcaactaaattcctcccatttcgggaagggactgttatcatctttgatttaaagttaaactatccactaaattcctcccatttccagaagggactgttatcatctttgttttaaactatcaactaaattcctcccatagctaggttgaattagcaaagacagcttatgaggttagaagcaagatagagtcagttatgtcagattcctcttgctgtcatttttctatgtcagatttctttcactgttacagtttttgcaaaggcagtttcatacctgcctcctttcttctgccaggctcatccacttttcgtcaccaactgtctaaaaatttgaaccttcctttagcattgcattcaggttgttatagctctcagaaacagatgttgcatctgttaaagtttatacatctgttaaaagttttttcagattcctcaaaaattatgcatgttttcactttgctgtaggtcaagacagactatgttaaaagaaaaggcttcataactgtcgacggccgagagtctcccatggtgactgtggtgggagatggaaccatgctggatgtggagggtttgttctacctaggaggcctgccctcccagtaccaggccaggaaaattggaaatgtaagcagcattttccatactgacattttaccttcgttgtgttcgtgtttattttgtagaagagcatacctcacggcatctttatgtttaaattaccttgtttgaacctggggcttgtgaagaggtttactttgcaggcatgtccacagatcgtgtgccagggccgcccctcagaacccgatcagtctttccagcctgttagttaatgaacatctccctttccgcagccacgtggccacagcacaattcagggaagcccagcaaatgcatattcgcacattagtaaactcagcattttttgatttccacaatatttcactaaaataatagaaaacacttccactgcattattagcaaagatactcaaatggtagctctaacttagacattcatgtgaagtattgtggcaattaaagttttaaaacaaaaagattacattttaatgtgttttgctgagaccagtctgatgaagtggaaggaaaatgtgtccaaacccttcccattagaatcaccactgtctactcttgcatgtcatttggcttagatcacccacagcatccctgcctgcattggggatgtgacggttaacagcaaacagctggacaaggacagcccggtgtctgccttcacggtgaacaggtgctacgcagtggcccaggaaggaacatactttgacggaagcggatatgcagctcttggtatgtgttagcaacactctcgaaggcagtccccgaatgagtctgtactctaaagcgatgtggatccaagagtataagacaggacccactggacaaggctgcaggaaaaccacattgagtttagtattccagttgattcctaatttcttggcgtaaaaagccttctcaggtcttgtgctatctggatggcctgacaaagtctcccccaaggagtggtgtgactcctgacagaggccagacatggggtgctagtttcatctatagtttccccaggttctgtaatgcacacttactgtccaagttaagaaagggctttgaattaaaaatcagcagcataaaatgtctagaccagctggcgccagggaggctgtgcagaagtttgggtggggaagagggggaagccagcagaacatctctcgttcactctgtgcttcctttctcctgttcctggggctcaggctccagccctgctgggcagccccctccatggcctcagctccccttgcaccccccagctctgggcataccatcttctccccttttcccttcagccctgggcatggtaacaactgcctgctgttgtcaatagccccacccagtgtggctcctcggcttttttatcacctgaattaaaaaagcattccattcaatccccacctttaacaaacttagtatggactctgatacactcagtaaatgatgattcccacaagtacacagatactaggaaaataaagtggactattctcggatgatgataaagggattccagggatcaaatcccaacagcccacgggaaagactgccgcagggaggacgtgtccacagggtgaggcagggccacgtgcttctgtggccacagatgaaggaggtgcctggctctgctctgacctggctgactgcatgcgtcttctttaaaagctccacgtcatctcccagatgtggaagccgaggctcagagggcaggagtgacctgctggtggggatgcagctggatccaaaggaggagctagagccaggtcccccaacccctagccaggaggccaaatgctcaacctgggcctggcagcgctcaccctgacttgggtcctccttgtgtgttacagtcaaagagggctacaaagtccagtcagatgtgaacatcacactggagtttcgaacctcctcgcagaatggcgtcctcctggggatcagcactgccaaagtggatgccattggactagagcttgtggacggcaaggtgggtgcttcctctccatgagggtcttcctccccccagtgtcagagacagagcaattgagaaacagcagattcaaattcacaactatctattttcatggagtcaaacaatggtcccattactattttaaaaacagatattgctacaagaaaacctttttggtttattttttaaaagcttttcaaaaataactttttatatgtttgaaagtaagctttcagcaaaattacaactataatacaaagaactttttttcctgaaccatctgagaataagctgctgacctgatgccctatcccttctaataattttttttaactttttatttggaaattattacagattcataggaagttgcaatgaaatgtacagggagggccccatgcaccattcacccagacccaggtttcccagtggtagcactatgcattttttttctttttgagacggagtttcgctcttgttgcccaagctagagtgcaatggtgcaatctcagctcactgcaacctctgcctcccaggtccaagtgattctcctgcctcagcctcctgagtagctgggattacaggcgtgcaccaccacacccggctaatttttgtattttttagtagagaccaggtttcaccatgttggtcaggctgttctcgaactcctgacctcgtgatccgcccgcctcgcctcccaaagtgctgggattacaaacattatgcatttttctagcacaatcaagatacttaattgtatcaatactacaaggctcccccttaataccccatcatggccacacccaactcctgtacccctaatcctaggcaaccactaatctgtttgctgtccctctaatttctgttttgccagtgttatataaatgaaataacgcagtaggtatccttatgagatcagcttttcacactcagcctgatcttgggaaggtcatctgggtggttgtgcatatcaacagtccgttcccttttgtggtggcgtattactctgtgggatagacgtaccatgctataatttttttttaatgtagaacatgttatttttttctgtgactgttctgcccttgcttttcagcctctcatgtccctctcctgctggcaacaaaatgaactccacaatttgcagtactagtcctttagtctcctgcttgaaaaccgcctccttcacagtttctcccagttctcacttcccttcctctcccctttggggctgtctgggcgcaggcaggatgcggggaagggagtctcgatggcccttttcctttctgtgggctctctagtggacagcagctgagccatagccatatcgtggtcttcagggcagcctcttacagtgagtggtctggggtctcagtgttgcccctgcatgggggctgctcctggagagtttggccagcgtccatttcagctcaggcttctcatcctggttgtcatgagtagtgccacctcttcatcttcccgcttccccgtggggtcatgtgcaaacttggggatttctgccaagccacacagaggccatggggaatcagggatggtgtctctctggtcctctctctacctaactacattttaccagcatttctgcagcactgtggtcaatgtttgttgttgtgggagtaagatgcctgaattttccaacactagtgcctcttggaaggcaaggaaaaagtctccatgttctagattccccaggacttaccggttgtttctggtatttccctacttactccccgctgggttttgacccctaggatatcctagagtgggggtggggaggatctgaaaggtcatgtctgaccttttgcccttcacctcttttccgattcatgacaaaccagaactaacttgatgtcatattgctgcctctctacactgacttacagccaactttttccctcatctatactttaaaaacttttgtatctatttgcatgtttttatgtgacatctaaaaaatgttaccagggccagatatggtggctaacacctgtaatcccaaaaccttgggaggctgaggcaggaggattgcttgagcccaggagtttgagaccagccagggcaacatagcgacaccccatctctatttttgaaaaatattttatttagataaataaaaaattaggaatgcaatcagaagtgtaattgctgcaaacaatgtaattttctgttgtattatacattttacttcttattggattattatgcatagttcttttttaacatttttagttgttacctaagggtttatgacatatccttaattgtcacagtccacctagaaataatactgagcagtttcatatatagcataagaatcttcaaaaagtacatttgaaattctttcctcctgtcttagtctgcttggggtgccagaacaaagtaccacagactgtgtggcttaaacaatggaaatttattttcttgccactctagagactagaagtccgagatcaatgtgttagtaaggttctttattctgaggcctgtctctttgacttacagatgcctcgttctccctgtgttctcacatggtcttccctctgtgcatgtctgtgtcctaatctcttcttataaagacacagtcagattggatgagggccaccctagtcactcatctttacttaattacctctttaaaagctccatcttcaaatacaatcacattctgaggtactgggggttaggacttcagcatatgaattttggagggcggtcttcagcccataacacctcctatcctttgcaaagctgagatctctttacttgctgtgggagagcatctacagttcatcagaagagagttagtaaatattcgctcataggtgctatcaataggtatgaccgggccaggtgcggtggctcacacctgtaatcccggcactttgggaggccgaggtgggcaaatcacctgaggtcaggaattcaagaccagcctggccaacatggtgaaaccctgtctctactaaaaatacaaaaattagctgggcatggtggtggatgcctgtaatcccagctatgcgggaggctgaggcaaaagaatcacttgaacccaggaggtggagtttgcagtaagccaagaccgcgccactgcactccagcctggacaacaggagcgaagctccatctcaaagaaaaaaaatgaaagtatgaccagcacctccagtaaggctattagctcctaaaatgtcctaaaattgaggccctcatttaaggatgcagtgtgctcagacttgtggtcatgaaggtggccatttgcgctttctggaatttggggactagtataacatctgaatcttttttttttttttttttttttgagatggagtttcgctcttgttgcccaggctggagtgcaatggtacgatcttggctcaccgcaacctctgcctcctaggtttaagcgattttcctgcctcagcctcctgagttgctgggattacaggcatgcgcctagctaatttttttgtgtttttagtagagacagggtttctccatgttgctcaggctggtctcgaattcctgacctcaggtgatccgcctgcctcggcctcctaaaatgccaggattacaggtgtgagccaccatgcccagccatcatctgaatcctttaaaaggttacttttcaaaactattttctgtttctcctagttagctctccttttaaacataatgctgcaattttatctactccaagagcttatacaaatggactgtgttccttaaatacacaaaaactcaccaagatatttgcttttaggtcttgttccatgtcaacaatggtgctggcaggataacagctgcatatgagcccaaaaccgccactgtgctctgtgatggaaaatggcacactcttcaagctaacaaaagcaaacaccgtatcactctgattgttgacgggaacgcagttggcgctgaaagtccacacacccagtctacctcagtggacaccaacaatcccatttatgttggtggctatcctggtatgtacgggtacctgctcttccactcaaaaggggcactgtccctggaggaagtcttggttcaggtggatgtagaatagggattgagaaaggtacatggtttgggtgacaaatcctttaccattttagaaaggctatttcaaatatctaagaattcttggataacttaaaataatctacatacacaagttaatcattgggtaagactgtgagaacattgggtctgatataaaggcagccgtatgactctaccgaagtaaatttcatgactgtcagacttgggagtcattttagggctagggaatcgttttaggaaacaaacttgtgactcatctctctggtcaattttggattagaattatgtattttagatgttccaaggaattgttgcaaataataaacacctgttgtatgactttttttaagttataactatgccttaaaattttatatattaaaagtttttggccaggtgcggtggcttacacctataatcccggcactttgggaggccaaggtgggtggatcacttgaggtcaggagtttgagaccagcctggccaacatggtgaaaccctctctctactaaaaatacaaaaataagctggacgtggtgacgggtgcctgtaaccccagctactcgggaggctgagacaggagaatcacttgaacccgggaggcagaggttgcagtgagccgagatcgcgccactgcactccagcctaggtggcagagcgagactccatctcaaaaaaaaaaaagttttctctgaattctgctagtcactgacaccacatatgtggaagatattctcctaattttgatagtgaaaaatttaaaaaataaaaaaacccgcttgagattatttctgttgcttttgtgctatggatcgcatttcaacaaaattaagcaagatttgtcttctcttctttcctgaacagctggtgtgaagcaaaaatgcctgcgcagccagacctcgttccgcgggtgtttgaggaagctagctctgattaagagcccgcaggtgcagtcctttgacttcagcagagcgttcgaactgcacggagttttccttcattcctgtcctgggaccgagtcctgaacttcaagcagaatcctcagttggaatcattgctaatattttgaggagaagtgtatgtgtgaattaagaatctcttcagttcatatttcatttccaactcaggttaagtgtttctggggagagatgttgtgtttacgttacactaaaaccacatgtgcaacaaatacctccattaaatggtctaaaatgtaaattgaattccctggctctctttttaaacgtatttttaaaaaaatctttatacacattgaatgttctgttgattacttgatagtattttatgtttttcattttgagctttttaaaaaagtatcaatacagatgataacagatca

SEQ ID NO: 674 - DNA, 58509 bp, Homo sapiens
gcaggaagacggcgctgcccggaggagcggggcgggcgggcgcgcgggggagcgggcggcgggcgggagccaggcccgggcgggggcgggggcggcggggccagaagaggcggcgggccgcgctccggccggtctgcggcgttggccttggcggcggcggtggagaagatgctgcagtccctggccggcagctcgtgcgtgcgcctggtggagcggcaccgctcggcctggtgcttcggcttcctggtgctgggctacttgctctacctggtcttcggcgcagtggtcttctcctcggtggagctgccctatgaggacctgctgcgccaggagctgcgcaagctgaagcgacgcttcttggaggagcacgagtgcctgtctgagcagcagctggagcagttcctgggccgggtgctggaggccagcaactacggcgtgtcggtgctcagcaacgcctcgggcaactggaactgggacttcacctccgcgctcttcttcgccagcaccgtgctctccaccacaggtagggtatcctgcgcgccccctggccgccccggccacctcgcccacaacccacacaccccggccccggcgccccgggcccctctaaccctcccaccccaccccccacctttcgccatcccggctcctccagcccgcctcccctcactgtcctcccgaccctccgaccttccccttactggcgtccccggcctctgcctgggtgactcgggagggcaagccctgcggagccggaagccagagaggtgactccagacgtgacttggttgttgccgtccgtaactctggggaagtggtccctaacttcggcctgggtggctgcaggtgcttcctccccttgagttcttttttcgcaacccactaagccaaactgtcgggtttgaatgtgtagcagcacctggccgccgtgcggcaaggcagcgggatgatggaaactcaccaccttcctcccgcacccatcccagaggccgaggctgcagtctggtaataataccttctaaagggtcaccttccggagtgtgccgtccctttggaccatgcacagatattccagctcttttgtaccttggaggcagttttgggggtagccgagtgacatcactctgctcttcccaggtgacctctgggcggacaggccgatccggtttcttttcagagtaggaggaagggtgagggagagtaaaggaaccataggattgcctaagatctgacttaattggggcaccctgattcagcagttccttcaacttgaggtgtgcgaggctccccataaacttcgaagcgccacgtccccgtacgactcacccgcggggcgcccggccatggaggagcctcctcaggtgaaagatgaggccgggcgcatgccccagggctcggtcactgtgccagatcagatgaatgaaggccgaatttccccagccggacctagtaaggcacatacccagagtggagatatcaattggtatttggacagtgggaggaatctgaaagagcgttcagcacagtcccttcttttgatctatgagatccaatctttgaaataatccatctcgtcatgcacaaggtcacacacttcctagttaccagtgtcgtcctggaacctgggccttgtgatttctctgccaggaccactttgtaaccccccaccctcaacctttacaggtgaatcacatccctttgtgtgactcccaactcttccttcctccccacccccctccaccacccaaattattgtgtataattccctttgggctatatcttgttgactatcttggtaattacttggtaatgagtaataatacactattcatgtagatcacatgaaacaattattcagaggtctggggtgaattactaaactgatgtaaatctaccctgaaataaacagaagtggaattctagcttgtattgtgagatctaaaaaactgttaaatgtagcgctagacaagacagacctgttatctcactttccaaagaatgcctgttcccttgccaatacaatttaatttttctttccataactctgcctccattgtctttacctagtcctctgttcctcagatcatttaggagtcaccatgcctttcctttggagtatatttgtgctatattgagagtcattcattcttcccagaagtaagtgtttccatggggctacagaaagtttacaactgggtcacaatgttgggtaaacatttcgaaggatgcttatagcgtgtggtgttttcttactaatgatattgtgaggatagaacaagaataagaacagttttgaggaaaaaggtttgcttttatctgggtgggatttttcgtgactcatgtatagtcttaacatcatattgtctaattaaatgttaaaaattagtttataatcttgaatagatgaaatattcttcccagaggagaattagaaaaagggatagtttctgtttaagaaaggggtggggtgggaatagacgtcttattattggtattcagattgctttgtagttcctaagaaagtctgtattcatgcaaaacaagtgttcatttaagaaatcagtgcaaggggcacttaaggataaactaaatgaaaaaggtgcctcttggtttgtaaagttagcacatcaatgaattcttgttatatgaatacaactattctaaatgaaaagtactcttctgttggctttgtactgccccattatttgacacatttgatatttcttaaggtttcaaaattataattacccattatttgattcatttgatgttttttaaagtcttcaaattatcataggtgccctggccatgaatcttataatgggtgagaaatcttttcttccctacaaggggaaataaagagatgttaaattgtgtgctggaaacaaacaatattttaaatcacttgctggaagcagacaattttttagagtaaagctgatgtgcttcattactaggaaaatattttctggaaaagcgccaaccaaataaaatgagttgcaatcgcttttcgttttttgggtggatattagacatgttgtgctttttttttttcttttcttaacacttctagtccttttgaaggcaaatcactgagataattgttacctaattaatcagtacagtcaatccttgacttattcagaatgctaacaatgagcattacaaagatgctgttattggtagtcattgttgtaacacaggcccatgagtgcttttatgtcagaatcttctcaccccagaatgtacaaacttccgtttctggaaggaactgagtaaagtcttcatggtctacttggaagaaggcttaggttggtaattcagcaatagtcttctcattctgtgctttgccaaagactctgaattatttccagcaaacaatttaacatctctttatttccctttgtaggaaagaaaagatttctcacccatcataaggttcatggccggggaacttataataaaatgcaaattaacaagataaaagcacacacatttagttaatataagttttagatgacatagacgcctttagaaatgaagaccccaagaaacagggaagtttatgtatttttaggacagttgtgtagacgaatgattggagaacaaaaggatatgatctgactgagcacggtggctcacacaggtactcccagcattttgggaggccagggtggaaggattgctggagctcaggagttcaagactgcagtgagctatgattgcaccattgcactctagcctaggcaacagagtgagacctcatctctactaaaagttaacaaaattagcccggagtgatggcgtgtgcctgtagtcccagctacctagaaggctgaggcattgagtctaggagtttgaggctgcagtgagctgtgattgagccactgtgttccagcctggacaacagagcaagactctgtcttggagggggaaaaaaaaagaacaaagaggatatgatctaaaaagctaaataactggaggaatttagcaaggcctatttgttcagatttttcttggaatctctgtgtcttcaaagatagagcattccttttctcaggatataggatgggctcccttgtaatgagggtcttcttcaaaggaagggcagagcttcagggaagaaggttaagaggaaggcgagaatgatcttcctgcttctgctgttttctcaaatgctaaggtgccctgtttgggggtcgcatgccctgaactccatcacccttcattctaaaagatacggcaacatctgcataggaatcttatgagaatgagtgaaacactgcaatacagttttgagcttttcagaaagaagagttgtatacaaaaaaaaaggaggtattatagactgcagaatttcccacagaacttctatactgtgttttttttttttccccaaggattgaggaaataatgtccaggtgatatttggggagtaagaaataattattaaactttggtagccatctaaaactttggacagtgtcgttcattcttaagaacaatttgtgatgttgatttactaaagtttacttctttattcattccccaaagcaaggccatgttatgatgacaactgttgggtaaaaatacagtttttgcccaggcgcggtggctcacgcctgtaatcccagcactttgggaggccgaggcaggcagatcacgaggtcaagagatcaagaccatcctggccaacatggtgaaaccccatctctattaaaaatgcaaaaaatagcttggtgtgttcgcatgcacctgtagttccagctactcaggaggctgaggtgggagaatggcttgaacccgggaggcggaggttgcagtgagccaagattgcaccactgtactccagcctggcgacagagcaagactccatctcaaaaaaacaaagaaacataaaaacaaaacaaaacaaaaaataatttttgtattcatgcagtatacaaacttttagtaccttttgctgctttgtaaatgtgggatccatgtgacagctcagttcctgttcctttttgtttatttttattttttggagatagggtctcgctctctcactcagtctggagtgcagtgacactatcgtgggtcacttcagcctctaactcctgggcttagttgatcctcccacttcagcctcctgaggagctgggactacaggcgcacaccaccgcacctggccaatttttttttcatttttctttggagagcgtggtcttgctttgttgcctgggttggtctcaaacttgttgccttaagctgtctcccacctcagcctctcaaagtgctgggattacaggcatgagccaccatgcctggcccctgttcctgccattggtaaccctggtgcctttagccaggatgctgctttatccctatttatgaagagatgcattgaaactctagttaaagtgttcagtaagtgaacttaattgggcttggtgtacagtggcttttgattaaggcaggtagggagctgctacaacataggtagttttcaaataaagaagatgggaagaggcagtgggggatgctggactgatccttagttgtcaaattattttcagtagtacaaatgtgttgttaccatcaacaaatacttgttgcgcttttagaatagagtgaagtgggccagacacggtggcttatgcctgtaatcccagcactttgggaagccgaggcaggtggatcacgcagtcaggagttcaagaccagcctggccaacacggtgaaaccccatctgtactaaaaataccaaaattagccaggcgtggtggtgcacacctgtaatcccagctactcgggaggctaaggcaggagaattgcttgaacctgggaggtggagattgcagtgagccaagatcacgccactgcacaccaacctgggcagcagagcgagactcctccgtctaagcgaggggggcgggggggcgggggggcaggggggtgaagagtagaacgaagtgggcgaactagggcccctggacctaatctagcccaccacctgtttttgtactgcctgagctaagaatggctttatattttcaaatggttgggacaaaaaaaaagaaaaagaaaaagaatgttttctgacacagtcaagttttatgaaaatcaaatttcattgtccataaacacagttttattggtgtgcagccacacctgtttgcttctgtatcatttatgactgcttagcggctaaggtggcagagttgaatagttgaacagaaaccatgtggccacaaaacctaaaatatttactgtctcacaaaaaaagtttgctgacatctgcttcagaatgatacttgaaaggtacgctaagagtattctgaatatttcactttcttctgggaaactttgtgtaagaaagttcagcttctcagacttctttgtgctgttgttctaagtggtatgcaacattgaataaattatgtatcaccaccaaccactttcaaaacaaatgtttatttcagatgccacttacttgtgatccaatttgtgtcactgctttttttttcctttaatgatgacagtctacacttcacattgtgattatcttatctaaaatgtgcaataaatactaaattatatctactatagaatttacataaaattaaacaagcaaactctgtattagccagaagagagatccaaaatcccatattctgatgtttgtgctctgtattcacaggtcttgattttgagcctttacatttaattctagaagttttaattatctggttttcaagcctataatataagaaattacagagggaaaggcacagctatggggaaatagacatggcaggttataaaaagataaatagttaaaaaattccaaactaaaattttattttaaaataacatctttattgaaccctttatatgtgccaggcaatgtttacacatattcatttccatgcattgcaataaactgatgagatataggtatcattgtcttcactttacagaggatgaaacggaaattaataggttgaacaacttctctacttaggtcccaaagccggaagtgacatggtcttaatttgaatgcagttatgtctaagaacctgagctttaatagcatctgggcatcagaccttgttatgggccaaatcgtctccctcaagttcttatgtcgaagttctaccctcagtatttcaaaatgtgactgtatttatagataacatctttaaggaggtgattaagataaaatgaggccacagtgagaaggtggccatctgcaagccaagagaggcctcagaagaaatgaagcttgcagacacattgatcttgaacttgaagcctccagaactttgagaaaataaatttctgttgtttaagccacccactggtgatattttgttaaggcagccctagcaaactaatatagaggtacatgatagtttttatttagttgcacaaaacccatacaaatagtggaggacaagagacagaatcttttaagtctttagtcttgcaacgaacaattttatatacctgaatgggatgtcattgttttagagcgcaatatagtaatccacgtccttgaatcatcaagaaaaatatctcaacatgtttctacttaagaaggcagggaagtgtataataaattctagaaacatttccacccaataatggtcaaagagaagagattcttagtgtttaaatctgtgaactcatacctgtctataaaacataccagtttttagtattttgaaggtttggggtttttttttaactataaatttgttattatctatgcctattttatagcccctggaagatactgctactattatcaataacgtggaagaaatgatgtctttccttttatgacataactgtgagtcctatcaaggacagaatctttgattgaaccagtatcctaagggaactctggtgctctcagaacaagctattttatgacattgctcattggagtgttactgtgtgtgactgtcattttatagcccccggaagatactgctactattatcaataacttggaagaaatgatgtctcttcttttatgacataactgtaagtcctatcaagaacagaatctttgattgaagcagtaacctattgggaactccggtgctttgagaacaagttgttttatgacattgctcattggactgttgctgtgtgtgagtgtctattgtctttggagcatgtgaattgccgacactcaattgttttgacccataaaaatggcaattccagaaggttcagtttactacaaggttggtttcagggacagaaatctcatctgcctcatatactctgacatactcagagttgcacctgctggcttttattctccaaagacatcttccaattgtattattgacaaatccgtgaaatactaaggtgctgaagttctccattgactgtgtcatgcccaggtggcttattcaaggcaggagataaaggttgtcactttattggaaagcaagcaacttttgaggtgttttattgactcctgtgatacttctatctcctagactcagtctgtactctgactttctttgtttcttttgcatggatcccttattttttgttcaatccccaaagttggtggcccactctctgtcagcagcatattgcaaggtgatgcccccgatctgaggctgaatggaggaagaaagagaatagggagttggagatgtagagtttgtgcacctgaaaggactgtgggattgtctccttgaacttgagtcagatcagaagggcttatctgtgactttctactggttttcatgtttgccttctttaatttggaaaacagctgattgttatattgatgagattaatttgcttaggttagacatgggagtgtttttaatttgctaccgtctgcttgatcccagatcagagtctaactttttgcattagctcctctgactgggattgaccaactttgtgaaataaaagcctgcccgctgctgcctctgagactcagttattagtacccatggaagggctttaggcagaaagctctcagggaactcagagagagtcggtgaaatcatggctgatgcattcagaggacagaaagccaggcacagagtgttaaatacaacattttctcacccatatgtggaagctaaaaaaagttaatctcaaacagtttttctaatgcactaacttctgggattatcttttcaaaaagaaacaatggaagataatgaaaacaaatggaaatggttagcaagaaaaaaaaaaggttggctttatagaagtgaaaagtaaatggagcatactagcatctgggaagggtacggggaggggggatggggagagatttgttacaggatacaaaattacagctagataggaggaataagttctggttgtctataccactgtagaatgactatagttaacagtaatatatagtttcaagtcactaaaagaaaggtattaaatgttcccaacacaaagaaatgataaacatttgagatgatggatatggtaattaccctgatgtgatcactgtacattatgtgtattgaggtatcactgtgtacctcataaatacgtaaaattattacgtgtcagttttaaaaagaagaaagaaaccttttgttttttgttattgagacggagtctcgctctgtcacccaggctggagtgcagtggcgtgatctcagatcgctgcaacctccacctcccaggttcgagtgattctcctgcctcagcctcctgagtaactgggaccacaggcgcatgccaccatgcccggctaacttttgtatttttagtagggacagggttttgccatgttggttgccatgctggtcttgaactcctggcctcaggtgatccacctcagcctcccaaagtgctgggattacaggtagcgtgagccaccgcaccttgccaaaaaagctttctttaaaaaaaagaaagtaaacctgaaactattcaagtcaaaaaacaaaacaaaagcaggtagaatgtttctaagggatttagagagagtaaaacatgttaggtttcatttctctgagtatgatcaatagagttggagttggaggctccagttgtttacggtcatctcttgttatgtggggggctctgtgacctgagttaagctatttactcaagtcgatgccccagttccctattcactctgcttcactgaagcctcttggggcttatttagacaatggtttcatcatttcgtctgaatagagtctgaagagtctttggtggaagtatgcactgaggagggaggcggcagaagtgccctatcccaggaaagtgtgctccccaggatgcgctgagccaggcacacacaggacttggggctactgagaagcaggttcttttcaagttctgttgtcccagacacctcctccatttcttcccgctctttctccacagcacttagctttctacctgctggttcccgtaacatctgtcttcacctggcctcacctatcttcacctggcctcacctgtcttcacctggcctcacctggcacctggttcccatagcacctctcttggcctcacttggcatccctagcactcaacaggtgctcaaaaggagcaacttaaggcacatttcttcatatgtctgaatctgtgccttttctgaaaaatgaagaaggttctaaagatgttacttctattcaagagaccttagatataactttattctcttgatgaggaaacagaggcctgcattgccaaaatgggttttgaagctattcatataaaaacaatgatatctggggggcctcatgtgtactcggtgcaccacaaaaggccctaagtgatataaagagaagagaggcattcattcctctctgagtatttgtggagcactttggttactaggtgctactccaggcacttagggatatgtcagggaacaaaaccacaaaaatcacttttgccctcctggatgtgtcagtctgggttgggatcggagatacaattgtaggggccaagagaaaacttctccttcaccctctgaagtttcactgaaaatcacctgataaaaggcagattaataggagaaaaggcatatacagttgcttgaccatagtttatgtgacatgggagccttcagaatgaagacccaaaaacacaggggaaaccattcacttttatgcttaggttcaacaaagtataaacaggtgtgtaaaaaataggattggaccaaaagggaatgatctaaatcttataagaccaagcggggaagcccagcaaggcctgtctggaatcttctcggcctctctgagcatgtattccttccttctgggtgtggggcagcaccctctctggaatggggattcttatgacctacagtcaaacaagatgggtcatataatttcattggccagttttacatagaaaggtggaggaaaagttttatggttttatggctggctttggggaaatggggttctggtctctaggatccaccttggggaagaggtattccagattttatggctagcctgggggaggatgaggggtgagagataggagggcaggagaaggtcggagaaaaacttttgcttctgggaccttgattttgggttatcattttctgagctccagcatgaacaaagagataactaagggaaatgcacaggatgttaggtggtgataggtgctcaggaacaacaatgcagagcaaaggagatggggagtgtgtgattagtgtatggtgaagggggcagagtccaggatcgtagtcttccataaagttgcccgtgaaagccttactgagaagatggcacttacgtaaagagtgagaggaggtggggagtgccttatgcagttttctggggagctgtgttccagaacaaaggcacctattggaggtgcagctagaaagtgactgtggctggagctgagtaagaggggagtgatgaggtcaggaagaaggggagggagcagatgctgtaggatgtcctaggccactgcaaaacatctggcttttatctgagctaggggaaaagcaccaggagattttgagcaaagggttgacacaatctgactgactgttccaacgcgttcactctggctggtgtaggagggcaaggctgaggctgagactaaaaggaggctcttctgatgacccagggggtcatcggaccaccgatgcctctcggtgactcagaaaagtggtgatgagaagtggtcagattctggattcatattgttggccaaaccatctggctttgctgatggattggatgtgaggggtaaaagaaagaagagtgaagaatgacccccgggtttctgacctgagcccctggcaatgtggttcttctttacagaccaaaggaaggccatggaaggagaaggtgttggataaagaatctcaagcaggttccagaacctgctgaacttgagatcccttttgggtgtccaggaggatctatctacacaaggcacacagtaaaccctaatggggcgtgatgagggccacactcggagtgtaggtgacagtgccttctgttggtacagcatgccgtgatgtcatgttgtatcacacacatcgattaactcactgcagaggctgaagaaggcttttgggggtgatatctgattttgaccttgaaggaaaactagaatgtcagtaagtagaaaagaaagaagaggtcattcagactgagaatgtgagttccctgggctgatctgccatttaatgaatacatttaacaacagcgttaaatacttccaggctaagaaagagtacctaaactgtaatattgttttctaatttaatattacaaaaggttgtttgggaaactgtagagaaagcccccaaatgaagtatttgcttcatattttcttaaaattaacagtaggatatttagtatttgatataatcgtttaataaaaattatattttatataattcaaagaataaataaatatctccagtactcttttaaggagtagctaatattaaataaagccaccaaggaatgaatctaggtggtttctgtttttaggaagtaagtaagtaaaacatgattttttttttcacaaacaatctaaacattttaggagtgtgtcaggttcaaataaacacattgacgatttttacagtttgtactgatgggaggattttcatgtgactctcagaaaaacacctgagtgattttcatttttactgcattgttgctttactgtttgaaatgatcccatgagtataacagggctggctccttgctcattattgatcatctaaacatcttctttatttccctcaaatactgtattttttatgaagccacagcttgtaaataacaggaagggaaataaagtgttttaaactagaattaaaaggttaaaatatggttgtaactcacattcttcaaatgtttgaacacgggttaccaaggcacttaattatttaaaaaccatggttagatggattaagttaattaaagaacctggagaggctgttccgcagctgcctaggtgtcagactgactcagaaattctgactcagaaattctgagtagcaaagcgcccacatcgctacctacctgccacccagtgctctgacacgagccatctcagaaaaacagtctgtcgcccacgggccagctccagcagatgcacctcgcagtgggagggtgggcgggtgcggatgagctgagccgtttcgcacccccagacagcagggaagagcactgttgtgtggatccacaatctgtcatccactgctactcccatctcaccctcccctccactgcagagcagctgatgtttgaaaatccaaccaaccaagatggaataaggaaaaaaaactaaaattttaagaaagttggggagcacaaaaaagcaaatttctgttagtagttgatgggatgtgacctaaagcaatatttgctctttcagcaactctggtggaacaccagagttatttgtaatctgaatgaggctaaaaggatatgtttggcacctgaacttgcctgtctagattctctgtttcgcttcactcagaactatgttttgtgcgttgacttgtgttagtcatctctacccagatgtctgggctgtgtctcattgacccagtggcagtggagtatgtgtgccctcagaatttcttctgcctgtcttcagtgtcccagtctctacacaagctcagctaagggtggtgccatctcacgggagcattccctcataaccatcactggcttggggaatggagctggcaaatcaaattgtcatcggtgatatcaggctgaatgaatactattgaaaagtccaacctcgaagatggaaacagtaggtattggagaatccagaagagggaaggatggaaggagggccagggtccagaaactacccattggatactatgttcactatttgagtgatgagttcatgagaagcccaagcctcaccattatgcaacatacccaagtaacacacctgcacacgtacccccgaacctaaagtacaaaagaattgtaacaatttaaaaagtcggccggatgtggtggctcacgcctggaatcccagtactttgggaggccgaggtgggcagatcacctgagctcaggagttcgagaccagtctggccaacatggtgaaaccctcatctctactaaaattcaaaaattagccaggcgtggtggtgggtgcctgtaatcccagctacttgggaggctgaggtggagaattgcttgaacttgggaggcagagtttgcagtgaactgagattgtaccactgcactccaagcctgggcaacagagcaagactctgtctcaaataataataataataataataaattttaaaagcccaacctaatgtagtgaaaagtgagaatcatgaattatttttagggaaaatgtttatgttcagagatactgaatgaccttacatagactgaagtgaatgtgcggattggaagtgtgaaagcgttgaactggggattggtggcctgggttctcttcagacaagaattcattgtggatttctctagatttcggttgcttcagctatacaatgaaaaggctaagtaagacccccttctaactctaacattttataatcctaggtctttggaatatttactgagtacatcccaacatgtggggatgcattaaaaaatactgtaaagggataatcactgaaatataaaagcccacagccagctggggagactcgactgaaacatcaaagtcccagaaagctgcatagggtgtagagacctaactgttgaattgtatgggaccccatggtaattgggtaattgggtaagtgggtaacatctgtaggactttgatagggagatggctgaagtggtcagggaagctttatggagtaggcgcactgagataaacaggcagtatggtaaggttaggtagagtgggccggggaagagggttgttaaggaaagggacatatactcagcacacccatccagaagtggaaggcagccttgccttagagagaccgtgagggtgccagcctctcagagccaaagctccctgctggcacacagcagcaggcgacaggcactgaaggtggaggtgagacgtgggaagcagatctggcacttgagtcagtagaaaatggggagcctctgtgggctcctggtcctgcaccgtgataaatagcctgtcctgcaacctggcttaaaacagggaaagccggagttaggcaacagagtgcctagctttctcagtcattcaaacacaagcacggaagaagagattgcactgaccagaggaccgccagggtgtgatgctccgtagtcgcagggatgaaggaaaaccatgggcggagcttgtcatggacagctcctaggtggacataaatggaaactcattggttctggggcacggcgggaagagggagacggccctggacggccgcaccaagaatttcacaacccaaacccgactagaaagcctgggtgagtagcgaagttgttgctgtacgtaggaatataagttttttctggatgtgtatgtggcaggggatatagaagggaacaaccccagttctgtgtctcttcacctcctgatacctgtgtgggccggcctgaccccagacatcaggtgttcttctgagaggtgggcaatgggagctggttccaccatctgaattctcatggattcagccgtaaaatgatgagtaacctctcaagggtgtacctgtaggatgctgcttgtaattactgtgtcagttagttacaaatgggtacttctaagtagttttggaagcgtttgagtagttgctgcaatcgtgtttatactgttaattggctttaaataaattattttttgtcagagcaaaaccccaacttcagttcagttcctacgtcactgagttgtaacttaactaagctttagtttactctcatctttaaaagaaacaggcattctttgcattttgtacaatgctttgcattttgtaattgttcaagataacttcttggtacattggcctcagattaaggatatctggcttctctttaatctcttaatattttcatttttgctctagggctcccaatattacaagtctgttcttgacaaggaagttgggatgacagaactactgtatgaaaactcagaaatgctcagaagtgcagacctttggttctgttttcttcctcatcagataggaattttttttaactacgcacagaatcacacttgcgaagtcttcttttccttcttgttactttatttagaagctgtgaactcaagaagtaggtcccatgttgaatctacatgtgcgcaggtgattcttttagccaagtcatttccacactcatgcccaagtctggagatacacaggtatgtggaaatgtttgaaaagcaaaaccaggttgatgagactttcaatctcttgataacctgtcatctaacctctgagggtccactctggtaaatgtcaacgtcagacatgctacctctccaggtcaccttggtcaagtgcactttcagagcagtgagagcaccatagaaacttgatacatagcttgtttgcagcaaaagagagaggtagatattagcatttccaaaagagctacttaaaacaattatagtaggttgaatatgagccctataataatgtcacccttacttctgttcttacatgttctgacaaggaaaagaccgtgcctcatctctggctctcagaattgtccatcatccacagtctattttatttatacctacgtggtaactgctaactcaaataggcgtgatggtgaccgattatcattgtgtttccctttgccaccaggtgcgggtttctgacaacatcaagatatgaaaggttgtcactcactgaacccctaatgtgtgtttaactgttggggaagaatgggaatcactgccctgagacacagaatttaattaggcctgcttctttgtgtttctctttaatgataggattttaagctcaacggttatcagctcaaaagcagaaaatgttcattcccgtttgtgccctggtatcttgaagaatgtgcaataggtgagcttgccattaatctaactgaatttctccctgcttgtagacattatggttttgaaaacagccttctaagagtgcactaaagttaccctaccctcactcatcatctctactctgcaagtctaaaaatgtggcgtgtgtcagggtacacagtaagacaattcatttatttttaagtgtttccattctccactcatttcctcatctgtgcagtgaggctgagctagaatttagctgtgtgttcctaaagaaatgtgctcactgttttcacacattagccttgttcctatgctgggtctgattacatgctgatagattctggttttttttaagcaagtaattctccttttcccattaaatgcagaggtagagggaggagtttcatccggaaatgtccctgattgagactgtcttctaggttggtcctctttggctcgaacagagggaaccactgcattaggcttgacagaggtctcatagttcagcctggctgtagccctggaagtcagttggacagcagttgcccaagatgccatgacaaaatttacccatcctgttccctcttccacgtgcgtgctgctgtgcttactggaacaggaaaacattgcgttgtcttctgctaagtgggaataggacatttggctgaaaagcttcttatcatgggctaatatgtgctctgtccactcagctcagggaactctctcattttattcccacaggctgctgcttaagttaatgatttctttgatgacaggttctgcatgaattcactttaacatcgttgctctgttttctactcttttttttctccctaaaaatgtgagctctaatttgaagctaataagttttgacatgcaagcaaccaaattactggatagagcaaggagaatattttattagtaattttgaccagataggatggtaaggtcagttaatgaactaatgaacctcagggttcatttttttataaccttaccgggactggatttctttctttctttttttcttaagctgccaacagttcttgtcaggattcaatgtagatgctgctgctggctgtcctggtggtggtttgatctctgttgtgtgggcttcacaaggggctctggttcagtgattccagtaatggctaccactcggtgaccacatagtgtgtgctgcacactggatgtgacttttttgtccttccctgcattggtgcttctgctgtccactcactggtcttagaggtcctggcttttcttcctgaggatcgtgggtttgggcctcttttcagaaggagcccagtgtgcaccttcctgactggcaactctgctttctttgtcctcctgctgttctccctcatcaggttcattagcagttcagctctcaggacttagttttttggggcatcccatctcttaggcagtcttttcatgtaaagacattcggaaggagagcatcctctctattctcagaaatgttttgaaacctgttttctcagtgtcttgtgtctgcctgcagctcccaaccagatcttcctccttggcctttacaaagacgaggttcatttttgttgacttgggtttgcttctgtctgccatttcaatgataactgtgttgatttttagtgagtgaatcatatgaaaatagcaatgagagcctggagaaacatggggtggagaagaggaggttacaagcaatactggtttcttttgtgaccctgagaaatctatcccatactagatggatttgccatttgccttcttctgacaggtatgaaattgtcaaagtatgtaaacaaacaaacaaacaaaaaaaaccacaccacatttttagaagaaagctccattggagtatgtattataggattcttctgcagagcattttcatgtaggttatcatgttaaaataagctagattaacataatgtccttgggaaatgatgatagcccaatgaacttaatgtttgtttttctgaaggattcaagggatattcttgaatctgagaatatgtgatttcattacactcctaaaccaccaattctgtaaggtgaaatttgaagtcctattatcaaataggcctatctctctagaaaaataaagtcatggtgctaatttgtctaaaatcttgattaatgccctgtaaaatactaaatttatttagtgtttaggaaaactctgaaaaggacacaagctttagtattgcagtttccagtgtctaaaattccatgtttttttcattttaggagggatagtttttggttgttgtttgggcttggaagagaggattttaaaggaagagatacaaacagcccatgatttaagaagaaaacattaagcctcgttaatggtaggtgttaggggaaaaccctaacattagcctctagcatgagggagtgaaattaacatagtcacacatccgcaacacagcagtagtgtattcatttattaatagctgggtacaaaaaaattgtgaagacatgtgcttggcaatgactacgatgagaaggggactatgagaaatagacacacacaataagaatatttacattttgggccgggcgcagtggcttacacttgtaatcccagcactttgggaggccgaggcgggcgaatcacaaggtcaggagtttgagaccagcctggccaacacagtgaaaccctgtctctactaaaaatacaaaaattagctgggtgtggtggagggtgcctgtaatcccagctacttgggaggctgaggcaggagaattgcttgaacccaggaggcggaggttgaagtgaactgagatctcgccactgcactccagcctgggtaacagagctactctgtctcaacaacaacaacaacaaaaaaaaaaaaaaagaaaaagaaaatacattttggtatagcttttcaggttcttaaactgctttcacaaacttcacttctcttggtagttaaaatgtttatgtgcggacaacagggcagacactaatgactcctgtttctcagatgtgaaatctgaggccagaaaatgtatcaataaatggctgcttaatgtgcagcagttggaagtggcagtacaggtactcaaacccaggtgctcagacagtcccggatggaggctgttggagagagtcaacgaggctgaaggcagagtttttagcaaagcagggctcatgggattgttatgcccaccagatgctctgcaacagtgactttagctttattaagtgccctggttattctttagtaataagggtcactagggaaacttctgttgctaatgctcatgcatttacacttccttagaatcacttaatgaaaagctgaaggaaaagcaagatcatctgttgggagcagacagaagcctgattaagtttttcaatttgccagtatgtcctgctgaggcatatgagtatgaagtggtcattatgtccagacagaacacttcatcaaagaaataagtgtttcttttccaagttaaattgatatatattataaccctcactcgtactcaggcttctactccttggcccagctccaaaagaaagaagagtgtttacttataaataattctctagtccaacctatggaccgcttaggccaattctttaaaacagaattctcctaatagccaaaacaggtaaatatccaagtgttttttttcttttagaaactactttaagattgtgttaacagcagttatcaatttgtgaaaggaaaaattatcatcttttttatataaatgttttatgtatgtacttggttggatggggaatatccctgagggtatagtcaacacagaaaagcacaataaataatgatatttcgctagaaaataaaagccatatttagtgtttattcaggtcacacatatattttgagttccactgtgagcctgtctctgctaggcttgaaatatggtaataaacaacagatagtctttgtctaaaggcaacctggaatctgcctccaagatcataacatttttgttgcttttcatgcttttgaattgttgagtaaaaatggaagctttaagccagtagggcatcacgactatatatattttttatttcaaattataatacttctttatatatgatttgattaataacatgttaataagccataagccaataatttttttttgttaaaaactaagctatgaatttgcttttgccgaatgaaatttattcaatcatttgctgatccatttattcatacttgggcaaaatattttgggggcacctactgtgtgccaggcatgtttttagatgctgaggaacatcagggaacaacagactaaaattcctgctatgtaatatctatttcagaaggcaagaatgacaataatataaataaataaagcataaaatattttacataaaataagtgttaagaaaaaatacaataaagcattgaaaggtgatataaggtttgcattgaagagaacgttgatattttatatacagtgacttgggtaggcttctctgagtaggcgacctgaagttggtgagtaagccagctctgcataataggggaaagaccattcaggccatgcgggcagccacgtgcaaaggccctgagccaggagtatacctagtatcgagctaagaggccagtgtggctggagctgaataaacagtggggagtcgtagcagatgagattagggaagtagtggagtcagatcatgtaggaccttatgggccctgataaggatgttaggttttgttgtaagcaagtgaagttgaggagtaacatgatatcctagttgagtgaagttgaggagtaacatgatatccttgttttcttagggttgctgtggctcctgtttatgggaggctggggccgatcagggagaccagctgggaagctattactgtaatcctcagagagatctccgtggcttgggctacagcaggagagtgagagttggtggattctgaatgtcattcaatggtagagctagtaagatttgctggtggattggaaatgagtgaaagagagaacaagagataagtgaggctgcaggattttggcttgagcaacagtgagaagaaggtgccactgactgagaagagctaaaccccagtagagccaagttgggaggtggtgaaaaaaatccaggtgctcagctgtggatctgttaagtttagatgcctgtgtgatggccaagtggagatgcagaggaagaagttgggtgtgtgggtctggtctccctcacattagatatctgaacagggaggaatcggatcacaagactggggggtggttagtgatgtcataggaaaaacaggtgatccctctaggacaagggatcacgagagaggtggagaggcattgaaggcagcagggggatcatggtttctacatgttgtcctgcaaaggggcacaggagaatgggcagtaggtggcagggaagtggaggatcaagagatggtgtttaagatggtgagatggggccaggtgtggtggctcacgcctgtaatcccagcactttgggaggccatggcgggaggatcatgaggtcaggagatcaagaccatcctggctaacatggtgaaaccccatctctcctaaaaattcaaaaaattagcagggagtggtggcgggcacctgtagtcccagctacttgggaggctgaggcaggagaatggcgtgaacccaggaggcggaggttgtagtgagccaagatcgtgccactgcactccagcctgggcgacagagtgagactctgtttcaaaaaaaaaaaaaaaaaaaaaagatggtgacatggaagagcagtaatggttatggaaacaaggcaggttcactgggctgtgtttttgagcaggtgaatggggctaagaccccatacccaggaagcgagctggcatcagaagcagaagactgaggtcatttttatggatgggagatgtgctggtgggtttttagaagagctcatgtcagttggcatccatttcttcagtaaggtgagaaggtaaggaaaattagaaacaaaggacttttaaaaactcaccaatatacataccaatttttctgcctatctctcaattttcaccatcctttctttcaagctagactctcagctccttcaaattaaaattttccatttggcaatgcaagtttatcttttcttaaagacggaatgaccagccttttgatggaagattttatgactctggtgtcttccaatgacgtgaccagtgatgaggtttgcatctgtgtaaaacctacagattggaattctgctttctggtgcaatgtagtgttggaatgtaatgtcgttttgggaacctcaggattgagagcaaacccaattcaatcattggaggagcaagaaactcattttacgttttaaatggttctattcactgggctgaatagactcaatatttaaaacccttaagaccagtgattctcaatgggttgtggagggagagggataggcaatttgaagactcagtagtatatttaatatttactatttatcatgcaatttatagaaatgaatgcttgacaatgtcgtgggctgtggaaaaatgaaaaaaaaaaacacagggttgtcctctcctgcttctgttatatttatttttgttatgttgtttatccaaagggggcattgattataacagttagtaaaatactggtgtggctattcacctttgttagcttatatgtcttaagtggtacaaacaaagccaagtaagtgtctgatgtgagatccttaaaaccgggaggcctgggtgctccttcttcccctgactccagtattcctgccctggacagtgagcccacctgaagctctttcctgaggtcccacaaagaagggtctgatggttttatcaggaaaaaaataattaattttttaaaattttaaatggaaaaaattaaattagttaaaaattaaaaatggctcttttccttgtttctcttgttttttgatgaccaatacctaaaaaagagagaaaaaaaaaaaagaatgaaattgtcaactcaagaaatgagggttttgcagaagggagaatgtttttcttccccaggcctgattggactggagcactgcagggtaaactgtgctctgcagcagctttgtgaagcaaatcgttgaccgattgtggaggctgcagagcagtgatggccacggtgacgccagcctcagggcctccccttgaggaggctccctgggccatccttttggggctgagtggccatattgcacaggtgcagggctgtggggagccaaccgaggacacacagcatgtgatgagcactccagctctgcatccatgggctcgatgactaagtgaggccatccatgtgcagggaaacgttttatgccagagagtaatatttttggaaagggaggaactcatatgattctgctgagcagcttgttcttcctacatttggctctgtggggtagtgtgtatgtctggaagtggcagttacatgtttcccactacctcggggtaaatgtccacaaaaaaataacactcactgtttgggaaaattaaaaaataagcctagggatgattaggttcctctgatccaagtctttggaagtcttctctccacatttgtgcacccatgtgtgggtttgtcctggctgatgggctccagtcctaacacacccaaaaaacagatgaatatatagggcttgagtttttcactcatatgatcctgaattaggacaaagtccaaagaaggggctaactgacctcacacagtacttgttctcctttttctttcttatatagcatatttttaaccactcatttggcccctaatatcctgttttgcatttttaaatgttctttgctttttgactctacaagtatatttttcataagacaagaacatggatctagtcctgtgtttctttgaagaatctgcaacatttcaaatagttggataaatagtagatatgtcatagggatgtgaatatcagaaccaaagtgtattcctgtgtattttgattagatatgagaagggttgattttctgacttttatgttgcctaattgaatccatttttcccataagcagcaccttctttttcacttctaagcgtccttctcatttatctggcaagagtatttaaactagaagaatcctaacgtctgacaaagcattgaacattctttctatatttgtgtcaaatacttgattctctttcttgttaatatcataagggagagagttgatgcttcttaagctgttcaattacaaaaaaaacaacaaagaaaaccacacaactgtgaggcaattggtcatctcgtgaacgtggcattgtggtttgcatgtttgctcatttttgcttttgtactcctggcatttatccggagagctccttcctgcagagtgcctgaatgctggttccttcttacacatgagccacgtcagaacacacctggtgggactcctctgtggggctcttcccatgcctgtttcctgctctgggcagttggtggtctggggcattgggacatatagaaaagaagctgaggaggaaaggcgttgttgctattacttcaatattctcatttttcaagtgaggatttacaaaggggactgtaagctttccatccgaagagaggtctgaggtaagaattcttttctccaaatgagaaagactggaatcccaccaggtgtgtgggaagctgcagtgagaaaaccaaataatcctggtttgaagagttaaatattcttggtaacatttgaataaattggaaacatattcctctgagaattttttttttgcaccatagatagtttctaaaaggcgtggaaacatttataagaaataccaattatgcagtgttggtgtcagtgtggacttaactgccgagactgacttattgccaggtgggcaggtgaagtaataaagaaataattggaattcttattgctgaactctaaaggactctcaggaaacctaaccttgcttttgacctactgattagcttgaattcagcggactcattatattctaatttcatctccattgaaagataaaacagacttagaagtaattaattatagttagatattaatgatcaagtgaattgacttcaaaagtcattttcatgtgaactgatttccctgtgatggaactttggtaacattttacatttgtatttttaatctcttaagtaagtactcctgtaaattgttccaaaagaagtggttttctgggataacgtagagaatgaaggtcaggtctggctcttgtgctatggttctgcttttctctctctctttcttttttagacagggtctcgttgtgtcgccagactggagtgcagtagctcaatctcagctcactacagcctccacctcccaggttcaagtgattctcaggcctcggcctcccatgtagctaagattaaagccttgtgccaccacacccaactaattgttgtgtttttagtagaaacggggttttgccatgttggccaggctggtcttgaactcctgagctcaggtgatccacccgccttggcctcccagagtgctgggattataggtgtgagccacactgtccctggccaacaggctctacttttctcataggcgatgcccgagggtgtcggtctaaattggcatctctcttaaaatctagtgagtttatcctgagatggtaagtttcttcagcaaataaatggaagcacaaacaagccggaagactttctatgtaggacactctgtaggtccttagagtatggctctcaccaggtgttttcactctactttctgcctgtcggagggctgagtcacaatgaagaatcttcagccagagcacaccaccttctaattaaagtgctgctttcctctatattttgagtcctctcaaatttcataggcttctacaagcttgctccatgcagagccctatgccagggtttcagggttagagatacagatagactcagtaatcaagcagctcgtatcttagagaaacatctaaactgattattgtaatacaagtgatgtacaattaagattgcttgcagctgcagtaaacaaaaatcccaatttataatggcttaaatttataggagggacacgtaaatgttctcacactgtaaggtctggcagtaagcggatggggtgttatatccccacttaacacggcagggtcctgttggcacttcctggcttgccattccttcttcctgtgctggggtcagggaggaaatggaatttctcctcaaccctcataagttcataagttgatgagacagatccctgtaacaaaagatagattaacaagagaaaaacaagcaagtttattaacacaagcagtgcatgtcccatgagagaaacctcatgaatggtaactcaaagcagtggcttagatagcatcttcaacaaagaacaacaaattcaaggcaagtgacaggacaaaggaaaaggattttgagtgtctgcagggagccgcttgggcagcagatgaacaaatggcagggcagataaaaattagtgaataaaatttgttgatatcagttcctctggtgtcatctcaagtttgatgagggtcaaagctgtcttcagtggttagcttttggtggagaggtgggcaggataccttatgtgtttgtcaatcatctgtctcctgtttttaggcaaacagagggagggcagagagctcccctgcgtcttcttcattgtcttcagctcagcaatttttcctgcttttggggagtcatgttctggtctctcactctaggtttgacctcatgctagtcactctacctcatgagatgcctgctcagctgcagatgtgttgtttgtgttaaaggcaagaagaaacaaagattcccccaaaccaacttccctccaggtttccacttctatctcatcagccagagctctgtcatgtggtcactgcaaccttcccgggaggtgagaaaaggaactgtgtagctttcctctgctccatggtagggacagacaggggacaagggcaggtgagcagatactggccctgaggggcttgaagacaggtcagaaagatgaaagggagcagcatgtacaaaatcatgcaagtgtgaaagggcagggggtgttctgagaccacgtcctggttctctgatgcaggcgcaggcaagcattgaggctggacaggtgggcagggcttgtttgtgagggacactgagaggacctgcaggatctgccctttagcctgtggccatgggaagtgatgctgtgggggatggacgggtagaacaacccaaactaaaacacagcagcggtgatagagtaaaagcaatgaattcgggaaatcattccaaagtcactggctcttggtgccattttttttttcttttgagacagagtctcactctgtcacccaggctggagtgcagtggcgtgatctaggctcactgcaaccactgcctcctgggcttgaacgattcttctgcctcagcctcatgagtagctgggactacaggcatgcgccaccgcacccggctaattttttttttttttttttgcatttttagtagagatggggtttcaccgtggtggccaggctggtctcgaacttttgacctcaggtgatccacctgccttggcctcccaaattgctggtatacaggcgtgagctgctgtgcccagcctcttggtgccattttaatgtcagtgatgaggaaggaggagtcagggaagtagagctgatctctgagccacagcaggtttgaggggagcttgctagttcagtcatgcatatgtggggttataggtggctatggcacatccacagtggttaggagtagaggactggatttggtgagagaagtggggacttaaagagtataagtaagggactttgagcagagagtggggaggctgtgggtactagttgaaataaaatggccaatgggcatgttcggggtgagcagctggtccactcactacactctaactggaatccatgtctatgtatgagctcacggttttgcattttctttcacagtaaaacattttctgtgatgagcttctattgtgagtgcagcactttccctatggtcagttctctttaaacactgtacctcctcccaggcagtgcttctctttatcttatcctcaggctgtgtttcctgttgtttcctatttacagaagttagaagaagagagatggagacttggacctcataaatgggtgtgggctgcccaccaggtcttagaccaggttggcaggaggagccaaaactgcttcacttcttcttacttagtgcatgaatgtggtagggctggattcacttataccaccgctggcagcatctccagacagggcagcatttaaattcacctaattcctgtccacccctctacccgaccccaaacccagcctcctggtcatagtcaacaaataatatttagaatatgaaaacagaaacaaaaacaaaaatggcataacaagacaaaaattacccggggtcccacaattctcagacaactgttgcagttcacatttctttgcaataaaactgccacccatttcaggagggttcatggtgcttcttaaacagaccagttactgtcctggtccatttgaggttgctgtaagagaataccactgggtgatttataaaaaacagaaatttatttctcaaagttctggaggctgggaagtccaagatcgaggtaccaacttctgatgaaggccttcttcctgcattctcacatggcagaagagcagaagagcgctagaataaacccactcccacaagccctttttatagcagctttaacctattaatgaggaaagagccctcatggcttacacaccacccagaaggccccaactcccaacactgttggactggggattcagtttccaggacatgaattgtgggggacacggtcagaccatagtacctactaattcatatattcaacaaatattcgttaagcacatacttctgactaagcagctcttagcacttaggcatacaatgataaacaagacaaacaagttccctgtccccattttagttgggaaggcaatcagtacataattcaattagatagtagtgggggctacaacaaattgaaacaggatactgagcttgagcatgactggggagggagtgaggctattataggaagggtgaccagaaagccttctcttgggacagtgatattagtctgaggtctgagtgaagagaaggtgccagtcatgtaagactgagtgcagaaggcatcaaaccaggggaacagtgagtgcaaaggccctgagctaggatctcaagctttttgaagagtagacagaaggcccttctgtccagagggatgtggtaagaggaacagtggtaagatatttggtcaaagaggttgtcgggggccagatcttgtagagttctgtaacccatttcaagaaatttaagattacattctatttccagtatttgcaatgggaaatcattgggggattttaatttcaaaagtagactgggtgaggtggctcacatctgtaatcctagcactttgggaggccaaggcgggtggatcacgaggtcaggagattaagaccatcctggccaacatggtgaaaccccatctctactaaaaatacaaaaaattagctgggtgtggtggcgggcgcctgtagtcccagctacttggaaggctgaggcaggagaattgcttgaactcaggaggcagaggttgcagtgagcggagatcatgccactgcactccagcctgggtgacagagtgagactttgtctcaaaaaaaaaaaaaaagagatatgacatcatttttattgttaaaagataagcctatagtgttgtaatgggtttaatggtgactctaaaaagatgggtgcataccctaacctctggaaactgtgaatgtggccttctttggaaaaaacgtccttgtggaaataattaagttaaggatctccagatagggtcaccctggattatccagatgggccctaaatccaatgggaagtattcttataaaagacagaaaaggggaagagacagagggggaaggcatgtggagacagaggcagagattggagttatgcagtcacaagctaaggaagcctggagccactagaaactggaagaggcaagaaagccttttcccctacagccttcggagggactgcttcgaggcactgctaataccttgatttcagatttttgccctgcagaaattttgagacaatacatttctgttgctttaagccactaagtttatggtaatttgtacagcagccacaggaaacgaataccagtgtctcataggcttggcgtacattagggggtggaggattggaatcatgggggaaataacagaagctgataaattaatccaagagaaaaatcacgtggcttgcatcaacagcagtgggaatagcgagaagtgctctatttagaacattctgaaagtagaaccaacaggatgtgctgatagattagatgttggagacaagggaaagaaaaaaaagcttcttggtatttggtctgaagaactaaacagattgcctaatactgttacctgaaatgaggaagactaggggagggacaatttgggctgaggttttcagggtgagaggtgagaggtgatggtggggatggaggttgcctagggtgtaacatggtgaagacttctttcatggacgtattgattttgagatgcctacgtcacattcaaggtggaagtttgaataggatgtcaggtatgaatttggagctcagaaaagagatgaaggtcagtaagttaggagtcatttgtgtgtcgatccatgagtctcaaccttagctctataatggagtctcttgaagagctttccaaaaaagatacccatacttgtgctccatcctgggctgattaagatgaaatctctaaagtatttaagaactctccaggtgaggctaggggcagccagggtggaaaaaccacaaatgtaagcaccgtatttaaaggcatggatctagacggaatcacgcagggagagctgcctagaggataagatgctgctaatatgtcacaggtagaccagactgatcctcctcagctctcaaggtggccgcagttttggtgttggcaccattattattattattattattattattttggtaggccatgaggtgaaagagataggaaaagccgagtgcagggagtgagagcagatggaaggtctgaaggccgagtcctggagggttctaatgtggtggggtcaccaagaagaaagaaccaacacgggaaacagacagaaattcttgaactgggaggtagcagtgagaatgtggcatgtgtgaagccagaggaagaaagtgtttcaggcagaacaggggactcagtttagtcaagtggtccttagaagttgagaaagatgaggatagaattaattcagggatttgtgaagatagaagccactggtggccttgagacgacagacctgtttgagaagagcggcttggatggaagctcacattgaaccagctgaggggaagcgagtgcattttgagcctatagatcttcccaccaaactcgaagcagtgagtgacgcctcttattggcacattgcttctgctatttccccttaaaatctggcatttctgagagttagaaaattttattcaaagtgactttattgaagcagatgtttaatcttctggaatgtagtacatggatccacttattaatgtgtcagttttataaacggcatgtcatctgtgcttctgtttctttcctctaaatcgttttcttttgactttgttccagatgaaatcctcttggtattttcctgggtatgtgtgatggtttagcgttgctagccattcatcttgagggaggctgttctggtttaatgaatcacagctgcttcagacgtgaatgtcagtggtgctgtcaaacctcattgcctagtatgtagttggggctcaggaaacatgagttgaagaaacttagggtgaaagtaaccctgtggtggacactgcagctgccttggggagggtgaggtgaatgttttgaggtctcttcagaggagggcacaggagccatggctgtggattggagagtttctgccctttaccaactcctgtccttgttacctgctcatcgtctgttcagtcctcggtgctctccttagggcctcacgatgctcaacagggagggagggctgccttgtcatttaagttttggctatgaattctctgctccactctggctgtctgctctggaaggatcctggtgcatccatggtagttaacaggatgttggaagtcggattcagcatgtgtgggtgagctcctgtagctttagtgaaattgcgttttctggagcactgcacaccaggaacaggttggtaagaccaggaggtgctccctggtctgcacccctccagcctggcagatgagcctgggctcttccaagaattctgttccatgttgcacaagagctgacagctgatttactttaaatctctgcaaactgtactgaggaaaaaaccccaagtatattctcctccatccatttggcccctgtgcttttgaattgcttatagcctgggagtttgtgctctcaaagaacattccaaaaatttaattcttccatctgaagatattatggaatcatcacagatttggagggtttcaaattaagaaatcacatttgactatactttaatgttttgtaagtgccatacctctgtattctaattcatttcctgtttatgtggtaagatatacttgtagtactgtctctataaaagcagaattttaaggcataaagaaaatctagaacttcctactgaggttgtccaaatgaaaaactgtgttcctatgtccatatttccaagccgcaactttttaactttttattatggttattttcgaacatatacaaaataagagagaattagataacaaatacacagtgcatacacaagccagctgtcaactgtctgaatcctgccatccttgtttcatccatcccacatacctcacccactttctttttatttttttctggcatgtcagtacattttttttttaaccatgagatgctgtagtaacatggtcccaaactctccgtgggttataataacaaaggtctctttctttcttgcttgcttgctttttttttttcttcccttgagacagagtctcactctgtcacccaggctggagtgcagtggtgtgatcttggttcactgggcaacctccacctcctaggttcaagccattctcctgcctcagcctcttgagtagctgggattacagacgcgcaccaccacacccggctgatttttgtatttttagtagagatggggtttcaccatgttggccaggctggtctcaaactcctaacctcaggtgatccacctgccttggccccccaaagtgctgggattataggcgtgaaccaccatgcctggccaacaaaggtctatttcttgctcaagtcacatgtcctttgtgggtacaggggcccttgctccataccttctttattctgggaccaagctggagagatgagtctctatctgtggaagaccttggaagaccccactcagggttgttctgaaagggatctcacatggattgagccataacctagagccaagagaagccagatttgctaggagaaagtcctgtcagcatagtcaaacacttaggaggagtaaaaaggtgtatttttctgcatagatggtgtgatcacatttttatcaattaatctgcaccctagggacaaagagttaacatttgaatttttctcagtaagaatctactcctcagggaaagttagcgtttgaaaaactctaactagaaatccactttccagaggctgtctcagcaagtgcttaagtatctagactagaaattcccttcataagcatgaggagtgctggaagtgatttttcattggtgaaatgggtggttttcaagttatgtagatggactggagatatttttcctctactcttgcatgaagaaatatgtcttaatgtagatagactggagatatttttcctctactcttgcatgaagaaatatgtcttaatccctttggattgctataacaaattaccttagactgagtaatttataaagaatacatttgtttcttctggttctggaggctgggaagtccaagatcaaggtactagaagctttggtgtctgataagggcttgctctctgctggtgccttgttgcatcctcatgtggtggaaggggcaaataggctccctctgccctctgatataagggcactaatctcattcatgagggcagaatccttatgacctaatcacctcccaaaggccctaccttttaatactattgcattggggattaggctttaacatatgaatctggaagttgggggaacacaaacattcagactgtagcagggaatgaaatctttgggcacccagcaaatggatatctttaagaacaggattctaggtctagaacaccatcctcttctgtgttctgccactaaatgatgggtcctgagggttttatctcctgatttggttagaagattgttgaatctggctgtgagagcctttcaagtgcctaaaggagagagcttgaacttccctgagagtacaccaggtgatgtgacactttcttgtccttgtaatatgccacctagaagagaacttttaggagaggagacctacagttctcaccaacctttaatcattagaatttaccagcatctactgataagaatgtgatcttggtgagcagctatcatagtgggtcagtttgcaatgaggggagtaagaatttgagagagcgcatttggatttttctgttggggagtcattgtagtcattctaaactacagagtggccacacagttcctctatatcagattcgttcccaagcactgttgttaagtctttaattactgtcagggaccactttaataacatctgttagtgtgggagaaggtctcttaaaggacttggggaatattaaaacgtgtgcagagaacagaggggagcatatagttcatttgtaactagtatagctaggaagagtgtggccaatatgaaagggtgtgcctattgtggagataattcaattagttttttctttccacagcaatagaagagtttaacttcatggtacttcctatgtgcagcgtctgtactaaatgttttacatggattgtttcatttaaccctcataacacctgcatgagataggaaatagtcttcacatttgacagatgaggaaactaaggcatcaaatttttcagggagacatagctaataagaagcagaaccaggattcaaatttagcaaatgtgattcctcagcccgttcccctaaataaagtctttcgaacaatagaaaaaaaaaaaaaaactgttgacttcatttcaagagtgtcttcctccaaaagatacagagattcccaccagggcaaaatggacgccacgtttccctcccgggggcaccagaagccttagcaggtggctgctctgagttcctgtggatggaggctcagaggttgggtttgattctacagagcatccagggttcccgcatccctttacataatacgagaatttaggactactttgctttctagtctcagttaagctttgggaccaagcaagagctatattcattacttgcaggtttggagtgtggaaattcagcatcaagtaaacggtgcgtcttcttgtcatccagcgtttgcccccattacctctgcaatctgtcttccattgggtaaagtgtgcccaactgttcttgaaggaaaagaaatctaaatcctgagttgcctgcacagcatctatgccccagggaaaaatgcctacagcacgaatttaaaaacctcattctaaaagtgcattactgaaaaggctttacagtataataacttttaaacctaagggtagtgatggctgcaggataattatgtcaaacctgaaagcaaacccagaggaggtggcatgtggaagaaataccactttggttaatagatttgcaacctcgtttaaaatattgaggctttaggaaaaactagatttatcctctctgttagcttctttatcttatcttcactctgttgtcctgttgttaaaatttctaagaaatggtaaagaaagtgagaggggaaaatatcaaaaagaaagaaaaaggggcatactagaacatagtatatgattctccctttgctattctgttttatgcaataatcagggtcaggtttctaactctctcttcgaatgtcccagatagaaaggtgggtctgtgtttgatagacaggcagatgggagcaggacgtgtgcagtgtgctgactcctacacagaagtggaggtaggtgctgtcaaatgcatggcagcaggagctggtgtgagaacgccaggacacgttgatggcattgcctcatctctggcaggctgctgtctcctacaagacgtttatgtggattacattcacatgaggttgtataaaccctcttattcctattctcatggaattgggaacaggaagacaagggatgacctggacatttcatttagattagaccaaaggtgaacaaaggtgatgaggcaacaaaggtagcctttacctgagagtaaccccaaggcagaggccaccatgagttaaaagcaaacagggccaagcaacaatcaggctcagatccaggaaggactggacaagtgttctgaagctgtagcctaattcttactgaaggccatgggatcatgggggctgagacctgtttttcctgggagctcctgcttgggtgggttagatctttggttgttgtcttaggtccattctatctcagagtaaattctggaaacatccagggatttctttctccagcttttgttttctacattggccatcacccctctttgatttttccttgttcttccttaccgctacccctgaggccagacataatagattgataaacccatggttcaaatcctgcccccatcatgcatctgctttcagatctttggaaaactatttaaccccctagtctctttatctgtaaaatagggatatgcatacttatctgaaagagctgctgtgaagattaaaggaggttatgcctttaaagcataacataccgaatgctttcctttcattttttcattggaatgctcttcacaggtctggagtgagggggaacaagagttaacaagtaacaaacatgggggtgatttaaaggtttcaggagctcatgctgttcatgccataactatccatagaccacattccctgactttttcctaaatgctttcaagcacgtctcccctgtaactatccagtacactggatgcttcctggtttggttactagaacaagctcctcagggttgggttgggactgtttctaggccatgctggtggacatgcctttgcagagcttggctctggtcacacactccttctgtattatctttttattctgatgctttgacatcttgggttttgctgacactgaaggaactgcccttcccagggctggccaattcctaaggacagtaaaggactcacctgtgagcatgcctttcctatgcaaactgaacactctggagccccatcccccagccaccttctttatcaggctttcaccttctgagccactaattctctgcctcagtcaccccagagcctggtaccagacaactgggacaactcctatattccaaagcttgctgaaatgattcaaactagctaaccctaaacctgcttatgctgcttcacccatttattcctgcagaaaccacagtaaagttccccccttgattcctttgtgtcctgaccaactgatgtttccctaggtgcccccacagcatggcatggcatgccccacttttgaaacctgaacaagctgtcttttcaattacagatatcccctggtctgttggcctcactatacctgaataataataaaacttacattttgaaacctcttccctgactgatggttaattgttgtgtcaatttgactgggctagaggatgcccaggtagctggtaaaacattacatctgggtgcatctgtgagggtgtttctggaagagattagcatttgaatcagtagactgagtagagaagatccatcctcaccaaggtgggtaggcgttatctaattcatgaagggcctgaatagaacaaaaagggagagaaagggctatttgtcttttgttgagttgagacttctctcttctcctgaccttggactgggagttatgtcattggcctccatggttctcaggccttcaaacttgggcagaatggtaccaccggctttcctggttcttctgcttgcagacggcatgccaagggacttgctggcttccgtaattggataagccaattcccataataaatctcttcttatatatctatatatatcctattgcttctgtttcttcagagagtcctgacaaatataaagattgataccaagaagtgggagtgcttctaacgaatgtggaagtggctttggaaatgggtaatgggtagaaactggaaagagttcggaggtgcacactagaaaaagcctacattgctgtgaattgacctttaaaggtgattctggtgaaggctcagaaagaaaagaggagagctataaagaaagccttaatcctcctagaaaatacctaagtgatcatgaacagaacgttggcagaaatatgggtaataaaggccagtctgataaggtctcagagggaaatgaggaccatgttattggacaatggagaaaaagccatcggggtgggggggaaagggaagggagagcatcaggacaaatacctaatgcatgcagggcttaaaacttagatgacaggttgatagatgcagtaaaccacatgtatacctgtgtaacaaacctgcacgttcagcacatatatcccagaacttaaagtaaaagaaaacaaatttttttaaaaagcgtcagagaacttggctgaattgtgcctgtattctagtgttttgcagaaggtagagcggtgaacactgaaattacatatttggataaggaaatttctaggcaaagtgtgaaagttgtggcttggcttctcttgacagcctacattaaaatgtgaaaagagagaaaagatttaaagacagaattgttaatcaaagagaagcagcacttaaagatttggaaaattctcaccctagccatattatgaagaatgagataacgggtacagtggttcatgcctgtagtcctaactgttagagaagtggaggcaggaggatcccttaaacccaggagtttgagacttgtctgagtaacatagtgagagtccatctcttaaaaaagaataaataaataaatgagaaggcacattgggaaagaacaccaagggtgcggccaaatgaccatctgataaggagattagtcaaccaagtggaacctgttgctcaaggtgattcagaagtaattggggctgccacctccatcacagctccaatgtgcaaaagcttgagcaggcaagcatgggacctccacagagagcccttactagagcaacatccaggatagccgagtggtaggaccaccccagcagccccagacctgtagagtcatagacacgattctagctcttggagccacaagggcacagagcaacctttggggagggccaccacgcccgtgggttgggaaagcaggaccacagccctagtgggcctgggggacagagcattgagccaaagaagattattctccagacaaaattttggactttgctagggacctatcctttcttcttttctttctttctattcttttctttcttttgaaatggaaatgtctattctatgcctgtcccaccattgtattttggaagccccttgacttgtttaatttcacaggctcacagctggaggggaaattgcttcagaatgaatcataccttgcgtctcacccatatatgatgtaggtgctgtttaaatgagactttggactacagaccttcaagtagatactggaatgagttaagatttttggaaccattggaatggactgaatgcattttgcgtgtgagaaggacatgaaattttgggatgccaggggtagaatgttatggtctgagtgtttgtgtctctcccaaatttatatgttgaaatcctaacccccaccctctcaaggtgatggtatcaggaggtagagcctttgggaggtgattaggttatgagggtggaggcctcgtgaatgagactcgtgcctttataaaagagacataagagggactccttcctccttctgccttgtgagattagagtgagaagtctatgaggaagcagccctcaccagacactgaatctgctggtgccttgatcagagacttcccagccactaaaactgtgagaaatacatttctgttgtttataagcctgtggtattcttttgtagcagcttgaacagactaagatacccttggatgaggagcaactgaggtaaagtgggaaaaaaaaaaaacggctccaatgccaagggcatactggacagctctttaacttatgcttggtggttgcttctcatcattttcagttaatcgtaaagcattctacttttgtggatttcaagtccctaggaaaggatgctgaaggaaacgacagttttgtgagaccatcagtaattgtaatgttgacacctctgcattcaaatgggttacaggattaaacaagtgtcatccaaaggaccatcaggatggctagataacagaaaagagagtttcactggcaatactggtttacaaacctggaagagagagtctccggtgtgaactgaaaatgctctctctgaagaacaaagagaaggttagaggttttataaaaaggagaaatgttgcatattgctctttgagaagtttcattggcaccagtaaggttttgaggagctggcaggcttcaactgataagtgagggtggtgcgtaaacccagtctgagagttgcagcaggtcgtctcagtagtcgttagacaaaactggtttcaggttactgcaggcagtgtcagctgccaggcctgcagaaaattatgttttttggagcaatgttcttcaccctgagtgctttttccccttggcttattgattctttgttgggtatgacaagaatgactcatttcatgtgatcagctttcacacaagggtgacaaagcttcaattatttatttctttattatttatttatttaatttgggacagagtctctcgtcgtctaggctggagtgcagtggtgcatgatcatggctcactgcagcctcaacctcccagcctcaattgatcctcccacctcagcctcccgaatagctgggactactggcacatgccaccatgcccagctaatttatttagtttttgtatagacagagctcactatgttgactagggtgatcttgagctcctggcctcaagcaatcctctcacctcagtctcccaaagtgctgggattacaggtgtgagtcaccatgcccagcccaaagcttcgttttaagtctcttttatttactttttttggtcctagtcataacacattgtaaatatactctgtcagagaattagatagcttgttgttttttaagtcttttctaattaatctgttcatgtaatttagtaagaaaatattaaagggaaatcttgcccgagagatggccagtactgagtaagaagcccatttggtttgtgtctgggaggatgggcagtgaggatgagtgaggatgagtttaatttagcttggtgagagggggacaaatccaccttttcacgagagctgctttctcatcgctttttgtcccccttcatccacaacccccgcagccaaggcagtgtcagtaaattttgggatggaaaagccttaggtaggattcttatgttttcgaaatgtgactgattggaattgggggaaagctgtattaaaattggatatgtggtaaaagctggatatgtggttattacccatatccagtagtgggtcatgttcctgtgctaccatgatctgcccgcagtaacctagcaagacatcaaatcacagtgtgcagtagatggtaccgttgaacaagccaagccatattgtctgcagggatctgagatgataaagagattattacagaatttgttttcataaggaactgtgtaattatgatgattagccaaagaaataagaaagaaagaaagagagaaaaagaaagaaaagaaaagaaagaaaaaagaaaaaggaaagacgaaagaaaagaaagaaagagaaagaaaagaaagaaagagaaataaagaaagaaagagagagagagagaaagacagcctggtctgttacctatgctgtcctactatagcatttaatatcttactgcaaattttactaagttataacttaaaagtgttaatttttttttttatcactttgacaaacttagcctcctacagcagaaggtgactgatcaaaagctggactgtcaaccaggtactcaccagcttagagagaatggagaaaaggagtataaagaatttgaataattgtatgtaacatacgtgtttcttttgaaatttcagttttaggaagcaaggcctgatgagatgatcttcatttgtgagagtatgcagagggtggtgtgaaaagacatggcagggattcgtatttttaaaatggatggaaaaacagttctaaaaatatgaaaaaataaggacaaataatcataatttaaattctcaagctaagaaaggttcaacacatttcaaagttaaattgtaaacagtgttagggaaaagaaaccatacagaaatgggacaacagggatccattagagttggatatcattcatttactagtttgaggggcaaaataaataattatatgtgtttttaaatcatagagaatgaaccctgaaaatgtttaatgcttagaaaagaaagcatgtataatagaaattttaatttggccaaattgcttactttaaaattagaaaattcgatttttttgattgcataattttggacacataattaataagcaggtagattaaaaggaaaaacctacatattaagcaagaatcatctaacaaaaacagttccttatataagagactgtatgctaactcctagatgccaagagagaaaatgagactacatgagactacagtcaagcgtcacctaacgacagggatacgttctgagaaatgcatccttaggtgtttttgtcattgtgtgaacaacgtagagtgtacaaagctgaatgctatagcatattgctctaggttacaaacttgtatatcatgttaccgtactgaagactgtaggcaagtgtaacacatggtatttggagatctaaatatatccaaacctagaaatgatacagtaaaaatacagtataaaagattttttaaaatgggacacctgtatgagacacttagcatgaatggggcttgcaggaattgaagttgctctgggtgagtgagtaagtggtgagtgaatgtgatggcctcggagattactgttcactactgtagactttctagacactggacacttaggctaagttcagttatttaaaattgttttctttcttcaatttattttctttctttaatttattatattaatcttagcttttgtcacttgtttactttataaactttttaatgtttttaattttgattcttttgtgataacgtttaacttaaaacacgaacatgttatactgctgaaaaagtatttcctttatattcttatttggtaagctttatttttaaatttttcagtttttttttactttttagattttttttgttaaaaactaagacacgaacacacacactagcctaggcctacacagggtcaggatcttccacccgcacatctgtcccactggaaggtcttcaggggcagtaacacgcatggagctgtcatttcctatgataacaatgctttcttctgaattcctcctgaaggactttcctgaagctggtttacatttgacattttttttattttaaatattttttattaaaaaaaatgtcaaatgtaaaccagcttcaggcaagtcctgtagaaggaatacaatctaaaataatgataaaaattagtaaaaaattgtaactatataaaccagtaacagtcatttattatcattgtcaatatatatacatacactataatcgtatgtgctatacttttatgcaaatagcagcgcaggaggtttgtttacaccagcatcaccacagacacttgggtaatgcatcgccttatgatgttaccatggctacgacattgctaggggatgggagtttttcaggtctggtatagtctgatgggaccactgtcatatatgtggcccattattgactgaaacgtcgttatgtggtacattgactacactgccggcaagctcctatttaagtaaacaaacacaataaacacaaacaaacatgagaagtccagaagaaaggccaaggatgataagagaaccttcttaggaaaaggaagctacatcagggcaaggggctggttctcacctggaagacacagtactgcacactgcagccagatgagtgccattttcatgtttcagaatggagccatctccaggatatactgttaaaagaaaactcctaacagtaacctctggagagaactagaattgaagaggacatgagtagtcaaggggacatttgctgcatcagtgttgtttgaatattttacaatgaaaatatacttatatattgagtaatttataatcataatgtacaattttgatttctacttttacctgatatttacgttaatgtctttagaatataactcattctttgggctgttggacatcctatcttacttagctggtatctctgcaattagatatttatttataaacagggattccttgagagttatcgtttacattaaatagttaaataggaagataagtattttattggaatttagtttatgcttatatcactgatattaattattgccacagaaactctacttttgaagatcaccactaatttgttatgtttcatgtttgtttgtcacaatttagggacagtcttcattgatgaccttactatttaccacagaagttcatctatgtggctccaaactctatttcaagaatatgaaaggcatgtaggttatgcctacgttctcggacccttgatagatgttttgctgacccaccttctgatatctgtagagttaccctaggctccaccttccaccaaccagttctgtgtgtgagttgcacggtcctttgttcattactaaacgttgtttttgcgctctcctgtcctctcatttcagtctcactatcttagaatcagcttcacggaaccacaggaaagacatcattgttcttcttttgcaggtagcgagtaacaccaccctctcactgagagcacctaagaaataatgttaggacttgagttgacttttgatgcatccgtgtcctttgtatcatataatatatctggattggtagagtgcaaagattatgggctcaacttgttatttgtatgactttgagcaaattgtctaaactctcaaatactcagtctttttatttatagagtagaaataacaactctaggatttggaaattgttatgaaggttcacaattattctgcatacactacagcttatacacatatggcaagcagctaggtgtggctgtttttattgagtgttttgagcccgtttccctcctttccagaacctacctcctcagactgatggatgcatgatgagttccccttgcctaagttattatttctaatcgttctttcactgcgctgccatttttagtggaaacttcattgcaaaaagtgcaaggttctcatctgtggaacttgagttgtttgctggctcccctagcttttaagtgtggtgtattaatttagtccctctctcagatgtccactataaggtaaagaattgatgccatgtcccaactaggaatgccattgcctctctgtctttgcttgttagcaagaaacgattcatgaatgagtagaaacaacaataagtgtttagaaaagtattaaatgaatgaggcagtaaaaagtgatcccaagaaaatcctagaccacttgcacctgccatgacttgttacctctgtgacctcttaccatctgtgcctccttggtcgcgtgtattgactgtagcccactttcattctgtcagcatttctcttcagtctatttagagctcccttgagccttctctctctggcaaacttctttttataacataagcaaaataacggaagatgtacattccttgttgtgtgcatggcatggatgggaaggatgaacggagtttatccatgaaaagtatggctgtcaaaaaagggaattatgaagacatgttgtatgcaagatatcttgaagttaactttttaaaaatatgaaacaacttatttccagcaaagtgcaaaatgaaaatcacagaaaaagtcaacctgacctgaagcttattcatcaccgtgcaatgagtttcaccatacagtgagtttctgacccatgtgacattgaagtcactaacagcaccggtgttacggttcactgtagattggacagcactgtgtttggggatcctggagaaatttaaagtaggagaggatgtggtctacctccagggccacacagtccagcgggaaagagataattaataagctgaagtcgaggactgcaaagtaaattctgttttacagaaggggaaacattgcgactgatttcagtatctctgctgaggtggagaggctgaggttcttctttcgtagctgctgctgctgcttcttcttcttctccttcttcttcttcttcttcttcttcttcttcttctcctcctcctcctcctcttcctcttcttcttctttttgcatgtatcaagctaacttaatggagaatgtatacattgttccatatcatactaaataatgcaaataagtgatactgttacagactcagggtcacaacgtggggccattgtaagctacacctttctcaaaagcatctggtgtatgtgaagaagttgcatatcagtgacttgctctgatgtactctataggagcccagaaaggttctctgtcttggccctcattaaggagcatttaaataccagaaaaatctagcgaagcatagcccctgattggatattagccagcatagtgtcagggctgttgtaattagagtagccagatgggaaggcaaatttagtaggggactgtcatcattacaaccacccattatacgtatactcatacatgcctcacagatgcaagctcataacaggaaacccagcagttgtggagtaggaggctagaatacaagaacattagtgagtgagagctttgcctcaggattataactaattttgaggtcagttttttcagcagtctttgttatgttcaatcttttggttccaaaaattatgtgatgactggccttaaaaaaatgtaacccaagtaagcctggtctattaacattttgctaaattcttcgtggtttgtaatggagttaaatatgattataagatttaaaaatatgaattttgcttcatgatctatctgaaggttcaattgactggacttgagtaaattattcacgacttcattaaaattcaataggactgaaagtttccgtcagatgcattaagccgtctactgcaaacgaagcgctgtgttgtagttggtgcagagggtggtttactcaatgtggcctgtgctaagtgtatggaatgcaaatgagatgtaaattttatattttactttccattaccaaaaaattatttatgtacacatcaggagaggaaaattactttcagtaaggatctgcgtggtggtgatttttaatctcttagtgggaatatataatatttttacagtactagcataaaaatgccattactgcagagagaggtcttagagtcttataatgattatcttcattgcttggagataacattttagtaaatgagatttagttaacattctaatgaaaagagctatcataatttgagagaaaattcctaagctaaaatatttttaaactagaagtttgtttacttttttttctctactagaacctaaattatgtaatttattgcaacagatggtatggaaaatttggattgtgtgttacagttttagtaaagctgatttataaaaatttataaaaaggctaccaaaaaaagtaataaaatcatagacttaaaggccttcgtggagtccaactgactcagctgatcttatgttttctcgacaaaatcagtgccaaagctaaattcatctcttgcagtttctgtttgaccttctggtcatgtgagcactgttgttaatatctcctaacactttcagtcacaagctggtaactacatttgcgaatcgcttttcagttggctttttttttgcgggggggtggggacagagtctcgctgtgtcacccaggctggagtgcaatggcgcgatctcagctcactgcaagctccgcctcacgggttcaaacaattctcctgtctcagcctcccaagtagctgggattacaggtgcccgctaccatgcccggctaatttttgtatttttagtagagatggggtttcaccatgttggccaggctagtctcaaactcctgacctcgtgatccgcccgcctcgccctcccaaagtcctgggattataggggtgagccaccgtgcccggccttcagttggcttttttatggttaaataaagttccatttttcagattctatttccagatctctgcaatcatcggatcatccctccttggtgcctcgctgaagttgtagctcccattagttcaggtggttctgtaatatcagctgccttcctcagaacgagtctcattcttccttcacatatttttttttctcaaaatgaaacattcaaaggctcctgcttccatatgtagcatgaacattatttggcaccatccttcatgttattctcaaggcactctccaacttgcccatttccctctttcaatatgatgcccaaaattagtcaccgcattccaggagcagttgggtgtgcagggaccagatggattcaggagccaacactcagaacaagagtagttcttaaccatttgaggacgcgtaccccttgagagaatcaaagccctggaatctctccatgggaaagtggatgtacaatctcagaggattcctgggccttgccgtagttcattcataaactgtgtaccttctgggacagtgggtcaagaaccctgcctctgccgtggtgaggccgtacatgggaataatcaaggaagctttttaataaccacacacacttgtataagccttaagtataaggcagagaatttgggggatttgcaactaaggagtttgtttatttttaagctgagtgtattttagagatcagattttgaaactacttttcaattataatcacctgtgtggatttttctcagaatccaatttcatttaaaaaaaatgtatttagctggctttttcctgaattgacttgttcagacatgttagttcttttaagatgaagtgctcatgagattttaaaaatagccaccaggccccatgcccagctgggttctctgttggcgttggttggatgaagagtcccctgattagctagatttgggaaaaacttcaaccaggtagaaagtaaaacagacatgtgtttcaaccactggtcctaatgtaattttttcaatgtttgtggaatttatgacatctttgaaaatacagaaatgaccggggggtgggggaaatgtgtcagtttatgaatgtgccatttaaccagataactgggcaaaatattttacaagaagtattctcatgagcggtacagagtaagagataaccacgtccatgcacatttgtgcctttccatagtgtcacacttttactgatgctatttcagtcacaaaagccaggagctgcatggaattccaaggagggaattctccctagtaccttctgttcactcggtagtcagagctgcaggcacacaagccacttcacaagtcaattgtattgcaagccatacataatagtatacttaatcaatagataagtgttacagatcaaacatttcacaacaaacaaagtaacatataacatcaagagaaaagggacaagaagaagggttaacaaaccagtcaagggagactgggagagcaacaaagacccaaagaatcccctggtcggggccaggcaagtggtccacaggttttgcaacaaagagtcttcagtgggggcagagccttcccggcaaatgccaagtgctaatcacagttgacagcaaggcagtgtcagttgagatggccgttttgagctaccaatgtcctgctctttttatggccacagagtcctctggcgaggactgatagtgacagaatgtgcttgtttttgcccttatctggttggatgcagactttatttattaagcataacatcttgtccacgttggcaaagtgccctatgaaatgtaagatggagtctttttctaagatggagttactcatgtcaagggtgctgtatacaagtgcttgatcctgtgacatggcatgctttaatcttcatttttcttccgctttttgatatctctatcttcattgattctactccaccctcttactggactcatattatcttggttctattcacacacctttatttgtcagtcattcctgttagaacattctgagtagtttgggaggtgagtgtagactgaggtttacacactaatgaggatgcttggggaaagtgaactgaaggggtggaggggatagactggccctggtgaagtgggtagcctcggatgagtttttcctgatggtctaagatgggtgtgggccttagcttcttagtacacagaacttgtgtttgagcctgatagtgaattcaagaccagagaccctgatgtgttggaattgctggttggattttacaaagaatggtggactttcaaacttatggtgaccactgttgaattttactgggacatgacaattatactagagcccctaaagtggcagacctgaagtctcgctgttctctttggtttgaggggaataagggcagatgataggcatatattgtttaaaaacgtgtttgccactttgtctcttcctcttcgcctcagtgaccttgttctccttgcaggttatggccacaccgtgcccttgtcagatggaggtaaggccttctgcatcatctactccgtcattggcattcccttcaccctcctgttcctgacggctgtggtccagcgcatcaccgtgcacgtcacccgcaggccggtcctctacttccacatccgctggggcttctccaagcaggtggtggccatcgtccatgccgtgctccttgggtttgtcactgtgtcctgcttcttcttcatcccggccgctgtcttctcagtcctggaggatgactggaacttcctggaatccttttatttttgttttatttccctgagcaccattggcctgggggattatgtgcctggggaaggctacaatcaaaaattcagagagctctataagattgggatcacgtgtgagtattacagctccctggctgctccttctgtctcctttattttatttatttatttatttatttattttgagcccagctctcactctgttgcccaggctggagtgcagtggtgcgatcttggctcactgcaacctccgccttccgggttcaagggattctctgcatcagccttccaagtagctgggcttacaggcttctgtctctattttgccattgcaagctccacttcacctctcaatgaggggtcattcataaaagcactgattgctttcttctcattgagaagttttccgaatttaccaccttctcaaccatttcattttatggtttccttcaaaactgtttatgcaaaaatcttattactgagatatttttcacaacaccttaaaattacagacgaatttcttactaataatgtaggcgttataaatgacagtgtaaaaatacatcatacaggccgggcgcggtggctcacgcctgtaatcccagcactttgggaggccgaggcgggcggatcacgaggtcaggagatcgagaccatcctggctaacacggtgaaaccccgtctgtactaaaaatacaaaaaattagccgggcgtggtagcgggcgcctgtagtcccagctactcgggaggctgaggcaggagaatggcgtgaacccgggaggcggagcttgcagtgagccgagatcgcgccactgcactccagcctgggcgacagagcgagactccgtctcaaaaaaaaaaaaaaaaaaaaaaatacatcatacagaatgtacttgataaccaactgttaattaaaaaaaaagattgctctactttattaaatattttaaggccaagaaaactaggcctcggatagagcgtgttatcaatcatgctctttaatttaccagaaaagtcttaaaagagctgcttacctcatttgtccatctggttctttttagaagaagttcgcctctattaactgtttccagaattttgtgtgtggaaaataaaatgggcattcaaattcagatggtcagggatttataattttttaacagttttcattttaaattcaatgtaatatcatagaaaacttaaccatccattttcaagaaactgttcatttctgtgtgagccctcctgtccttttcagcatgcacacagttgcagttataatgtacctactgttttcatttctgtcttgccttcttaagaatttttcaatttacgacttggctcaggtcacgttttctagcgaatcatagtagatactcaagcagccagatgctctgtcttggccctgtcttgtaattcttaaccctacaaaatgcttagttgaattgtgtgtattttgacatttcctttaaaccatgggctcagccaaaacagacgttactcataaatccctaatgctttgaacagtgcctggctaccatacaagttcgacagacttttttttgccaaatggttacttaggataattttatatttcctgtagctaccataggtattatttttagagcccatatggtattcaccaggtggcaaaaccataatccaatcatgcctctattgctcattatttagctttcttctaattcaggggtattataaatgacattgtagagaattttttttttttgagatggagtttcattcttattgcctaggctggagtgcaatggcacgatctcagctcactgcaacctccacctcccgggttcaagcgattctcctgcctcagcctcccaaatagctgggattataggcacctgccaccacatccggctaattttttgtatttttagtagagacagggtttcaccatgttggccaggctagtcacgaactcctgacttcgtgatctgcccgcctcagcctaccaaagtgctgggattacaggcgtgagccaccccacctggccaagaatatttttgtatatatacacatttcctcctctgatattcttccaagaaatgagattgctggtgcaaagtgaatacgcctttttgtgactcatagaacataatgacctggtgctttccaaatgttgttatgagttgacacgtcaccagcattatctgagtgtgacagtttcagcactcctggggtggtgatggccagtagcattagagatgttttttgtgtatgtgagtttgatagccaaataaacattatcttaactttcttttcatattataggtgattgttttgttttattttattttattctgtgacttggaaagtagaatgtttctgtaattatgtttgctagctacaataattttctcttatataaattgtcttctcataaattttgcccaaccacttaacttcttcagtgtttcatataatactaaatccttgcataacattttatcacttcttacaatgtggatcattttttaaaaagcaatctacatagaattagtttatgttttgagcatcaagaacctgagtatctaacaaatgaatattccaaagatatattagatgtgggcaggataaaatacccctgtttttgtctgaaaccccatggatatttttgtgagcattcaagagtttgacaaaataattataaaggaggctgggcacggtggctcatgcctgtaatcatagtactttgggagacgaaggcaggcagatcactaaggccaggagttcgagaccaacctggccaatatggtgaaacaccatctctactaaaaatacaaaaattagctgaaaatcacttgaacctgggaggcggaggttgcagtaagccaacatcatgccactgtacttcagcttaggtgacagaatgaggctctgtctcaaaaaatagtaataagaataataaaggaaaagacacagagatccatcaattagtctaacaatgtcattactatttttaaagtacaggagagcacactgaatgcacgatattgttttcaaaacctatagtcagattctgaagatactaaaactttgtattctgtggttaattagtttccttattcctgttatgctgccaattttagcttccctacttcatacattttcgaaaatccttctcaaatgttttaccactgggacataaaatcagaatttttgttattcttggagttttcatcttcacatttctgttcctttttatgatttttttttctgaaaactcatttttaaaatgatggaaggaattttaaatcaccatttcccatcacagattccaagcaatacattttacttgagtcaacagttatccttcattttcccagtaacaaactggtaatgttggccagtgaatagtccacatgtccaaaaacaactgagagataatgaagagcttggctttgttgctggatttaggtgcaagtgtagatagccatgcacaaggacctatttaatatcaacatacattcttaaatttttgatttagtttagtgtattagtctgttttcacactgctgataaagacatacccgagactggacaatttacaaaagaaagaggtttaattggacttacagttccatgtggctagggaagcctcacaatcatggtggaaggcaaggaggaggaagtcacatcttacatggatggcagcaggcaaagagagagagaatgtgtgcaggggaagtcctctttttaaaaccatcagatctcgtgagacttattcactatcatgagaacagcaggggaaagacttacccccatgattcaactacctcccaccaggtccctccaacaacacatgggaattcaagatgagatttgggtggggacacagccaaaccatagcatttaagactgcaatttctattataaactcttattctataatagaaattgtaagagtattgagtgcttaaaatcttccgagcaccccatgataaaacaaaaacttttctaaaacatcactggctttttgtgagccactgattataaagcagaggtggcaaaccctccttgcataaaatatcacacttgggtaagtgcagtatgttatgtgtctttaataatgccacatcagccccaagtattttttttttctcaaaaattgcagcctgtgattctaactaatccaagttcataggaggttaaatcattcttcattgtctttcactctttaataatgggtagttcctctttgaaccatgaacttaaaaacacttctaaaaattaagaaactggcaatgagtttattccttaacaaacactgtgttggcatgaggtggggaggtaaatcactcgctacttgatttatccatgttgagatcacactaagacagtgtcctgtttctcacacaggttacctgctacttggccttattgccatgttggtagttctggaaaccttctgtgaactccatgagctgaaaaaattcagaaaaatgttctatgtgaagaaggacaaggacgaggatcaggtgcacatcatagagcatgaccaactgtccttctcctcgatcacagaccaggcagctggcatgaaagaggaccagaagcaaaatgagccttttgtggccacccagtcatctgcctgcgtggatggccctgcaaaccattgagcgtaggatttgttgcattatgctagagcaccagggtcagggtgcaaggaagaggcttaagtatgttcatttttatcagaatgcaaaagcgaaaattatgtcactttaagaaatagctactgtttgcaatgtcttattaaaaaacaacaaaaaaagacaaatggaacaaagaagctgtgaccccagcaggatgtctaatatgtgaggaaatgagatgtccacctaaaattcatatgtgacaaaattatctcgaccttacataggaggagaatacttgaagcagtatgctgctgtggttagaagcagattttatacttttaactggaaactttggggtttgcatttagatcatttagctgatggctaaatagcaaaatttatatttagaagcaaaaaaaaaaagcatagagatgtgttttataaataggtttatgtgtactggtttgcatgtacccacccaaaatgattatttttgtagaatctaagttaaacttactatttataatgcataggtaaccattaactatgtacatataaagtataaatatgtttatattctgtacatatggtttaggtcaccagatcctagtgtagttctgaaactaagactatagatattttgtttcttttgatttctctttatactaaagaatccagagttgctacaataaaataaggggaataataaacttgagagtgaataaccatagtattctgctgcaataaatgtttctaccctcttgcgatagaatggtgtcagatgtctaacatgtttataaacatttttttgaattgaacaggttatgaaaaggatttattaaaaggttaagatactttgttttgaaagtacattgtgatttgcagccacctagcactaaagcatagaacttaaacacgaatccctaaatgaacagattatgttacattaatctgagaattttaaatttagaagctaaaataaataaaaatcacagctggttgt

SEQ ID NO: 675 - DNA, 33644 bp, Homo sapiens
tgctgggggggctgggttctgtggactgggaggtgttcaggctccagccagcctggcaggaggagaccagggtcctgggtcagttgaggcctcagccggcggcaccctgtggcccggacaccaacctcctgggctgtttctccccatcattccagaccccctgagggtcccagcagcatgcatggggtggccaagcgggtgcagtcaggacaactcaggcatccagatggggcaggagccaccgatggcccttctaaccccaccccagggacccggccctgggggctctgctgctcgggtgctgggctgacgggtaccgggacctgcaggcagagcccgcctctgtgcttgccgcagacaccaagctgacacccatggaattcgggaacctgcagaagatggacgaccccacggaccagtgtcaggaccctgtccctgaacccccgaggaactgctccactggctttgtaagccttggagggaacagagggcccagcaggttgagcaggaggggttgtgagcctgggaaccggtccagatcccccaccgaggactcagacgggctgtggcctttgtcctagggcatctgtgaggagctcctgcacggccagctgttctctggctgcgtggccctggtggacgtcggcagctacctggaggcttgcaggcaagacctctgcttctgtgaagacaccgacctgctcagctgcgtctgccacacccttgccgagtactcccggcagtgcacccatgcaggggggttgccccaggactggcggggccctgacttctgccgtgagtgtcccagccccctgtcccccaacccctttggcagggagggcaggggcaggcagacgtgagccctctctctgcctcccgcagcccagaagtgccccaacaacatgcagtaccacgagtgccgctccccctgcgcagacacctgctccaaccaggagcactcccgggcctgtgaggaccactgtgtggccggctgcttctgccctgagggtgaggctcccccgcccctgggaaacacaggtgcaccccgacaactagggggctgtgctcccatggccaagcctcggaagaaggaccccagtcctagtgtcccgggcccctgaggctgactgaggcccctgtcctgggccgctgaggctggctgaggatcctgtcctgggccccctgaggctggctgaggcccctctcctgggcccctaaggctggttgagaatcctgtcctgagcctcctgaggctggctgatgcccctgtcccgggcccctgaggctggctgaggcccctgtcctgggcccctgaggctggctgaggatcctgtcctgggccccctgaggctggctgatgcccctgtcccgggcccctgaggctggctgaggatcctgtcctgagccccctgaggctggctgatgcccctgtcccgggcccctgaggctggctgaggcccctgtcccgggcccctgaggctggctgaggatcctgtcctgggccccctgaggctggctgaggcccctgtcctgggcccctgaggctggctgaggcccctgtcctggccccctgaggctggctgaggcccctgtcccgggcccctgaggctggctgatgcccctgtcccgggcccctgaggctggctgaggcccccgtcctgggcccctggagctggctgaggccccagctcgctgtggggccgccatgttgttcccctgcaacgcccactgcgtggacacagcaggcgcccgtcataggcctgcctgacccctgcagggacggtgcttgacgacatcggccagaccggctgtgtccctgtgtcaaagtgtgcctgcgtctacaacggggctgcctatgccccaggggccacctactccacagactgcaccaactggtaggtcccagcccccctccaggccaccaaggatgtgctatgggacagacctgctgggggttgcaacccaggccggcaggctccctcgtctgggctacggtgtaggcaggcctggggtgagacccggtcagcctcctgacgcggaggctggaggctggtctcctggggccggcacccacgtggcaccatctcttgctctcagcacctgctccggaggccggtggagctgccaggaggttccatgcccgggtacctgctctgtgcttggaggtgcccacttctcaacgtttgacgggaagcaatacacggtgcacggcgactgcagctatgtgctgaccaaggtacggcctggctgcctggggtgctcgccggacagagggggcccatggccagcctcccacaggctcccccagcttggctgcatgtcactgctgcccctggggtcacccttgggggtccccgatgttgagacctcaaggaagcactccagctccccagcgctagtcctcacagggccatgaaggctgcagatcagagcctccagcacccacccagcattgggcctcacccagcactgggccctctgcaccttgggctgtttatttaacagactttactcttgagaatagttttaggttaacaaggaaattgagcacaaagtactcctgccccaacacacagtgtccccacgatgagaccctgcaccaaacacacagtctctcccagaggagaccctgcacccaacacacagtctccctatggtgagaccctgcacccaacacacagtctacccaagatgagaccctgcacccaacacacagtctccctatggtgagaccctgcacccaacatacagtctctgcacgatgagaccctgcacccaacacacagtctcccacgatgagaccctgcacccaacacacagtctccctatggtgagaccctgcacccgacacacagtctctccacaatgagaccctgcacccgacacacagtctctgcacgatgagagcctgcacccaacacacagtctcccacgatgagaccctacacccaacacacagtctctccacgatgagaccctgcacccaacacacagtctctccacgatgagaccctgcacccaacacacagtctccccaagatgagaccctgcacccgacacacagtctctgcacgatgagaccctgcacccaacacacagtctccccaagatgagaccctgcacccaacacacagtctccccaagatgagaccctgcacccgacacacagtctctgcacgatgagaccctgcacccaacacacagtctccccaagatgagaccctgcacccaacacacagtctccccaagatgagaccctgcacccaacacacagtctcccacgatgagaccctgcacccaacacacagtttctccacgatgagaccctgcacccaacacacagtctccccaagatgagaccctgcacccgacacacagtctctgcacgatgagaccctgcacccaacacacagtctccccaagatgagaccctgcacccaacacacagtctccccaagatgagaccctgcacccgacacacagtctctgcacgatgagaccctgcacccaacacacagtctccccaagatgagaccctgcacccaacacacagtctccccaagatgagaccctgcacccaacacacagtctcccacgatgagaccctgcacccaacacacagtctccctatggtgagaccctgcacccaacacacagtctctgcacgatgagaccctgcacccaacacacagtctccccaagatgagaccctgcacccaacacacagtctctcccagatgagactctgcacccaacacagtctccccaagatgagaccttgcactcaacacatagtctcccccgatgagaccctgcacccaacacacagtctcccacaatgagaccctgcacccaatacacagtttccctatgatgataccctgcgctggggtggaggctgcactggtaccctcacctcccaggtcatggttgacatcagcgaccctcgtggtggtgaaattccacgtttaagacagatgtgcagtgtcttgttcctgccaggaagtttcacgcagacagctccactgccctgaaaccccttggagctcctcacccctctctcgcccagcccctggcagctgctggcatttgcaccttctgagtgctgtctttcccagagggtcctatagttggcgttgcagagtgtggcctcctcagggtgcatgcagatttctgtgtgtgcctgggtgtccacacctgggggcctcctagcacacctccctctcggggactgggatggtggagtggggttttctagtgagggagaggagcacagccgggtggactggcagggccaggtgggctgggcgttggatggagtgtgaggacccctggtgtgtcgtgttccgcagccctgtgacagcagtgccttcactgtactggctgagctgcgcaggtgcgggctgacggacagcgagacctgcctgaagagcgtgacactgagcctggatggggcgcagacggtgagtggagcctggcagggcaaaccccgggaagagggaaggggcctgtctcttctgcaagtcacctctgcccaagcccttcatccctggcatgaacagcgagaggcggggaccctctggcaacactggctgtgtccattacttatgggtccacgtgactgtccctaaagggagaagctcagggccgggcctcccgggccgccatacctgacccaaggggccccaggaaggagggactgggcgcacctgcggccagcatggcttctccactgaagtcaatttatgtttagttaataaccttggttttcactgaagaatgaaaggcatggtcctcgcagaaaattcagaaaatcaggcgagcacaaggccaccttgtaggagccgcagctgcagggaaaggcctcctaggcacctgcaggcacatttcacagcctccgcggggctgaggtgccgcaagcctgccccgcgctcacacatctgtctggctgccctcaggtggtggtgatcaaggccagtggggaagtgttcctgaaccagatctacacccagctgcccatctctgcaggtgagggcagtggcttcttccccaccccggggctgcctggggtcccgccccacagcccccagcaaaacccttgtcctttgtgtccccagccaacgtcaccatcttcagaccctcaaccttcttcatcatcgcccagaccagcctgggcctgcagctgaacctgcagctggtgcccaccatgcagctgttcatgcagctggcgcccaagctccgtgggcagacctgcggtaagagggctgccttctgggcttggagcccacccactctggccagggcgcatggtcctcaacctgcctaacccgcccccaggtctctgtgggaacttcaacagcatccaggccgatgacttccggaccctcagtggggtggtggaggccaccgctgcggccttcttcaacaccttcaagacccaggccgcctgccccaacatcaggaacagcttcgaggacccctgctctctgagcgtggagaatggtacgggtgtccacggctcgcctctgtgctggccgcctggcgctggttcacccgcttccatttggcactgcaggcagcgaggccggccctgcgtgtgcctgtgagccgggtggggtggctcacgaaggggcccaaggacaggctcatggtgggcgcccaacccagcttatgtggagcttcaggaatgtggggcatctgcttcagggtcaaagaaagggtacaagtctctgttggtcaacatccgccctgaccgcctacccctgcacagggtggagtggtggggacgtggggaatggattcacccactcacccacccgttcacccattcactcactcacccactcacccactcacccacctcactcgccgactcaaccattcactcacccattcgcccactcacctcactcactcacccactcactcactcacctcactcactcacccactcactcactcacctcactcactcacccattcacccattcactcactcacccactcacccactcacccacctcactcgccgactcaaccattcactcacccattcgcccactcactcacctcactcactcacccactcactcactcacctcactcactcacccattcacccattcactcactcacccactcacccactcactcacccattcacccattcacccactcactcacctcactcactgactcaactattcactcacccattcgctcactcactcacctcactcactcgcccactcacccactcacgctttcacccactcacctactcactcacccactcacccattcacccactcactcacccactcaccgactcacccattcacccactcacccactcactcacccactcaccgactcaaccattcactcacccattcacccattcactcactcgcccactcacccactcacccattcacccactcacctactcactcacccactcacccattcacccattcacccactcactcacccactcaccgactcaaccattcactcacccattgcccactcactcacctcactcactcacccactcactcactcacctcactcactcacccactcacccattcacccattcactcactcacccactcacccattcacccattcactcactcacccactcacccattcacccattcactcactcacccactcacccattcacccattcactcactcacccactcacccattcacccattcactcactcacccactcacccactcactcacccattcacccattcacccactcactcacctcactcactgactcaaccattcactcacccatttgcccactcactcacctcactcacgcgcccactcacccactcacccattcacccactcacctactcacccactcacccattcacccattcacccactcactcacccactcaccgactcacccattcacccactcacccactcactcacccactcaccgactcaaccattcactcacccattcacccattcactcactcgcccactcacccactcacccactcacccactcacctactcactcactcactcacccattcacccactcacctactcactcacccactcacccattcacccattcacccactcactcacccactcaccaactcacccattcacccactcacccactcactcacccactcactgactcaaccattcactcacccattcacccattcactcactcgcccactcacccactcacccactcacctattcactcactcactcacccactcacccattcacccattcacccactcactcacccactgactgactcaaccattcactcgcctattcgcccactcactcacctcactcactcacccactcactcacctcactcactcacccactcacccattcacccactcacctactcactcacccactcacccattcaccccactcacctactcactcacccactcacccattcacccattcacccactcactcacccactcaccgactcacccattcacccactcaccgactcacccattcacacactcaccgactcaaccattcactcacccattcgcccactcattcacctcactcactcacccactcacccactcactcatccattcacccattcacacactcactcacttactcactcactcaacttactcactcacccactcacccattcactcattcacccactcatccactcacccactcactcacccactcactcacccattcacccactcactcacctactcactcagtcacctcactcactcactcacgcattcactcactcactcacccactcacccactcacccattcactcacccattcacccattcatccactcactcacctcactcactcactcaacttactcacccactcacccattcacccattcaccccctcactcacccactcacccactcactcacccattcacccattcacccactcactcacccactcacccactcactcacctactcaaccacccactcacccactcacttacccattcacccactcacccactcactcacccattcacccactcacgaactcactcacccactcacccactcactcactcacccattcacccactcacccactcactcacccattcacccactcacccactcactcacccactcatccattcactaactcacccattcacccactcacccactcaacactcactcacccactcacccattcacccactcacccactcatccattcactcactcacccactcacccactcaacactcactcacccactcacccattcactcactcacccattcacccactcacccactcgctcacccattcacccactcacctactcactcactcactcatccactcattcactcactcactcactcactcactcactcactcactcactcagtcattcacttcgccttcagagcttgggcgccagccgtggggaggtgggatcccatttgctggttctggccttcttcctgcagcctgggaagccagggtccagtgagcccagtggaggggccagaagggccttggtttgtctgtccacagtggtggtcactagcgtccctggaaggcggcactgtgagaggctgtgaggggctgggtgggacatgcaggaaacgagagaagcctcggttctggatgttgtaccctgcgtttgggggagcttttcctcggggagggcgccacaccacccaggctgagtgtgtagcaggatgaagggcccaacatcagactgcccagagaagctggccacccaaaccccacaccagaggccaagctgggtgggatgagtgtgctgcctgatcttaatcctaaccctatccctcctctgtccacagagaagtatgctcagcactggtgctcgcagctgaccgatgccgacggccccttcggccggtgccatgctgccgtgaagccgggaacctactactcggtaacatctgccgcctcttggcccggtggggctccagccactgagcctcacggctgcctccaggagggctgggagggcactggtgggctcagcaggcaggactaacctttctaggctgtgatgggcaccaggggctggaacccagtctgtctgtccagctccattccccacatccccacccacccattcactcattcacacattcaccactcacccacacactcacccattcacctactcactcacccgttcacccattcactcacccactcactcacccattcacccatttacccactcacccattcactcactcacccactcatccacccattcacccactcactcacccattcacccatttgcccccccactcactcacctattcacccatttacccactcacccattctctcactcgcccactcacccattcactcactcatccactcacccacccattcacccactcactcacccgttcacccattcgcccccccactcacccattcactcactcattcactaacttactcactcactcactcacccactagctctttcactcactcactcactcattcattcactcatatcttcactgactcattcactcatttacccactcactaattccttcacctactcatctacttactcattcactcatccgctcactcatttactcactcattcacgaatttcttcactcatttactcatttactcactcactaattccttcacttattcattactcactcactcatccactcactcacccactcactcactcatccactcactcactcatccactcacccactcactcactcattccttcattcattccttcactcactcattcactcatttactcactcactaattccttcacctactcattcattcatccactcatccactcactcactcatccactcactcatccactcactcatccactcactcgctcattccctcattcattccttcactcactcattcactcatttactgactcactaattccttcacctactcattcatccactcactcacccactcactcatccactcactcactcatccactcattactcatccactcactcatccactcactgattccctcattcattcctttactcattcactcatttactcactcactaattccttcacctactcattcattcacgcactcatccactcactcactcactcatccactcactcatccactcactcactcatccactcactcgctcattccctcattcattccttcactcactcattcactcatttactgactcactaattccttcacctactcattcatccactcactcacccactcactcatccactcattactcatccactcacttactcatccactcactgattccctcattcattccttcactcactcattcactcatttactcactaattccttcacctactcattcactcactcattcatccactcattcactcactcactcatccactcactcacttattccctcattcgttccttcactcattggttaaccatgtttatggcatttttcttgcacttccagccctacactaggcccaggggctaaacttcaggggtttgttgcccacctggccccaggggccaaatgagaattaggccaaggctgagctgatgtgctgtgtctgaggcaagctggtcttggctggacctgttgggtcacagagatgaaggatctggttctcccagtaacccctgctctgcacagtggttctgctccatgacatgccaagcaattctgctgagggggcaggatgcctgtgaggactcacagaggggtcctgggggcaggaagacctgggatgggaggaccctggctgctggatgtgtggcctgcagggcgtggggggccaccaggtgtgggctggggtctctgatgccccgatgacccccttccctgcagaactgcatgtttgacacctgcaactgtgagcggagcgaggactgcctgtgcgccgcgctgtcctcctacgtgcacgcctgtgccgccaagggcgtgcagctcggcggctggagggacggcgtctgcagtgagtgcctgccaagcccagcccctttccctcgctgggtggccgcgggtcttggggtgcccccagtgtgcacaggttgctctaagggcccccgtcctctgtgctgggcttgagggcaaggagcgcccaggtcagtgtggccttggacccggccgaggaggggaggggagggtagccgagagggctgggctcactcactgctggctgcccactgccgggctgtgtgtcctgagaatcccctcttcctggcatcccgcagcgaagcctatgaccacttgccccaagtcaatgacgtaccactaccatgtcagcacctgccagcccacctgccgctccctgagcgagggggacatcacctgcagtgttggcttcatccccgtggatggctgcatctgtcccaagggcaccttcctggacgacacgggcaagtgtgtgcaggccagcaactgtccctgctaccacagaggctccatgatccccaatggggagtcggtgcacgacagcggggctatctggtaagagctcccgctgtggactggggggtccctcgtgtctcctggcccaggctgaggctctgaccaccatctcctcacagcacctgcacacatgggaagctgagctgcatcggaggccaagcccccgccccaggtgagtgccagaaaggaggcactgtggcccccagcctcctcatctctataagaaatcctgaaaaatggcttcagggttagccccaccacaagtcagcggggctggtggttgtccatcagctgctcagtgtcaggcatggtttgtgccctctaggcagcaagggggaagaagggagggtgtggggcgcacatatgacactcacacccactcatgcacatgctcacacacccactcatgcacacgctgacacgcccactcatgcacacacacccattcatgcacacactcacactcatgcacatgctcacacacccactcatgcacacgcattcacaccctcatgcacacgcactcacacccacttatgcaacactcacacacccactcatacacacgcactcacacccactcatgcacacacacccattcatactcatgcacacgctcacacacccactcatgcacacacaccgtcatgcacccacactcatgcacacgctcacacacccacatgcacacgcactcacacccacccactcatgcacaccacacccactcatgcacacgcactcacacacccacttatggacacgctcacacatccactcatgcacatgcacacacacccacacatgcacacacacccactcatgcacacacactcatactcatgcacacacactcacacccagttatgcaacgctcacacccactcatggacacgctcacacacccactcatgcacatgcactcacacccactcatgcacacgcacccactcaatgtgcacgcacatggcacagacacgtcctccctgaacacatgtttgaggcaccgcagcagcctgtggctggccccctgacggcccctccctccccagtgtgtgctgcgcccatggtgttctttgactgccgaaatgccacgcccggggacacaggggctggctgtcagaagagctgccacacactggacatgacctgtgtaagtccctgaggactccccaatgacagaccctccatctgcccctgcctgctaagggcgcctgtccccagggtgggcagtggtgagcctctgacacattaggccatgggctgccccacgtcccagaggacccctgcccatgcgctcccggactccctggtcctgtggtccctccactgtggtgtgggtgagctgtccctgggaggacctggcaggccccgtgccctgccccatcactcagtggtgtctgctggccctgcagtacagcccccagtgtgtgcctggctgcgtgtgccccgacgggctggtggcggacggcgagggcggctgcatcactgcggaggactgcccctgcgtgcacaatgaggccagctaccgggccggccagaccatccgggtgggctgcaacacctggtatgccgggggctcaaagcccatggggggtgtcaggcccaggaaaccagaggccctccttaaagacgggcgagcccccagcacaggggtcccgggaaaacgcagggcacagactcagggctggacgccaccagcagccccagccagggaggcccagtgggcgcgtgtctatggtgccaggtccccccaggggtaggaaggctgcacccagtcaggcaggcaccctgtgtgtgctctagcctgacccccagatgtcccccagcacctgtgacagcaggatgtggcggtgcacagatgacccctgcctggccacctgcgccgtgtacggggacggccactacctcaccttcgacggacagagctacagcttcaacggagactgcgagtacacgctggtgcaggtgagccggcgcgtttggggtcctcacggcggcccccgtggcccgaagctgctcactgcctctctgcggctgccccagggtgcacacaggttgtccccgcctcatcctccttgcgggaaggagggcagggcctgcctggtccttgatggcctctgcttccccagaaccactgtggcgggaaagacagcacccaggactcctttcgtgttgtcaccgagaacgtcccctgcggcaccacagggaccacctgctccaaggccatcaagattttcctgggggtgagcgaggctgggtggtcgcatgccctccaggaggctcccatggcagcgtctggtcaggtgggctggggttcttgctgggggccctgagtgaccccttgccatgcagggcttcgagctgaagctaagccatgggaaggtggaggtgatcgggacggacgagagccaggaggtgccatacaccatccggcagatgggcatctacctggtggtggacaccgacattggcctggtgctgctgtgggacaagaagaccagcatcttcatcaacctcagccccgagttcaaggtgagaccacgcccctcgtccaggccagggccggctggaaacctggaggtggggagcgtggaacaggtgggcagagacgagaggcacagagacacagagagaaacacagagatggaagcggggtgggaagtgggggggacggagccttggcaagggcagcgggtcaggagactccttggctgggtgtcagtgttctggggctagagcaaaggcccgcaccctggcggatttgcccgcagcctggacactggaagtccagcagggcatccacagggccgaactctttcagaaggctctggggggctccttttggccccttgcatctgccggggtccccagcgctccttggctgtggccacatcacttggatcgccgccccgtcttcacgcagcctcctccctgtgactgggtctaagtttccctcttttataaggacaccaggcattggattcaggacccactcattacctcagtctgcaagaccccatctcccagtgaggtgccatgcataggcgccggggtcaggacttaggcgggtccttcgaggccacgtcagcttctttttctccaggaggggcttgcctctggctccggccctcggtgctcagctgcactgcccggggcctccccaggtgtagctggaggtgggaaggaggaagcagcacctgtggtcgctgttggccacctgggtgggaggaggcggccgcagggcagggtggccctgggtgggaggaggcggcctaggggcagggtggctctggccttctcggtttgctgcacccacctccacctctcccggtgcctctgcagggcagggtctgcggcctgtgtgggaacttcgacgacatcgccgttaatgactttgccacgcggagccggtctgtggtgggggacgtgctggagtttgggaacagctggaagctctccccctcctgcccagatgccctggcgcccaaggacccctgcacggccaaccccttccgcaagtcctgggcccagaagcagtgcagcatcctccacggccccaccttcgccgcctgccacgcacacgtatgctggccggggggcgtttctctgggcccaagggggtcatggtgacccaaggagcccccagaagggagaagggaatggggtctgggagacagctgccaaccaagggtgtgggctgctgggactggcgctggtatggactcgcctagaggggctgggcttccagctctgacacctgtcagctatggtttcggggccctggggggtgttaaccccaagggctgccgaggaagccccaggcactgtggatatccagatgggcccagccggccacttggggatgggcattcgccctccctgagctccactggaactcggccccggtcaatgtgccagcatgggcccggtccccaagagcccgcggggtggtgggggggtccctggaacctgaagccccgtctccctcaggtggagccggccaggtactacgaggcctgcgtgaacgacgcgtgcgcctgcgactccgggggtgactgcgagtgcttctgcacggctgtggccgcctacgcccaggcctgccatgaagtaggcctgtgtgtgtcctggcggaccccgagcatctgccgtgagtgcgagtgggcacctggggaagaacaggaagcgccggcagcgtgtgccccaccacactcgccgctgatgcgtggggtgtgtggggcgggtggggaaggtttccaaataaacagaaacacctgggcccagagaggagggcgtggctgacagaggggtccctggcatggtagaacgttctgggcagaggggtcagcagagctgcccagctctagagaggagggcgtggctgacagaggggtcgctggcatggtagaacattctgggcagaggggtcagcagagttgcccagctctagagaggagggcgtggctgatggaggggtccctggcatggttgggcagagggttcagcagagctgcccagctctagggaggagggcgtggctgacggaggggtccctggcatggttgggcagagggttcagcagagctgcccagctctagggaggagggcgtggctgacgggtcgctggcgtggtagaacgttctgggcagtggggtcagcagagctgcccagctctagcccacacggagccttgccgggaacgggcactgctggatctgctctgactggagaccccactctggtggcagcctccgtggcaccctgataattggggggtcccgatctggcccaccctcccctgtccccatcttgtgatggccgggaggtgcaggggagggaagcggctttagaacagccctggggtgcggggcctctgcgagtgagttcctgggaccccaccgagcccttccttcctccctgcagctctgttctgcgactactacaaccccgaaggccagtgcgagtggcactaccagccctgcggggtgccctgcctgcgcacctgccggaacccccgtggagactgcctgcgggacgtccggggcctggaaggtgggctggggccggtcggagggtggcctgggctccgccgcctgtggccttctcctggcccctcgaggagcctctgtggccccagcttccagcacattctggtgctgtcggcgaggcccgctgcttgggggctgggcggagccctccagagcgaggtggacgacactcggtctggttgtgactctggcctctttggcccacaggctgctaccccaagtgcccaccagaggctcccatctttgatgaggacaagatgcagtgtgtggccacctgcccaaccccgcctctgccaccacggtgccacgtccatgggaagtcctaccggccaggtgcagtggtgccctcggacaagaactgccagtcctggtgagtcctttggggggaggaatatggagcctgcagcatgcaggggaatttgaccacggcctgggctttgggtggggctgggagcggcagggctggggacctccccgttactggagttgaagcttgggtcctgtcctggcccaggcatctgtgacatcagcttctcagggaccagcacccccatgtcctgagtcccagaggcgggactgggtgtagggctcctctgggcagaaaaccagcacaacctctggggagcaggctcgaggggctcagggggcggcagggggaagctgggccgagatggagccctagggtccccaccggaaggatgcccattaaaatcacccctggaaagtaatggctccactctggcacccacctcccctgacccccgactggaggggccccacgagggagggaccttgggctgacgctggagagacaactgctgggacccaggtggggccggcctcctgtcccccagtctgggggtgcaatgcagttcccagggaactccacccctgtcggagctgctccctgcccgccgttggtagcatgggatgcccgtggaaggcacacggccgcccccacgcatcggcctgcccttcttccttgtctccagcctttgtacggagcgcggcgtggagtgcacctacaaagctgagggtgagcggccggcagcccctggggctggggtccgggggtctctgtctgcgcccagcctctgacgggcctgggccctccgtccccatagcctgtgtctgcacctacaatggacagcgcttccacccaggggacgtcatctaccacacgacggatggcacgggtggctgcatctccgcccgctgcggggccaacggcaccattgagaggagggtctacccctgcagccccaccacccctgtccccccaaccaccttctccttctccacacccccgcttggtaaggcaaatgtggccgaggagccccagggtgagccccctcccactgcctggcacagctgcccttgctggacgctgaggtcacagcagctctgggcatgggcggcagcccctgaggatcaagaagggatcgaggagcagggagtcgggctcggggatgacctgctgtttccccaccagccacctgcagtggggagggcctggcctccaagtcaccccagcaggcctggcgtccaagtcctgccctcagcagcccccgggcctggcctcattggggtgtcaggggtctggcagcccaggctggccccggggatgcatggctatcacttgcctcacaatgctcagggctcaggtacccccatgtcctcgccctcttctgggggatgtctcagggccccaaggcatcatctgagcttctctgagagtagaaagctctggaactcacgtgttctggggcacagatgtgtggaccctgctcagggcatggcctgggagccacttccctaaaactcagtcggttcgcctggctcttcagaacctgtgccgctcatgtgggttctgagcagggaccgcgggtggggacaggaagacagacctgctggcgcagctccagaccggtgacagagccgcagggaggggcgggcggcccccaagtgcgggcctctcatgctcagctgccttctcttctgcccacagtcgtgagctccacgcacacccccagcaatggcccaagcagcgcgcacacaggccctccgagcagcgcctggcccaccacagcaggcacttctcccaggacgaggctgcccacagcctctgcctcactgccgccggtctgtggggaaaagtgcctgtggtcgccatggatggatgtcagccgccctggacggggcacggacagcggtgacttcgacacactggagaacctccgcgcccatgggtaccgggtgtgcgaatcacccaggtcggtggagtgccgagctgaggacgcccccggagtgccgctccgagccctggggcagcgtgtgcagtgcagcccggatgtggggctgacctgtcgtaacagggagcaggcatcggggctctgctacaactaccagatcagggtccagtgctgcacgcccctaccctgctccacctctagcagtccagcccagaccactcctccaactacctccaagaccactgaaacccgggcctcaggctcctcagctcccagcagcacacctggcaccgtgtctctctctacagccaggacgacacctgccccaggtaccgctacctctgtcaaaaaaactttctcaactcccagccctccgccagtgccggcaacatcaacatcatccatgtcgaccacggccccggggacctctgtggtctccagcaagcccacccccacggagcccagcacatcctcctgcctgcaggagctttgcacctggaccgagtggatcgatggcagctaccctgctcctggaataaatggtggagattttgacacatttcaaaatttgagagacgaaggatacacattctgtgaaagtcctcgaagcgtgcagtgccgggcagagagcttccccaacacgccgctggcagacctggggcaggacgtcatctgcagccacacagaggggctgatttgcctgaacaagaaccagctcccacccatctgctacaactatgagatccgcatccagtgttgcgagacggtgaacgtgtgcagagacatcaccagactgccaaagaccgtcgcaacgacacggccgactccacatccaaccggagctcagacccagaccaccttcaccacacacatgccctcggcctccacagagcaacccacggcaacctccaggggtgggcccacagcaaccagcgtcacacagggcacccacaccacactagtcaccagaaactgtcatccccggtgcacctggacaaagtggttcgacgtggacttcccgtcccccggaccccatggtggagacaaggaaacctacaacaacatcatcaggagtggggaaaaaatctgccgccgacctgaggagatcaccaggctccagtgccgagccaagagccacccagaggtgagcatcgaacacctgggccaggtggtgcagtgcagccgggaagagggcctggtgtgccggaaccaggaccagcagggacccttcaagatgtgcctcaactacgaggtgcgtgtgctctgctgcgagacccccagaggctgccacatgacctccacacctggctccacctctagcagtccagcccagaccactccttcaacaacctccaagaccactgaaacccaggcctcaggctcctcagcccccagcagcacacctggcaccgtgtctctctctacagccaggacgacacctgccccaggtaccgctacctctgtcaaaaaaactttctcaactcccagccctccgccagtgccggcaacatcaacatcatccatgtcgaccacggccccggggacctctgtggtctccagcaagcccacccccacggagcccagcacatcctcctgcctgcaggagctttgcacctggaccgagtggattgatggcagctaccctgctcctggaataaatggtggagattttgacacatttcaaaatttgagagacgaaggatacacattctgtgaaagtcctcgaagcgtgcagtgccgggcagagagcttccccaacacgccgctggcagacctggggcaggacgtcatctgcagccacacagaggggctgatttgcctgaacaagaaccagctcccacccatctgctacaactatgagatccgcatccagtgttgcgagacggtgaacgtgtgcagagacatcaccagaccgccaaagaccgtcgcaacgacacggccgactccacatccaaccggagctcagacccagaccaccttcaccacacacatgccctcggcctccacagagcaacccacggcaacctccaggggtgggcccacagcaaccagcgtcacacagggcacccacaccacaccagtcaccagaaactgtcatccccggtgcacctggacaacgtggttcgacgtggacttcccgtcccccggaccccatggtggagacaaggaaacctacaacaacatcatcaggagtggggaaaaaatctgccgccgacctgaggagatcaccaggctccagtgccgagccaagagccacccagaggtgagcatcgaacacctgggccaggtggtgcagtgcagccgggaagagggcctggtgtgccggaaccaggaccagcagggacccttcaagatgtgcctcaactacgaggtgcgtgtgctctgctgcgagacccccaaaggctgccccgtgacctccacacctgtgacagctcctagcacccctagtgggagagccaccagcccaactcagagcacctcctcttggcagaaatccaggacaaccactttggtgacaaccagcacaacctccactccacagaccagtacaacctatgcccatacaaccagcacaacctctgctcctacagccagaacaacctctgctcctacaaccagaacaacctctgcctctccagccagcacaacctctggtcctggaaatactcccagccctgttcctaccaccagcacaatctctgctcctacaactagcataacctctgcccctacaaccagcacaacctctgcccctacaagcagcacaacctctggtcctggaactactcccagccctgttcctaccaccagcataacctctgcccctacaaccagcacaacctctgctcctacaaccagcacaacctctgcccgtacaagcagcacaacctctgccactaccaccagcagaatctctggtcctgaaactactcccagccctgttcctaccaccagcacaacctctgccactacaaccagcacaacctcagctcctacaaccagcacaacctctgcccctacaagcagcacaacctccagtccacagaccagcacaacctcggctcctacaaccagcacaacttctggtcctggaactaccccaagccctgttcccacgaccagcacaacctctgcccctacaacaagaacaacttctgctcctaaaagcagcacaacctctgccgctacaaccagcacaacctctggtcctgaaactactcctagacctgttcctaccaccagcacaacctcttctcctacaaccagcacaacctctgctcctacaaccagcacaacctctgcttctacaaccagcacaacctctggtgctggaactactcccagccctgttcccaccaccagcacaacctctgctcctacaaccagcacaacctctgcccctataagcagcacaacctctgccactacaaccagcacaacctctggtcctggaactactcccagccctgttcctaccacgagcacaacctctgctcctacaaccagcacaacctctggtcctggaactactcccagtgctgttcccaccaccagcataacctctgcacctacaaccagcacaaactctgcccctataagcagcacaacctctgccactacaaccagcagaatctctggtcctgaaactactcccagccctgttcctaccgccagcacaacctctgcttctacaactagcacaacctctggtcctggaactactcccagccctgttcctaccaccagcacaatctctgttcctaccaccagcacaacttctgcttctacaaccagcacaacctctgcttctacaaccagcacaacctctggtcctggaactactcccagccctgttcccaccaccagcacaacctctgctcccacaacaagcacaacctctgcccctacaaccagcacaatctcggccccaacaaccagcacaacctctgccactacaaccagcacgacctctgctcctacacccagaagaacctcagcccctacaaccagcacaatctctgcctctaccaccagcacaacctctgcgactacaaccagcacaacctctgctactacaaccagcacaatctctgcccctacaaccagcacaactttgtctcctacaaccagcacaacctctactactataaccagcacaacttctgcccctataagcagcacaacttccacaccacagaccagcacaacttcggctcctacaaccagcacaacttctggtcctggaactacttcaagccctgttcccaccaccagcacaacctctgcccctacaaccagcacaacctctgcccctacaaccagaacaacctctgtccctacaagcagcacaacctccactgctacaaccagcacaacctctggccctggaactactcccagccctgttcccaccaccagtacaacctctgctcctacaaccagaacaacctctgctcctacaaccagcacaacctctgcccctacaaccagcacaacctctgcccctacaagcagcacaacctcagctactacaaccagcacaatctctgttcctacaaccagcacaacttctgttcctggaactactcccagccctgttcctaccaccagcacaatctctgttcctaccaccagcacaacttctgcttctacaaccagcacaacctctggtcctggaactactcccagccctgttcccaccaccagcacaacctctgctcccacaacaagcacaacctctgcccctacaaccagcacaatctcggccccaacaaccagcacaccctctgcccctacaaccagcacaaccttagctcctacaaccagcacaacctctgcccctacaaccagcacaacctctacccctacaagcagcacaacctcctctccacagaccagcacaacctcggcttctaccaccagcataacttctggtcctggaactaccccaagccctgttcccaccaccagcacaacctctgctcctacaaccagcacaacctctgccgctacaaccagcacaatctcggccccaacaaccagcacaacgtctgctcctacaaccagcacaacctctgcctctacagccagcaaaacctctggtcttggaactactcccagccctattcctaccaccagcacaacctctcctcctacaaccagcacaacttctgcctctacagccagcaaaacctctggtcctggaaccactcccagccctgttcccaccaccagcacaatctttgctcctagaaccagcaccacttctgcctctacaaccagcacaacccctggtcctggaaccactcccagccccgttcccaccaccagcacagcctctgtttcaaagaccagcacaagccatgtttccatatccaagacaacccactcccaaccagtcaccagagactgtcatctccggtgcacctggaccaagtggtttgacatagacttcccatcccctggaccccacggcggggacaaggaaacctacaacaacatcatcaggagtggggaaaaaatctgccgccgacctgaggagatcaccaggctccagtgccgagccgagagccacccggaggtgagcattgaacacctgggccaggtggtgcagtgcagccgtgaagagggcctggtgtgccggaaccaggaccagcagggacccttcaagatgtgcctcaactacgaggtgcgtgtgctctgctgcgagacccctaaaggttgccccgtgacctccacacctgtgacagctcctagcacccctagtgggagagccaccagcccaactcagagcacttcctcttggcagaaatccaggacaaccactttggtgacaaccagcacaacctccactccacagaccagcacaacctctgctcctacaaccagcacaacctctgctcccacaaccagcacaacttctgcccctacaaccagcacaacctccactccacagaccagcatatcctctgcccctacaagcagcacaacctcggctcctacaagcagcacaatctctgctcgtacaaccagcataatctctgcccctacaaccagcacaacctcttcccctacaaccagcacaacctctgctactacaaccagcacaacctctgcccctacaagcagcacaacctccactccacagaccagcaaaacctcagctgctacaagcagcacaacctccggttctggaactactcccagccctgttaccaccaccagcacagcctctgtttcaaagaccagcacaagccatgtttctgtatccaagacaacccactcccaaccagtcaccagagactgtcatccccggtgcacctggaccaaatggtttgatgtggactttccatcccctggaccccacggtggggacaaggaaacctacaacaacatcatcaggagtggggaaaaaatctgccgccgacctgaggagatcaccaggctccagtgccgagccaagagccacccggaggtgagcatcgaacacctgggccaggtggtgcagtgcagccgcgaagagggcctggtgtgccggaaccaggaccagcagggacccttcaagatgtgcctcaactacgaggtgcgtgtgctttgctgcgagacccccaaaggctgccccgtgacctccacatctgtgacagctcctagcacccctagtgggagagccaccagcccaactcagagcacctcctcttggcagaaatccaggacaaccactttggtgacaagcagcataacctccactacacagaccagcacaacctctgcccctacaactagcacaacccctgcttctatacccagcacaacctctgccccaacaaccagcacaacctctgctcccacaacgagcacaacttctgcccctacaaccagcacaacctccactccacagaccaccacatcctctgcccctacaagcagcacaacctcggctcctaccaccagcacaatctctgcccctacaaccagcacaatctctgcccctacaaccagcacaacctctgctcccacagccagcacaacgtcagctcctacgagcacttcctcggctcctacaaccaacacaacctctgcccctacaactagcactacctctgctcccataaccagcacaatctctgcccctacaaccagcacaacctccactccacagaccagcacaatctcttcccctacaaccagcacaacctccactccgcagaccagcacaacctcttcccctacaactagcacaacctcagctcctacaaccagcacaacttctgcccctacaaccagcacaacctccactccacagaccagcatatcctctgcccctacaagcagcacaacctctgctcctacagccagcacaatctctgcccctacaaccagcacaacctctttccatacaaccagcacaacctctccccctacaagcagcacaagctccactccacagaccagcaaaacctcagctgctacaagcagcacaacctccggttctggaactactcccagccccgttcccaccaccagcacagcctctgtttcaaagaccagcacaagccatgtttctgtatccaagacaacccactcccaaccagtcaccagagactgtcatccccggtgcacctggaccaagtggtttgacgtggactttccatcccctggaccccacggtggggacaaggaaacctacaacaacatcatcaggagtggggaaaaaatctgccgccgacctgaggagatcaccaggctccagtgccgagccgagagccacccggaggtgagcatcgaacacctgggccaggtggtgcagtgcagccgggaagagggcctggtgtgccggaaccaggaccagcagggacccttcaagatgtgcctcaactacgaggtgcgtgtgctctgctgcgagacccccaaaggctgccccgtgacctccacacctgtgacagctcctagcacccctagtgggagagccaccagcccaactcagagcacttcctcttggcagaaatccaggacaaccactttggtgacaaccagcacaacctccactccacagaccagcacaacctctgcccctacaaccagcacaatccctgcttctacacccagcacaacctctgcccctacaaccagcacaacctctgcccctacaaccagcacgacctcagctcctacacacagaacgacttctggtcctacaaccagcacaaccttggctcctacaaccagcacaacctctgctccaacaaccagcacaaactctgctcctacaaccagcacaatctctgcctctacaaccagcacaatctctgcccctacaaccagcacaatctcttcccctacaagcagcacaacctccactccacagaccagcaaaacctcagctgctacaagcagcacaacctccggttctggaactactccaagccctgttcccaccaccagcacaacctctgcctctacaaccagcacaacttctgctcctacaaccagcacaacctctggtcctggaactactccaagccctgttcccagcaccagtacaacctctgctgctacaaccagcacaacctctgctcctacaaccagaacaacatctgctcctacaagcagcatgacctctggtcctggaactactcccagccctgttcccaccaccagcacaacctctgctcctacaactagcacaacctctggtcctggaactactcccagccctgttcccaccaccagcacaacctctgctcctataaccagcacaacctctggtcctggaagtactcccagccctgttcccaccaccagcacaacctctgctcctacaaccagcacaacctctgcctctacagccagcacaacctctggtcctggaactactcccagccctgttcccaccaccagcacaacctctgctcctacaaccagaacaacctctgcctctacagccagcacaacctctggtcctggaagtactcccagccctgttcccaccaccagcacaacctctgctcctacaaccagaacaacccctgcctctacagccagcacaacctctggtcctggaactactcccagccctgttcccaccacaagcacaacctctgcttctacaaccagcacaatctctctccctacaaccagcacaacctctgctcctataaccagcatgacctctggtcctggaactactcccagccctgttcccaccaccagcacaacctctgctcctacaaccagcacaacctctgcctctacagccagcacaacctctggtcctggaactactcccagccctgttcccaccaccagcacaacctctgctcctacaaccagcacaacctctgcctctacagccagcacaacctctggtcctggaacttctctcagccctgttcccaccacgagcacaacctctgctcctacaactagcacaacctctggtcctggaactactcccagccctgttcccaccaccagcacaacctctgctcctacaaccagcacgacctctggtcctggaactactcccagccccgttcccaccaccagcacaacccctgtttcaaagaccagcacaagccatctttctgtatccaagacaacccactcccaaccagtcaccagtgactgtcatcctctgtgcgcctggacaaagtggttcgacgtggacttcccatcccctggaccccacggcggggacaaggaaacctacaacaacatcatcaggagtggggaaaaaatctgccgccgacctgaggagatcaccaggctccagtgccgagccgagagccacccggaggtgaacattgaacacctgggtcaggtggtgcagtgcagccgtgaagagggcctggtgtgccggaaccaggaccagcagggacccttcaagatgtgcctcaactacgaggtgcgcgtgctctgctgcgagacccccagaggctgcccggtgacctctgtgaccccatatgggacttctcctaccaatgctctgtatccttccctgtctacttccatggtatccgcctccgtggcatccacctctgtggcatccagctctgtggcatccagctctgtggcttactccacccaaacctgcttctgcaacgtggctgaccggctctaccctgcaggttcgtgagtgtttctggtgcaattgtttctgagctcaccctggtcagttttttatccaggaacgccaagctgtgatgatgataggagtctctgctctttgtggcacaggctcattgtcacagagtggctgctggcattctctgaaattttttcccattacacaggtggtagaaagtgcccctctggctctgggagttttttgcttctcctttgagcaggactccactaaaggctgccatgtcccttcctcttacaggatccaccatataccgccacagagacctcgctggccattgctattatgccctgtgtagccaggactgccaagtggtcagaggggttgacagtgactgtccgtccaccacgctgcctcctgccccagccacgtccccttcaatatccacctccgagcccgtcactgagctgggatgcccaaatgcggttccccccagaaaggtaaccccctacttctcacccttctgaaggctcaggggctcctacagggaacttgaatgtctttgcaattagtcttcagctgcaaagtcttgagaaggtcactggcgctagtggaggcagcccggccgtcaggagagggccatgctgtagcccggcgtctctgatcaccctgggcttcccaggcacgtgctttccagacactgggtgtgtggggccgaaggctgaggctgtgctgaggacagccagggccagagcaggtggatgaggctgcacagccagggagtgtggcagagccagggaggagccactcccacaccagaggcccctgcccgggccagctcggtgtctggggtgggtgctgagggtggggcaggaaggaaactggggcacagccaccctcccctgtccccacacgggactctcgggactgtgaccccgagaaccaaggggtgccccggagatcgggagaggccggaccctgcaggtctctgtgcttctgcagaaaggtgagacctgggccacacccaactgctccgaggccacctgtgagggcaacaacgtcatctccctgcgcccgcgcacgtgcccgagggtggagaagcccacttgtgccaacggctacccggctgtgaaggtggctgaccaagatggctgctgccatcactaccagtgccagtgtgagtggagcgccgagcgggacccagggcagccggggcagccactccccacccaggtggaaatgggcggggcagaggagggggcttggctgaagcagaaaagaattgggtgggacagcaggaaggacttcccagcatcaaggcggggccgcatggggccgagcctccccgcttaggggtgctgagtgaatccctgtgagcctcggagcagcctggctggagaaggtggaggagtctgtccctgcctcgctccagccttgtcaagcgcccgctggatggagctctgtgcggacgctggccacgtgtgttctgatgacgtgagggtcttgtgcgccctgtgagatgagacggtggggggtcagggacagatgtgacctgttgggaggaaagccccagggccatggtgccaccacccgagccacccgtaaggctgcccctggggcctggcaggtgtgtgcagcggctggggtgacccccactacatcaccttcgacggcacctactacaccttcctggacaactgcacgtacgtgctggtgcagcagattgtgcccgtgtatggccacttccgcgtgctcgtcgacaactacttctgcggtgcggaggacgggctctcctgcccgaggtccatcatcctggagtaccaccaggaccgcgtggtgctgacccgcaagccagtccacggggtgatgacaaacgaggtgggggcgcgcccggtgtgccgcggagggggtgggggacgcggctttcccggcaagagcctgagcagcggctgaccgcccgcccgcctgccttctgacttcccgtcgaccacgccctgcgtccagatcatcttcaacaacaaggtggtcagccccggcttccggaaaaacggcatcgtggtctcgcgcatcggcgtcaagatgtacgcgaccatcccggagctgggagtccaggtcatgttctccggcctcatcttctccgtggaggtgcccttcagcaagtttgccaacaacaccgagggccagtgcggtgaggccacagggctcccgggcatcgtctggcattcgcgggggcgggggtgccgggcaggggcgaggccaccacgtgccgcgtgtgccggtgtctctgctttctggctgctctgctgagtgcaggccacaggcatgaggcttacgcctgccggtacctgcagctccccagtaccatagggactgtcccagggttgttctcgggggacagtgaggcacaggcagggcccgctgcagttcaccaagttgtgaccctgagacaccagggtcctgtcccccagctgggggtggggccagccggctctgctgtccagcagcctgacccccaccgcgtctgcccaggcacttgcaccaacgacaggaaggatgagtgccgcacgcctagggggacggtggtcgcttcctgctccgagatgtccggcctctggaacgtgagcatacccgaccagccagcctgccaccggcctcacccgacgcccaccacggtcgggcccaccacagttgggtctaccacggtcgggcccaccacagttgggtctaccacggtcgggcccaccacaccgcctgctccgtgcctgccatcacccatctgccagctgattctgagcaagtgagacttgggtgcaagggagggagggtcagtgtggccgccccacctcccacccttccaagggctggaggggaagaagcgcattttcagggggctcctgagaggaaacgagagctgctggtaccacagaccaaggaggggtgggtgttggggagaagtgggtgccggggaggggtgggcagtggggaggggcgggtgccgggaaggggtggttgtggctggaatgctgccaaggggtcaccagggttggccggctgggccgtctctgaggctctctgctggctcaggtgtatggacgggggcatcggtcaccacccccaggcagcttccaggtttgcagggcaggggctgggggggccaggaagaagaacttgcagaaataaatggatgatgccatctggacccccaccccccgcccccaagcacacagaatgtgtggaaggagcccgtccggggatacaggagggcggccacacaccagtggctgctctgggactcgcctcgcctggagactgccctgaagcctgggagcctgacgtggagcaggcaggtggccggagaggctgcacccagcaccctgcccatccctcccacagggtctttgagccgtgccacactgtgatccccccactgctgttctatgagggctgcgtctttgaccggtgccacatgacggacctggatgtggtgtgctccagcctggagctgtacgcggcactctgtgcgtcccacgacatctgcatcgattggagaggccggaccggccacatgtgccgtgagtgccaccactgtcctcagggtcccaagtcgcttgtgaggggcacaggcacgccggacggaccaacagggtgggctcgggcagtcagggggggacctggaggaggagggggcagccccagggcagagtgcacccagttccctggagagaagggagggcgtccacgtctgggagcccgtggcggggcactggggtgtgggaggccgtagccaggcccaggcccacaggtggctgcgggcagctccggagcagatgttggtgcccagcggcccgcgttgctctgggtgggtgccctcccaccctctcaggtgtggcttcccctccccacagcattcacctgcccagccgacaaggtgtaccagccctgcggcccgagcaacccctcctactgctacgggaatgacagcgccagcctcgggtaggcaccctccctcctggccctgccatgggctgctggagccacccagtccccagcctcccgctgcatctcccactcccaggctggggtccttctcaccggagggaaaaaggagacccaccaaccctatgctctctacagggctctgccggaggccggccccatcaccgaaggctgcttctgtccggagggcatgaccctcttcagcaccagtgcccaagtctgcgtgcccacgggctgccccagtacgtgccccaggccggggctggggggtgtggcaggactgggcctgtgactgttggccaggtcctggggtctaccctggccccaatatgggaccctgcctctcgcccctattgtggtggctgacccccagtaacctcagatctctctccttccagggtgtctggggccccacggagagccggtgaaggtgagtggaaggcatggcccaagagggcactggggtccaagagcccgaggagggaggctcttgaaacaccggccccagaaatggtcaggtggggctcaggggtcggggtgtcctctctgtgtcagaggcccagagaaagggctgcgggaggagccgggctcccagaaagactcgggatctcccttcccaggtacccactctgtccgtattggggacggtgccggggcgtctgtcctggtgttgctctgtgggtgggtgct

SEQ ID NO: 676 - DNA, 451408 bp, Homo sapiens
aacccggcggttccgcagctgtgtttgggagacttgggggcgcattagcctggacagctccctgatcggtaacccctttgatgtgtgttgaatgaatgagcgtcgttagcgtagtagtaaatttatgggagaattaaagcaatccagataggggtcactacggagactttaattacccagggactgtgaagtggggaagagctgtctgtggaggagcgccacaccatgtcttagattcaggcaggccccggattctggtgacccattactctacggtcactgagggtccgggcccccaggactcagaggcaggagacaggaaaagcctgacttagaatcggggaaggacctggagtcgcacatgggggctcccgaaccgcggccccaatactgcactgcgccgcagggaagagccccgggaggggcgcgggtccccgccccgggcgcgcgcagccctgccccgcctcctcccggtgcgccccgcccctcccggcgcgtgccgcccgcgcgcccgaggtgctctggaggaaccggcccggcgggcaccccctgccccggcgcaggcgcgatcgcgggccgcccctcccgccgggcgccctgcacgcgcccccgccccgcctccgcaggctcccccgctccgggcgcctctgattggctctcggccgggccagcaggtgtcggcggtggctgcggccaggctggccctggctgcctgcggcgcgggcgcctccctcgcagccgctgctgccgacgccgctgcgctcccgcctcctgtcggttcccgggttcccgctgcggctgcggttctggcagccgagcccccgcggtgctgcagcccagctttagcgcgcagaccgacccgcgccccttcttcgccgccggcagcctctaatccacgcggcgcgttgcggcaggtgccctgggcgtactgaggcgcggtggcctgagcccggccgccatcgatgaccccggtcgcggacttgcttcaggctggccaccccccgtgagtaccgtccgcctccctcttctcccctctggcagctttgcgccactctcccctcaacgttgccgcaacttcgggggtgggtgtgtgaaggtgtggaggtgtctctcacgctcccccgcaccctgtgcgcgtccggagccaggaaccctaggcgcggccagtcagcctctgcggaggggcgaggggcgcgggtacttgaacttgctcagggatcatcgcggagccagaatcgcctctttctctcgctgctggggtgggagctcgcctctgcgtttccctcgcgttttccgatcccggatggccacgtagtgcttgggctgcggttcaccgcgtacctactgtgctgcgggcgcaccggcgggacgcctcaaaccatccgttaagcgccccgcaagcagcccagcgcgacggacctgactcaaactcttaattctgtaaaacgggggtaatcagggactctctcaaggtcacagctggtgctcagagttagaacacaggtggattgcgtctggccctcgcccgcgggctgcctggggaggggagagctgttggcggggcggtcacttcagcttcatcccgggttcctcctcatactccctttccgccacagccgccagacttgaagaggtagggagccaatcccagggggctctacatagatttggaggtaacggcggaggatcttcctgatggacgcgtggagcggaaagattcagtggtgggaaccccaagacctgcggctttttggagcacttgctccccttcttgttccttaatttactgacgtcttggcagggtaggggaatttgttcttatatccgtcctgctcctcttttcttttgccaaataagcaccgtccccaaggataagtacgtatcccaaaactcttaaatgcacacactggtttgggcctagggacttcctaagagaagcgagtacgctgtgggcttggttcgctaacgttggctcctatccgctcctagaaaatgccttgagtctggcttcatttccatgctctccatctccccgaccatgatctcgatttgttgattttcttgacacttactcaggggaggaagactgagactgggggctggccagtcttggggtatgcaaatgatgtcgggtgtgattcttttactccaggtcctttgaggtggctccagtggggccgcctgtggtgttgtgggcgcttctcagagctctgggctggggagagcgtcacctagcctctcttgccattatcaccttgtcccttcaactcagcctcccccaccccaactctgaaactcagccatgagatcaatacttagttttgtgatgactgaccagcatctttgaacctgaactttttcatttataaaatgaaataatccccgccgcctttcaatcttcccaaggaacttggagttcataggatatgataaatgtgaaaatgcactggggttttattaaaaagtcgaaggaagatggttcaaggcatctgggtctacggtggaaatggaggtaatttaaaaaattttacagcaatatctgggaccctatttgcagatttcaaaatctttttagagaaatttagtttcccaagactttgaagatactgctttccatcttcctgctcacgttcctttgcctggccatgggcagctgcgtctctcctaattacccaccactacctccatctgcgagctgtctctgtgggccagaagctgtgtctgtgggactgtttctggagagtggggggaggctgtgtgtgtgtgtgttgtctctgaggagtcaaagtgtgtctctgtagagatggtgtgtatctcttggtggcgcagtgttctgtgtggtctgggtttcgtttgtctgcgtgtatggtggtagaagggagagttatccggctgcagaatttgttcacttttgagaaagtgaagtgttagccatactcagctcagtcatttaaactagcggtagcatagattatgttctatctccttcctccctgcccagagggattcccgatggctgaaaaatatcccgtagaaaacaaggcttccccctgattttgccttcgaattattattgtgtatgcacagactcttgccggaaagccaagttaaagggagatgactgatcagaccttggtgaatttaacagtctgttgaagtataattccagaaaataatgcagttctgaaggatacactcagtggattgtcacaactgagcacacctgtgtaaccagtgccctgattaagacccagaatatttccaatcttcccattacccctacctacaggcactatcctccaagggtagccatcatcctgcttagttttatcaggttagttttatttttattactattgttatttattttatcattttagttcccaagctaaaatgagacttcttgatgattttctacctcctttttaataaatgcaatccaagagtagttatacttaagccagtacagaaaaatagaaggaataatttagccttacaatctgggtgaagaatgacttggttgtcccaccacaccttgatcattagttatttggtggtgtaacaaacctgatcccagatgtaacagtgctgacattggtcaatggcggctggtttgttcccataagagctttttcatagggtgaattaaagtaatgcaaacatgaaattatgtgatattaaaatatgaatgaagaaaaaatgaatagattctcatttgatatataaaaaggaagtattttgaattcctcaaagataaaaagttgacagagaatcagaatttgaaagctgactgatttatgaactgttggtgttgttgccacatggtggcgccaggttggctggagaactgaaatacctaccatcttttcccaagctctcagaaaggaatcccaggaataaaatccaacaatccaacaactcagtatctccgaacatgatttccaactactattttccatatctagcaagtagatcccttgtatggtccctgctactaaatccatgggtagaactctatcccagctctttatgaagatggccgtgggatgggggcaggtgcttgttggagggagctggaggtgggacactgttgcctttccctcagcaagatggagttaaggtggtgtgtccttgtgattttaaagagggttaactgagaagcaagctttggtcgcctcatcctaccccagaatctcttcagaggtttgaaggaatgagttctcattccgaaggctggtatctcttttcacagagccctgtcgatgctgaacctggaagaatacatagccctggctgtagccacgctactgttgctggaagacatgtcccaaaatcccacagagcatgcccaagtgacccgggagatgtggggatgttgtatccagatatggagaaggctaagtggacccagctggtgcccttctcccatccatcaccttttgtttttattgtcagcacgactgagatgctgtttagaagattgtattcatttggtggcttccatgcccataatcaccaagagtgttgagtgtttgtcatgtgttgggcacgataattatatttattcttcacaataggaggaggatggctttccaattttaagataaaagaactgcaccttgaaagttacacactctaagtttacacactatgcaagccggagtgaaggttaagagccaagtgcctgagacaacatccctagctgagttgtactcttctgcagtggccggaggtggaggggagtcttatatataattcttttgtcttcactggcacctactctagcactttacatgtagccacttaagtgtaagtatggaattgctgaaaatagaaaattctgtcataagcaagaaggacagtgaaagatgagaacttggggtcaagtccattcaacctgcaatgctgggactcagcgtgcctactagagtgtgtagttttattatgtgtttaaaacaacatgttatggacacctgtcttatctatttttgtgatttttttcacctaactttttttacatgtgttgataacatatattgatcattgtaaatctagttgactcattttagcttagcattcctttgatatgccacagtttatatattgatagataaaagatttttctacctcttggtattattaaatatattacaaggaatatccttgacaagatcttgtagaaatgtacaagagtgtgtcttgggcatatatcctcagaaggggaacaactgagtagtaggatatgtatgcttaaatcaacattcatctgttattttagctctcctaggtttggcaggttgccctcctactgcattgtgttggagttccttgtattcccatatctttggctgtgactggtattaatcagatgttttgattttggctaatctgagaagcttggaatgtattttactgctcttttactttgcatttcccttagagattatctttttaatatatagttttaatatagtttttcaattttttgtgtatttccattggtttttttactggcaaaattttgtttttcatagttgggtctttgaactcctctgaaatttgtatacctgtgttgttgaggcaggagtataattgttttccatattgaaaaccatttaccacagtatcatttaatgaatagtttactattttctcacttattttgttgccatctctgacatatgctaatttccgttatatccttggatctgtctcttgactctctgttctactcatgtttttgtgattcctgagctaataccatttcatttaattattaaagctttataataaatcttctcttcttaccctttttccttaaaactgtcttggctattcttgatgctttaggcttcaacatgaattttaggatctatcccttcctatgaaaattcctgttataatttacattgaatctaaaggttaattagaggagacttttaccttttcactattgatatgttcctttcatggacatggcctatctctatacattattttgtaggtcattctacaaggctttataatattctccataaagttctgaaacttgtattaggcaccttataggttttcattatcatttttcagttgaggtataagtcacatactatacaattcactcattgaaagtttacaatttagtgtttttagtaaatttgcagggtatgcagccatcaacacaatctaattttagaatatttttgaaccctgcaaaataaaccctgtacccattagcagtcatttctcagttcttatccctccacgcaccctgccacacacccagccctaggcaaccttaccaatctactaagtctatacatttgcccattctggatatttcatataaatggaatcatacaataatacagtatgtggcattttgtgtctggcttctttcacttagtgtaatgttttcaaggttatctaagttgttgaatgtatcattgcttcattcctttttattggtgtatttcatcatatatatgtgtgtgtgtgtgtatgtatgtatatatatatacacatacatatcacatcttagtatcccttcattagtccttagaagttttattgctcttgtgaatgggatcatctctcctctagctacatttttaaaattggttattgccagtatatagtaagggggctgtttttttgtattctaattttctatttggcatctttgttggtttgtagattctctggatattctgtagaaagccataggtactacaagtaatggtggttttgtttcttctgttttaaaactgtttatatattttttccttggaatattacactgcctagggcctctggcataatgtagaggaatagtggtgatagtggacctcccagtctggtatgactttgataatgttttaaatattcaccaagagtatggtggttactttaggtttgtggcagatttgctttaacgtgttaagaaattgtatacttttggtattctaatagcgtttttttttttttcaattatgcttatgttaaatttttatcatattcttttttatatcctctttaacaaagttgaattattagctataatatcaattcattttgttttccttccaaagtttgtattatgaaaacgttatatttccaaatgtaaaattatattttaatattgaatttgccttttctttttttctttttttttttgttttgttttgagacagagtcttgctcagtcacccaggctggagtgcagtggtgcaatctcggctcactgcaagctccgcctcctgggttcacaccattctcctgcctcagcctcctgagtagctgggactacaggcgccggccaccacgcccagctaaattttttgtatttttagtagagacggggtttcaccattttagccaggatggtctcgatctcctgacctcatgatccacccgcctcggcctcccaaagtgctgggattacaggcgtgagccaccgcaccagcctgaatttgccttttcaaatcatactgacaacctatcctgagagtaaactccccttgtaggtatttttctttcttctcttacttgaggatcagtgtcttgaagaaagatcagactgactgaagagtttacaaaggctaataaatatgaagcactctgaacagtgcctggcacttaagtcttagttattatcataattatacaatgtagttagtaataaattatcaaagagcgttgatttggagtcctgaggaggaggcttcactagggggaggccggcccaaatggagtggctaatggagaatgtggtatttgacttggcaattgaaattaaattaaactaagtgtgttaatataaaacataataattatagaaatataggcaaacagaagaaagtaaaaatcacctatattcccaccacttagttgcttttgaaatttttatatatttttttccagaggtcatttgatattgtatacataaatccaaaccttataaaatattcattttctgaatctcactagttattaagcctctgtaatgataacagccttcacatcatcacatgaaaacattcattaatgaattgcccacttatatgtaggtccccattgtgatgtcttaagatagcactaacgagtgtctgcctactaagcatcatttcctttatgggccagttgctcctcagttatataggattttactggacatgatagtgcaaattcattgtagaatagaattgcaaatcttgcaaaagatggagaacttcgtgaaactgatgaaactaggttgacaatctgcagaaaacacttgctgattgttgaacacattgattgctgacagccctaaacctggtaaggatcgaaaaagagacagtatctgcatgctccagaagagaatgagttgaatgacaaaataaggagaggtccttttgatgcccatcctcaaataattttgctcaaaagtgatactgtttctgagcttgtcagaaacgtcaaatgctcattgaaggatgttttgtgctcttaagtttgctggggaatttattccccaaatatgaaaacatgatttattttaaggtagcattttccagaagaaatatgctaggaatacatgtaatttaaaatcttctcatgggcacattaaaaacattttttaaaatggtggaactaattttaataatatatttaattcagtatatcaaatatacttttgtatatatttcaagataaaatcaatataaaattatcaatggaatgtgtgacattcctttttctatactaagcctttggaatctagaatgtattttatacccacaacacatttcaactggactagtcacatttcaagtgctcagtagccgcatgtattgtatagtgtggttctaagaactagtgtaaagttgtatatcaaaatttgctaaaagattaaataaaatgtatcctcttgtttttttcccttaaaatgtaatactaatcaaaactttttatttcccattatttactgtgatattttaagtggattcactttaactgacttttctctggtaacaagtatccttgaataatatggaccatatgaatattattttttaaaaataaaatgatactttaaaaaacttaacaacacatcagcaactttaatgccagtatttattcttctgtcattactttcatccttcaaataatctgtttaatctatgtactgtaatttgttcaatgaaaccattcttttaagacattaggcactttagacttttattaacttcaactttgtagacattttttattttcttgagatgaagtactttgtcaaagttagtttactttaagcttttgatatatattttcaaataaccctccagaaaagtttataaatttatcttgccatcggtagtatatgagtatgccaaattcccatgccttgcctttgataagtatgattattcaataacagtgctagtttcttgggcaaaaagaagaaacccagaaccttgctttttatttcacctttctcaactggtgaggcagaatgtatctgcatatttattggctcttcatggccaacttcactatagagttatccatggaggttgttttttatttcctgtgcattctgtaacttgcatttattatttggtgtttttgaaagaatagttaagttgttttacccagatcatgttcatatttttaactactaaatacctttccatcatatgaaataacatattttattaataagtttttctatgatagacttttgattgtttctttaattttgggggggtattacatagatgcattcagtaaacatccttgaaatttatttatgcacatgtacaagaaactcttgaagatatatgcctagaagtgaaattgcagggtcttattttatgtaaactttgaatttgaccatttgatgccaaattactccccaaagtgacaatactaatttaaatttctatagcaatgtagatggattgtatctgtcacattaaggagataatactacagaaggaagaacaaagatgttaaaggagaaaatacataggtatatatttttgtgtatatataaataccctaaagttcaattagaaagctcagaggtttttgaccttttcattttgaatattgcatcatataagtgattgtacataaatatatcataaacctcatataaatatttaccagtggggcgcggtggctgatgcctgtaattccaacactttgggaggccgaggtgtgtggatcacctgaggtcaggagtttgagaccagcctgaccaacatggtgaaacctcgtttctactaaatacaaaaaattagctgagcatggtggtgcatgcctgtagtcccagctacttaggagcctgaggcaggagaattgcttgaactcaggaagcagaggttgcagtgagccgagattgagccattgcactccagcctgggcaacaagagcaaaactccatcttaaaaaaaaaaaattacctagctggggaaaactggtaagagtttaaatggtcagctatttagtagtgcctttaatgaggacagactacaagaggaagtaaacacctgttcgggagaaccaggaaagcacatctgtccagctctgcccctgtctcacccatcctagggtgtagattctaccattggacaattattcctttttgtcttctattctgttaaaatttagaagactttcgttggggtaactgcaaagtaacactgtgatattaacaccctaatgtgaatgaatatatgtgatcaattgctagtgagaggcagaccagaacagcgtgacaccaccagagggttagtgaggaaatggcagtgaggtggacatggttgggggatgggctggatgatttactgaaagaaacctctcccacttccaacttaccctgaggatgaattctgcatttctgcagggaaagtaaaaagaactttatgaaactgtgtgcctaaaagctttcagaaaactgtttttggttttttattcaatcattatcttccctagataattatgagttaaattttctgtgtatatttatataacatcatctggggcaagaaaaaacactgtaaggaattccattttgtggctgtgatttacaatgtgataccactgatgagacagatgtgtgatctgcagccgggatacacaaatccatgctgtgggctgacagtttaatcttactgagctgacactggggaagaaaatgcaaaacgtgtgtgccccaggaaggatgagtgcctggaaaacaggtgcccatgacctcgggatctaatgtggctatttgccaaaagcctcaaataatcttctgacactgaatcctggtggctcagataacagtgtcctgtgatatggttccctctttttggtgtgaaatgtaactatctcaaagtgtgttgggtcattttctagtctgtcaagcccagatgacaggattctggtgaaatctttggggaaaagaaaaatacccaagcctctttacatgatggttttgtttgtttgtttcctgaagagatcccagtatgtgtaagcagtgcttccagttcctaaaacctttctgacttccccttgaaaacctctgtctccagcatcatttcattttccctatgtagctccagcctcagaaaatatggcaggtgctgcttttgtgtttgtcttacatgaatacagttttgttgctttgcttcttctgaaaagcaatttattaatcattagagattttgatttactagaatgatacgtaaatagtattatgtttgagatgagtatctttcttttacagctaattataagaaaaatcagaaatgttgttttcattgttttaatccttgttcaaagtctttcagaaacccaccaatcaatttttcagctctgtggtccagaggatgtcaggtgcctctcctagaactgcagatcttgcagtctggcactggaatgttgctgagatcccctaaaggctccttcatgctcccaggtctgaatccttccttttgcaggttccaagtacctgatgcatgttcttcccactccccctgccaccatccactttctgcttgggttgcttttccctcaggctgctgctgatggtggatggggatgcaatgctgacattttccccttctcttttataaatgatctgaaagcagcaaagagaatgaaaaacaaaagaccaaacatttttcacaaatctgaaagatagttaaaattgcttccccaaaaggtggaaacattgctagaaaaagtgggatcatgggatgcatgggaggtacctggaaggaggcagaaggatgtgctctgcatgttcagtcaagagcacctgaaggtgagatttcctactggagtgcaacacccaagtcccttgtacatagtgggataaggaagcctgcagaggcagcaaacacttcctgctgtcctccactgcccacccccgacccctgtaccaccccgccccgacttagtgccttctttgccttttggccaatctcaccagagtttttactggttcttttcagactttccaaagaaccaacttttgactttgtcttctctatcctatcattgtttctatttattaatctctgttctcatctttattatttctttcctatttctttgggttttttttctctaatctcttaaatttacatgattaattcattaacttacagcttagcttctttcctatatatgcatttaggactataaatttttctctaagtattgcttcagcagtgtttttatttcacaagtttcgatatataatgtttttgttattgttcacatgtgaatttttaaatttttcattataatttcttctttgacttatgacttatatgttttttcctagaactttttaatatttttttttctattttaattcatggtgaccagagaatatggtctacatgattccagttatttgaaatttgttgatgcttgttttgtggcctggtacatagttattgttcacaaatgttccataacttcttgaaaagaaagttattggttgcagagattcatatctgtttattagctgaacttagttaattatgttattcaaatattccattttttaactgattttttgcagtttggttaatcagttattgaaggagaagtatatgaaagccaatttattaatttcatcttgtgctttccttttgttttgtatattttgaaggtgccttttagtttaagtgtataccattatgagaaaccctcttagtctctagtaatacctcttgtttttaagtctgtgtttaagagagctatactatattatatttttaagttgacatataataattatacatatttatggtatgtagtgatgtttcaatatatacggtatacagtgatcagatcagggtaatttgcatgtccatcatttcaaacatttatcatttctttgtgttagatacattcaatgtcatacttctagctatttggaactctataacaagcttgtctgtgccccatgggctgcatgtggcccagaatggctttgaatgtggcccaacacaaattcgtcaaattcgtaaactttcttaaaacattatgagatttttttttgcgattttttttttctcatcagctctcattagtgttagtgtattttatgtgtggcccaagacaattcttcttccaatatggcccaaggaagccaaaagattggatacctctgctctatagcatattattattgactatagtcatcctgtaatgctgtagaacactagaatttgttactctcatctagctgtaattttgtatcatttaacaattctctccctttctctacccttcccagcctctagtatcctctgttctactttcatttgtatgaggtcatcttgttttagcttccacaaaggagtgagaacatgcagtggttaactttctgttcctggcttatttcacctaatgtgatgtcctccagttccattcatgtttccacaaatgacaggatttgattctttttttttttttatggctgaatagtatttcctggtgtatatatacacctcattttctttacccattaacctgatgttggacacttggctcttgtgaatagtgctgcaataaacatgggagtgcagatggctttgcttttcttttcttcctttttttttttttttttttgagatagagtctgactctatcacccaggctggagtgcagtggcgcaatcttggctcactgcaacctccgcctcctgggttcaagtgtttctcctgcctcagcctccccagtagctgggattacaggtgcctgccaccacgcccagcaaatttttgtattcttagtcgagatggggttttgtcatgttccccagactggtcttctgacttcaagtgatctgcccgcctcggcctcccaaagtgctgggattacaggcgtgagccaccgtgcctggtcagatgtcttttcaatacactgatttcttctcttttgaataaatgcccagtagcccagtagtgagattgctggatgatacagtagttctacttgtagctttttgaggaacctccatactgttctccatagtggctgtcctattttacactcccaccaacagtatgtaagtgttttctttcctccacatccttgccagcatttgttattttttgtctttttgataatagccatcctaactggggtaagatgaagactcatagtggttttgatttgcattttcctgataattagtgatgttgagcattataaatatatttgtggaacatttacatatcttcttttgagaaatgtctacttagagcatttgccttctttttaatgggatttttttttctgttgagatgtttgacttcattttatattctggatattaatttcctgtaagatgaatagtttgcaaatatttttttctcattctgtaggttgtcttatcactctatttattatgtattgtttcctttgctttggagaagctttttagtttgatataatccctttgcttatttttgcttttgtttcccatgcttttgaagtcttatccataaaatctttttccagatcaatgtcctaaagtatttcccctatgtttttatctagtaattttgtagttttgtctcttacatttagatctttaatccattttgaattgatttttgtttaaggcgagaagtggaggtatagtttcattcctctgcatatggacatcgttttctcagcaccataatttaagagattatcctttcctcggtgaatgctcttggtgcctttgtcaaaaatcatctggttgtagatatgtggattaatttctgggttccttattctattccacttgtctatgtgtttgtttttatggcaatattatgctgttttggttattacagctttgcagtatatttttaagtctggtagtgtgatgtctccagcattgttctctttgctctggattgctttggctgtttggggtcttttgtggttccatacatagttttggattttgttttctatttttgtgaagaatgtcattagtattttgatagggattatttcattgaatctgtaggttgctttggatagtatgaccattttaattatattcattattttgaaccttgaacatggcatatttttccatttgtattctcttcaatttctttttatcagtgttttatatagtttattttgtagaggtttttcacctccttggttatatttatttctaggaaccaggtattttgttttattttttgtagccattgtaaatgggattgccttctggatttctttttcagatagttgattgtttgtgcatattaatcctactaatccgactgatcgtttttttttttctttttctttttaacagacagtttctcactctgtttcccaggatagagtgcagtggcatgatcatagctcactgcagccttaaactcctgggcttaagtggtcttcttgcctcagcctcccaagtaattgtgactataggcatatgccaccacatctggctaattttttaaaattttatatagagacaaggtccaactatgtggcccaggctagtctcaaactcctggcctcaagtgatccttccaccttgtatttccatagtgctgggatcacaggcattgagccactgtgcccagccagtgctattgattcttgcttgttgatgttgtatactacaactttattgaatttgtttatcagttctaagagctttttggtagagtattttgattttttgctatataagattatgtcatctgcagagacaacttgactttttcttttctatttggatgccctttctttctttctcttgcctatttgctcttactagtacttccagtactatgttgaataaaagtggtgatagtggacatcctcgtcttgcactagttcttggagaaaaagcttttggctttttcccattcagtatgatgttagctgtgggctagtcatatatggctttattttgttgatgcactttccttctatacctaatttattgagagtttttatcatgaagggatgttggatttcattaaattttttcattgcatctattcagataatcatatattatagtttttgcccttcattctgttgatgtgttgcatttattgatttgcaggtgttgaaccatcgctgtatccttgagataaatcccacttcatcatggtgtattatctttttgacatgttgtgggttttttgtttgttaaggatttttacatctatatttattagggatattggcttgtatttttcattgttatttttctgatctggttttgctatcagggctatgctggcctggcaaaatgagttagaaagaactccttatgcttcaattcctttgaatagtttgagaatagttggtgttaactattctttaacagtttggtagaatttagtggtgaaatcatctgatcctgagattttcttttttgggaggctttttactactgattcaatcttgttacttttttaattggtctgttcaggttgtctatttcttcttgatgcaatcttggtaggttatatgtgtttaggaatttgtccatctcttctaaggttttaaatttatgggtatatagttgtttataatagtctctcatgagcctttgcattttggtgatatccattgtgacatcttttttgtttctgattttatttatttaggccttctctctttttttcttagtctagctaatagtttgtcaattttgtttatatttttttaaaaaaacaattttttgttatctattgtatttttttagtctcaattttgcttatttctgctctttattattttttctttctactaattttgaatttggtatgtttttgctcttctattttcttgagatacatcgttaggttatttatttgaaatctttctacttttttgatgtgggcatttattgctatgaacttgagtctttatactgcatttgctgtgtcataggttttgatacgttgtgtttctgttctcatttgtttaaaataatttttaaatttcctgcttaatttcttcttttacccattgatcaggaacgtgttgtttaatttctgtatatttgtatagttttgaatattcttattattaatttccagttttattccattgtggtcagataatgtatttaatatgatgttttaaaaaattttttgagacttgttttgtgtcctaacatatggtcagcccttgagaatgttatatgcgctgatgaaaagaacatgcagctgttgggtgaataaatatttattagacccatttggtctggggtgcagtttaaatccaatgtttctttgttcatattctgtctaaatgatctgtctaatgctgagagtggggagctgacatcctcaatgattattgtattgaggtttatttctcccttttgatctaataatattttctttatatatttagatgctccagtattggttgcatatatatttacaattatattatcttgctgaattgattggtctctttattattatataatgttctttgtctctttctattgtttttggttaaagtctgttttactgatattatatcaggcaatatatagaagtatagctactcctgctcacttttggtttccattcccaaaagggaatatcttttttcacccctttactttcagtctatgggtgtctttccaggtaaggtgagtttcttgtatacagcatatagtagggttttgcattttaatttttaattttttgtttgtttgtttttagagacaagatcttgctttgctgcccaggctggagtgcggtggcatgaccatagctcactccagcctcaaactcctgaactcaaatgatcctcccacctcaacctcctcactagctaagagtgttcgcatgtgccaccatgcccagctttttaaaaatttctttgtagagatggggccttactgtgttcactaggcgggtctcaaactcttaggctcaagcgatcctcccatcttggcctccccaaatactcagtttataggcgtgagccaccgcatcaagccaggtcttatttttttaatccattcagccaatctgtatcttttaattgaggaatttaatctgtttacattcaaattattattaataggtgagaacttactcctgtcagtgtattggttgttttcttgattgttttgtatatcttttattctttacttcctctgttattacttttgttgctgcttgattttctatagcaatgaggattggttccttttttttcttctttgtgcattgcctttaccagtgagttttgtaatttcacatttggtgaatgtgatgataatttcacacttggtgaatttcacatgctggtagttactgtcttttcacttccccatggaagatgcccttgagcatcttgtctagtggtgatcaattccctgtttttgcttgtctatgaaagattttatttatccttcaattctgaaggatagctttgccgaatataatattcttgattggcagtttttttttctttcagtactttggatatatcattccattctctcctgtcctgtaaaatttctgttgagaagtctactcttagtctcatgggattcccttatatgtgacttgatgcttttctcctgctgtttttagaattcgttgtcttagacttttgacagtttgactgtaactcgccttggaaaggacctgtttgagtggaatctatttggggtcctttgagcttctaggtgtcgatgtctatctgtcttctaggaacttatggagttttcagctattattttattaagtatattttctacatgtttcttcttctcttctccttctggaatgcccataatgtgactatttatttgcttagtggtgttccataaattctgtaggccttctccatccttttaaattcttttctctctcatttttttgtctgcctgacttattttaaaaaacttatctttaagttcagaaattatttcttttgtcctgtgttgtctgttgttgaggctccctatttattagtctgttgtattgtcttgtatattactgagttttcttaagattatgattttgaattatttctggcaatttatatatatatataatatcttttatttttccataagttattggggtacaggtggtatttggttacatgagtaagtttttagtggagatttgtgagaggctggtggacccatcacctgagcagtatacactgcaccatatttgttgtcttttatctctcgctcccctccaactcttcctcccaagtccccaaagcctattgtatcattcttatgcctttgcatcctcatagcttagctcccacatatcaatgagaacatacaatgtttggttaccaactcctgagttatttcacttagaataatagtctctaatctcatccaggccattgcaaatgctgttaattcattcctttttatggctgagtagtattccatcatatatatatcagagtttctttatccactcattgattgatgggcatttgggttggttccacgattctgctattgtgaattgtgctgctatgaacatgtgtatgcaagtatctttttcaaataaagacttctttttctctgggtcgatacccagtagtgggattgctggatcaaatggtagttctacttttagttctttaaggaatctccacactgttttccatagcagctatactagtttacattcccaccagcagtgtagaagtgttctgtgatcgccacatccatgtcaacatccactgttttttgattctttgattatggccattcttacaggagtaaggtggcattgcattgtggttttgatttgcatttccctgatcgtcagtatgattgagatcttttactgtagaattattgtgtttctttagatgtgtcatgttttcttgcatttttatgtttgatgtgtccttaggttgatgcctacacatctagtggaacagttgcctcttccaattctatggagaatgtttcacagggaaagacttatttgtattgataggtcttggggttttggttgggtggtatgcattcactttggatttagctggacatagtaatgtagttcctgttctgttttttcacttgtagtccacactaaagatgtttgtgagtttctcagtgtcctaggctgtgagaggttgtggtgattctggtgaggctgctggaagtgggcttgctggggtgtttctaaggagagcttgcatgcacatcgtgtgttggctaacttgagtcctggctcaatggggttggggccatggggctgttattctggccagggacactgtacttttttttatacataataccattgcacacctaatagattatagcatagtgtaagcacaacttatatgcactgagaaacctaaaaaaaattgcatgagttgctgtattgtaatatttgctttattttaggggcctggcaccaaactcacaatttctctgaggtatgccaagttgtgaatgcaactgtacgtaggctctttctaacatcctggcctctcagttctttaccttttctgctcaaattatctctcctccacctggccctgccactcacttccacagttgtaacctagactttgtcattcctagtaactaccagcttcacaatctgtttcctgcttatgttctctgacaaccaatcttcaatttctaaccctctctctctgacttcaactctaaaagttcctcagtgtctctttcagtctctaaccccagttgcttgagattctcttattttgccttttccagctactcttttgtggtctaccctatagaaaaaccttcatacaccctcacttcacttatctctttagggcaatattctattcacttggatgaaccatagcactggtcaaatcctgatctttacctactccatacctgcgtttaggatgctgaatgtggctggagaagaacttacagttaactggcctcacgtgaccatgaacctcaggtggatccttgttgctgcctgatagttccctagtccttgtactctcttattctcttcattgatgtctcacatttttctcctgtctcctcaaatatctatacctcgtcaccattctcactcttacacattgtcccggtttcctctctcactgagaaaaccaaagccattgtgaggaactttcacaggcctgcaccactgtctgctcacctgccatatctgctgccctttgttctgtgaccaatatgaaatgtcgctccactccctagccctggagcccaccttcttcaaatattcaagcatatcaccctagtaattttcttctcctctgaatttcactttccttctctctaccacatgtttctcatgggcttacaaatatgttatttttcttttcttggaaaaactccctctttagcttacttccactccgagctatggctcccatttctttgctttcctgtataaaaaagaaaaaaaactgctaaaaaagagttgtctagactcgctgtatgcaaataatcttctcccattctctcttaaacccatccctgcagattgccagcccagtttcatcaacttcaccggaaactttcaagattatgaatgaccaccatgttatggaatacaatgtcaattcttagtactcatgatacttaaaattttagcagccttcgaagcaaccaatctgttaatcctacttgatgcactttcttcaccaggtctcaaggatatactcttgctttacctttaccttctaaatctctggaagttctttctcatattctgcttgacctcttagtgttggactgccccaggactcaggctttaatcttctttacctgtttatttatcttacctcctatagactcatcttgtttcatggttttaattaccatttatgccagtgatcttcaagcatatctatttaggctggacctctctcctgaactccttgaatgacctacttgacatctccccctggatgtgcaataaatatctccaaatcaaccttctaaaagctgaactcctgctcttccctccaaaactgttccgttagcattttttgcatctcttagttgcctaggtcccaaccaatataatcattattttcctgtgaatacaatacatttatttgtggcttaaaactttttcttaatataaaattattaatcccatattttaccttctttttaatacttatttttgaaatctggtgcatatttttcaatcatggcacatgtcaatttagatataaatttttataagaattacttgatttatatctatatttcataaaatacacagttgaaaaaataaatcagtatacctatgtcattctacatatatttacacatttctaatagctgaattgaatatcacttgaaattctaattaattaaaattaaattcaattaaaaattcagtttagttgcattagctatgttttacacactcaatagccacctatggctggtggctctcgtattggacagtgctggtagaaccatcttgtgggatggtttataagtttctgggtttctcatgtatgtaaagaaaagataacctaaaattaaatattcacaaccaagttaaaggaagaagttagagttgtttgcattgcacctggcactctgttggtcagaaggaagttgagaattttaatgtgggaaatgttggaatgtagaaaataagcacatctgcgaggaatctctttctgctgcttctgcactcttcttcctctcaccctgtgtgcattctctgcatcatgagaacatggctttatttatgttctggaaatggttttagtgtttcctttctgaatagggaggaatcttgggttacaacacagaatatgtttgtaacaacctggcacaaattttcttcaagttattcttctccaaatttgttaaagaacttctcaaataattatcttttcagtggaaatggatgtcttacattgcttcctttcttcctattagaaatgtgagaaattcacttaattgccagagagaggcacagagactgagagcttgtattttttactcttttagattcattaaactgaagtaggtctcaaaaaagctttttggacttgagatgacatgcattcaatacttaatatttaccatcagataaatttgataaggaggacaaattttaagaaaacactagcaatctctagcatggggagttcggagcacgtaacactcatttcttaagtaggaaaaaatgaaaacctaattagcatcaaaagcaagttttgttttttaaagactttatacagttgtttagggttcaatctggaaggaaagaaataattttagtgtaaagcagtgcccccaatgaacacacacaagtaagatgattgagcagtaggaatgttgtcctctatgccaatttttccccattcaggtggcttcactgtttatatattgcatttcaggcaggtgcctgaatatatatctttaggaatatgtatctttatgttcttagccttagacccagtcatcttatttctgggaaactaccctaagggaagaaattcattaatgtggaaagccgtttatgcacaaaaatgtttatcatagtcctctgtgaaatagcaccaaattggaatcaacccagatacacaacactaggaaacaggttagtaaacagatccacttgataaaagataatacagctattaggagtgatgcttaaaggtaatcagactgacatggaaaatatgcttgagataaagtgtttagtgaaaaaagaagcatgcttctgtgtataataggatgataacaacaacaggaacacctaccaagagagagaagtgagacataaatgaaccaatatgttagcagtggttgtatttgtttgatggtgtcagggtgattttcttttatagcatgtaatatctttcgcgttttataaatgggaatttttttgggttggggggttaatgaaaatcttctaataatcaaaaggaaaaaaatcacaaaagaatgagaggggtagagagctattataggctctttctggtgcctactacccaggaggtggttctcctttgacaactgttttgtagaattgagactccaaaagaaagagatgacaaagagatgggataggaaaggtgccctggctgggctagatggaggtaaactcgttaggggttgtcactcactgctgtctatagaaattgagaatcagtgctgtgttcctgactttcaggttctcctttgcctggcatagcgttgggtacaagtaggcacttaaacagtgtttattgaatttagaaaaaatgggcagagactgcacagattccactggtcacattatttatcttatgcttttagggtgttaccttcagaatttgaaaaactagggccaggcacggtggctcacgcctgtaatcccagcacttttggaggctgaggcgggtggatcacctgaggtcaagagttcaagaccagcctggccaacatggtgaaaccccatctctactaaaaatacaaaaaattcgcaattagctgggcatggtggcaggtgcttataatcccagctacctaggatgctgaggcaggaaaatcgcttgaacccaggaggcaaaggttacagtgagccaagattgcaccattgcattccagcctgggcaacaagagcgaaactctgtcttgaaaagaaaaactaagtgaagaaaatttgttgttcttttctatccagtttgaagtaaatacccatgggcatgactgctcagtacaaaacaaccttcccagcctttggtagtccctctcaaattgctgggccactttatttaagatgaagctgcagctattcagctattttggttaggttatgcttaagagttctgtaaccttgtctgtagaatttgcttttattttgaacttttaaaaatattgtaattttttagttttcaaaaataggctatttgtatatttattaggactattctctgaccaatcaagtaaagtgtcatttataacagagtagttagatattttgctttaactcatgaagaaaggaataaatttaacaaacaaaacactttgtcgatgtaactataaataatgtttctaatattggaagctacttttcattcatgtggttcttagaaaataccttaaaataaaaaaagaaagaatctattggtaaagtttaactaaattttgtgtttcattttgtagttcatagcagttgccatttgtttattttactaaaatgatgctgtggcatttccaatttaagtctcagaatattttcatatgacataaattatgctgtaatataagtaatattcctttaccattaccacaaaataatctaattatagcaattatttattggtagctgtgaaaattttatcacaaaatggtaattgctgttaaagtttaatggctcattatataaatataatttatattatacattccaagataaatgtactatacaatcacatttctacccaaatatttgaaagataaggaaacaatatatcacaataaggaaaactgaaaatgaaaggtcactaaacaatacaatgagaaaatatcattttaatcattgaatgctaggagtaaaaaggacaggagacaactagtctccacagaatttagtatgtacagacaattcgtagaggggacagtgggtgaatttattctctacttccatgtcaataagaatggatgaattccttaaaaaccactgagacagaaaaagacattgagaatgaattaaataaaatatgctttttattgatctactcatgtgtccatgtaatttgaatatgaaacagcagaaccctgttgtgaagcttatccatcttaagacagaaggaagcacagatagaaagtcctggaaacttcttacacaagaattctgccaaatagtgaaaataatttctaactcctgtttattatttttcttaaggactaaaatctttgttttaaaaactgtattctgcaaactctttgagaattgctgggggcggggggtgtggtgagggtggggaaccagctgaataaaagaatagagacagagattggcagatttttatccctcaatcttggcaaaatagaaataaagtgaaacataccacaaatattttattaactatttaaaattaaaatctgttttgaataaatatatataatttttgatgctacagaaaatgttatttgaagatgagaaaataacatgctgcttgtgaaggcacactataagtaagttttttttattatactttaagttctgggatatatgtgcagaacgtgcaggtttgttacataggtatacatgtgccatggtggtttgctgtacctatcaacctgttatctacattaggtatttctcctaatgctatccctccccttgccctccattccccaataggccccagtgtgtgatattcccctccctgtgcccatatgttctcatttttcaactcccacttatgagtgagaacatggagtgattgattttctgttcctgtgttagtttgctgagaatgatggtttccagcttcatccatgtccctgcaaaggacatgaactcattcttttttatggctgcatagtattccatgatgtatatgtgccacattttctttattcagtctaacattgatgggcatttgggttggttccaagtttttgctattgtgaatagtgctgcagtaaacatatgtgtggatgtatctttatagtgtaatgatttataatcctttggttatatacccagtaatgacatggctgggtcaaattgtatttctggttctagatccttgaggaattgccatactgtcttccacaatggttggactaatttacactctcaccaacagtgtaaaagtgttcctctttctccacatcctctccagcatctttgtttcctgactttttaatgattgacaatctaactggcatgagatggtatctcatggtagtttttatttgcatttctctaatgaacagtgatgatgaccttttttgcatatgttttttggccacataaatgtcttcttttgagaagtgtctgttcatatcctttgcccacttttggatggggttgtttgttatttcttgtaaatttgtttaagttccttgtagatttttgatattagcccttggtcagatggatagattgcaaaaattttctcccattctgtagtgaggcagtgctccttttgcgagggcattagctgcggggagtctgtcccttgcagacccctgacccggcgacagatgattaaagtacactggcacacagatattctgctttgccagtccagctgagggtctgaggccactcacagactccgaggagagtcatgtaaagaatggcagccgccaccctgagcagctccgcactccaagcatttatttagtatagaattaacaacagaaactttgagtaaacacacttgtggataattaacatggttaagagagtagttctaggaatgattaaagctcaggtaccggtgctctagagtaaatactattgggggcaattttcctggttgacctccccgccagagggccatctggctcaaaagttagttaatggaggtagggtaaagagatttaactggggaagactctgttgtccctagcatttaccctatgacctaatgctgtaaggtaagacccagtcgctttcagcctgttcaattattacagctatgtaacctttcggccttccaaaaaggtttgtgactattccccataactttctctaatatttccctttaatatttctgccaccaacctgagtgaatcccaacgctgtaggttgcctgttcactctgatgatagtttcttttgctgtccagaagctctttagtttaattagatcccatttgtcaattttggcttttgttgccattacttttggcgttttagtcatgaagtctttgcccttgcctatgtcccgaatggtactgcttaagttttcttctacagtttttatggttttaggtcttatgtttaagtctttaatccatcttgagttaatttttgtataaggtgtaaggaaggggtccagtttcagttttctatatatggctcgtcagttttcctaacaccatttattaaatagggaatcctttccccattgcttgtttttatcaggtttgtcacagatcagatggctgtagatgtgtggtattatttctgaggcctctgttctgttccattggtctatatatctgttttggtaccagtaccatgctgttttggttactgtagccttgtagtatagtttgaagtcagatagcatgatgcctccagctgtgttctttttgcttaggattgtcttggctatacaggctcttttttggttccatacaaaatttaaagtagttttttctaattttatgaagaaagccaatggtagcttgatgggaatggcattgaatgtataaactactttgggcagaatggccatttttgtgatattgattcttcttatccatgagcatggaatgtttttccatttgttcgtgtcctctcttatttccttgaacagtggtttgtagttctccttgaagaggtccttcgcatcccttgtaagttgtattcctaggtattttattctctttgtagcagttgtgaatgggagttcactcatgatttggctctctgtctactattggtgtataggaacacttgtgatttttgcacattgattttgtattctgagactttgctgaagttgccagcttaaggagtttttggcctgagacagtggggttttctaaatatacaatcatgtcatctgcaaacagagacaatttgacttcctttcttcctatttgaataccctttatttctttctcttgtctgattgccctggccggaacttccaatactatgttgaataggagtgttgagagagggcatccttgtcttgtgccggttttcaaagggaatgcttccagcttttgcccatttagtatgatattagctgtgggtttgtcataaatagctcttattactttgagatatgttccattaatgcctagtttattggatgtttttaacatgaaggagtgttgaattttattgaaggccttttctgtatctattgagataatcatgtggttcttgtcattggttttgtttatgtgatggattacgtttattgatttgcatatgttgaaccagccttgcatcccagggatgaagctgacttgatcttggtggataagccttttaatgtgctgctggattcggtttgctagtatcttattgaggattttcgcattgatgttcttcagggttattggcctgaaattttctttttttgttgtgtctctgccaggttttcgtatcaggatgattctggtctcataaaatcagttagggaggagtccctctttttctattgtttggaatagtttcagaaggaatggtaccagctcctctttatatctctggtagaatttggctgtgaatctgtctggttctgggcttttttcggttggtaggctattaattactgcctcaatttcagaacttgttattggtctattcagggatttgacttcttcctggtttagtcttggaagggtgtatgtgtccaggaatttatccattttttttctagattttctagtttatgtgcatagagatgtgtatagtattctctgatggtcagtggtgatattccctttattattttttattgtgtctatttgattcttctctcttttcttcttgattagtctggctagtggtctattttgttaatcttcaaaaagccagctcctggattcattgattttttggagggtttttttgtgtctctgtctccttcagttctactcttattttagttatttattgtcttctgctagcttttgaatttgtttgctcttgcttttctagttttttttttttcttaagacggagtctcactcttgtggtccaggatggagtgcagtggcatgatcttggctcactgcaacctccgcctcccaggttcaagtgattctcctgcctcagcctcctgagtagctgggattacaggggcccgccaccatgcctggctaatttttgtacttttagtagagatggggtttcaccaagttggccagactggtctcaaactcctgacctcacgtgatctgcccaccttggcctcgcaaaatgttgtgattacaagcatgggccaccgcgcctgccctctagttcttttaattgtgatgttaggatgtcaattttagctctttcctgctttcttctgtgggcatttcgtgctataaattaaacagtggtttagctgtgtcccagagtttccggtacattgtgtctttgttctcattggttgcaaagaatttatttatttacccagtagtcattcaggagcaggttgttcagtttccatgtagttgtgtgtttttcatgtgtattttgagtgagtttcttaatccagagttctattttgtttgcactgtggtctgagagactattatggtttccgttcctttacatttgctgaggagtgttttacttccaattatatggtcaattttagaataagtgctatgtggtactgagaaaaatatatattctgttgatttggggtggagagttcagtagatgtctattagggccacttggtccagagctgagttcaagtcccaaatatccttgttaattttctgtctcattgatctgtctaatattgacagtggggtgttaaagtctcccactattattgtgtggtagtctaagtctttttgtaggtctctaagaagttgctttatgaatctgggtgttcctgtattgggtgcatatatatttaggatagttagctcttcttgtcacagtgatccctttacattatgtaatacctttccttgtcatttttgatctttattggtttaaagtctgttttatcagagactaggattgcaacccctgccttttttttgctttccatttgcttgctaaatctttctccttccctttattttgagcctgtgtgtgtctttgcacatgagatgggtctgctgaatacagcacactgatgggtcttgactctatccagtttgccagtctgtgttttttaattggggcatttagcccgtttacatttaaggttagtattgttatgtgtgaatttgacctgtcattatgatattatgctagctggttattttgcccactagttgatgtagttttttcatagtgttgatttgatatgcttttgcagtggctggtaccagtttttcctttccatatttagtgctttcttcaggagctcttgtaaggcaggcctgatggtgacagaatccctcagcatttgcttgtctgtaaaggattttatttctcctccacttatgaagcttagttaggctggttatgaaattctgggttgaaaattcttttctttaagaatgttgaatattggccccactctcttgtggcttgtagggtttctgcagagagatctgctgttagtctgatgagcttccctttgtgggtaacctgacctttctctctggctgcccttaactatttttccttcatttcaaccttggagaatctgaaaattatgtgtcttggggttgctcttctcaaggagtatctttgtggtgttctctgtatttcctgaatttgaatgttggcctgtcttgctagttggggaagttctcctggataatatcctcaagtgtgttttccaactcggttccattttccccgtcactttcaggtacaccaatcaaatgtaggtttggttttttcacatagtcccatatttcttggaggcttttttccttttcattcttattctgtaatcttgtcttcatggtttatttcattaagttgatcttcaatcgctgatatcttttcttctgcttgatcaatttggctacaacgtatgcttcacgaagttctcgtgctgtgtttttcagctccatcaggtcacttatgttcttctctaaactggttattgtagttagcagttcctgtaaccttttatcaatcaaggttcttagcttccttgcattgggttagaacatgctcctttagctcggaggagtttgttattacccaccttctgaagcctacttctgtcaattcatcaagtcattctccatccagttttgttcccttgctggcgaggagttgtgatcttttggaggagaagaggcattctggtttttggaattttcagtctttttgcgctggttttccctcatctttgtggatttatctgcctttggtcttttatattggtgaccttcggatggggtttgtgccattggggtcctttttgctgatgttgatgctattgctttctgtttgttaattttccttctaataggcaggtccctcttctgcaggtctgctggagtttgctggaggtccactccagaccctatttacctggatatcaccagcagaggctgcagaacagcaaagattgctgcttcttcttcctctggaagcttcaacctagaggggcaccccgcagatgccagctggagctctgctgtataaggtgtctgtcaacccctgctgggaggtgtctcccagtcaggaggcacgggagtcagggacccacttgaggaggcagtctgtcccttagcagagcttgagcactatgctgggagattcgctgatctcttcagagccggcaggcaggaaagtttaagtctgctgaagctgtgcccacagccgcccctccccccaggtgctctgtcccagggagatgagagttttatgtataagcccctaactggggctgctgcctttcttttagagatgccctgcctggacaggaggaatctagagaggcagtctggctacatgggctttgctatgctgtggtgggttctgtacccagtttgaacttccaggtggcttcgtttatactgtaaggggaaaaccacctactcaaccctcagtaatggctgatgcccctcccctgaccaggctccagtgtccctggtcgacttcagactgccgtgctggcagcgagaatttcaagccagtggagcttagcttgctaggctctgtggggttgggatctgctgagctagaccacttggctccctggcttcagccccctttccaggggagtgaacggttctgtcttgctgccgtttcaggtgccactggggtatgaaagaaaactcctgcagctagcacagagcctgttcaaagggctgcccaactttgtggttgaaacccagggccctggtggtataggcacccaagggaatctccttgtctgtgaattgcagagaccatgggaaaagcccagtatctgggctggaatgcatggtacctcatggcacagtccctcagggcttccattggctaggagagggagttccctgaccccttgcgcttcccaggtgaggtgattaccccccctgcttctgtctgccctcagtgggctgcacccactgtctaaccagtcccaatgagatgaaccatgtacctcagttggaaatgcagaattcacctgctttctgcattggtctctctgggagctgcagactggagctgctcctatttcgctatcttgccagcctcctccagtaattcttgtgtgttgaattctgcaacgcacctttaattatttttgaagttgctaacgttaattaaagtttgtgtctgaacctcctgctgatggaggatgaattaccagagtatagctgggtttgtgaaacccgcagtggatcaggcaatgttaaagatgattaaacaatttccctccttccatggaggcttctttttcttattacctaaagcagtttcacactcctttttgttatctatctaataggatattatctagggtcaaatttctttatagtgttattgcttatatatgcttgaatatagtcacagtttgaaagactgagctgagcataataatttattttaagcttttatatttgaaactattttccttttgaaaatgtacactccagtctagctcaaacatttatttcaactttcactatattgaggcttcgaaaaaagacaagaaagaaaaagaaaaaaagaaacttatttattgcatttgggccttggattgctgaagaaaccacagcacaaaaaaggatcagattagagaggtgctttgaaaatatcttgtccagaaggagaaaactggtggaaccaaaattatcagttggccagtctaccatttcatcaagtgatatgttaccttggtgagactaatgcattccatggatatgagtccatggccaaattgctgtaaaatgagttccctggttaatgggaggaaactggcagttaagtattctcaagtgatggataacagtgcaaacaggagcgttacaggcagagatggcatatcctaagtgtctattccaggaagaaatcactgccccctctgtatcaggaaggggtatagtgtaatcactctgccaccatgtgattgacttgattcctgccctctacacccaatagtgctagcctctgctattggaaagatagatcctcagcagtggagatagattaggtcaggacaggggaagtacatgaagttggactcatgcataaccatgttgttggcctcatggggacaggctaccatgtccattttgtatgaagactcattgaacaagcactggggaagaggctgagagacctccacagatgtcatcttgtctacttgattattgagagcttcctctgcagagagtgttcgagcttccacataggcattcaaataacatcgcattatgcccattctgaaaggttcacccacatgcctcttccccagatctccttatccttgatcttccaatcctgttatttcccattcaccatggtgttagctactgcccacaaattgatgtaggtccatttttctaggcatctctcagtccagacaatgtggaaagtcaacatactgctggaaattctgcctcccagaaggaattccctttactaatatcctgcggagctaccctgagtgggactgtcatgctacagctgcccaattctggttggtgtcaattatatctcacagaatcattcataaatcagacgtgaggtttcccctgcttatattggttgattatgaggaatttcccatgaagacacaggtgtgaattgaggaagatgagacagagcaacaggcataggtggcataggcatctgaatgcctggccatgcaactgatatcttctggaactgcttgggcctgattgcttatataccattaccacttgacagtgggaacctactataaacacctagcatgagaagaagcagaaatctaggccacatggtcactttatgtccatagtcagaggttcaatgccagggccttgtagcaagcatgagctgtttctcaaaaggagaacagttatctgtagaagggggtgtggctctgttctaaaaccctatgagcatttgtggtacttctacaatttcccaaaggtccagcgtagcatctctatttattatagacactttacaaatcattggatccgttgggttatgcatacgggacagagcagcttatgcctcagggacagagcagcttactctgccacctggacttgctactcagccttttcttgcttcaggccccactcaaaactggttgccttacagtttacttagtaaatgaatgagagcaggatactcatatgtgctgtatgtcatctccaaaatccaaaagagctcattaagcatcaagcctcttttttgactgaaaggctcaatgatgattataacaacaacggcaataaaagcaacagccctagactgcctgggacaatccattagagaaatagtagactctactctggtggttgtgactgaagatgcagctggagaggtagagtgctacctctgtctcattgcaaggcctggatggggtgctgctgggctgatttggacatttactttgggcacagatgtatgcccttgggatggttggtgtgaagttcagtggcagctggtttggaatttggctttttaccacatatttaaaaaatacccctcatttgggaatttactatttatatacattttattttctcattttttaaattatctatatttctgtctgcttttcaattattgaaagctatagttggggtacttttctatttaggtatagaatgtatccctcagtttcaaagtcatatactgagcattaggcactttttgggcactttgcgtatcttatttagtacgaatagttgacattgttttagtaacatcactgtggcaggacttgaaattttgcaagagttatttttaatagtctgctttccaataaatcagtcaacaaataaatgccatctatctactagtaattgactggaggtgggggctcaagggactcctggatgataagggaattgtcacccactttttttctaagcacagatactgatccaggcaggccttttccagtcagcgcaagagcagttgccctgcagcactaggtccattacaaagaactttcccctaccaaaaaaaaaaaaaaaaaaaattcatgcttccagtagtcacctgaaactgaatgaacaggtaaaaacacttagatcaaatttcaattatttatgttcactgcaaaatgagatgaccttcctgcagtcacagaatgattctagaacttgcagatcaaatataaattttgtgccttctaaatgagttactagaaattaaaatatatgcacattttggaaaactttgttttgaagcatttaaaatgacaacatggatggcgattagcatagaagttggaagagttcccactgttcagcaggagttaacaaaggtggtcccctgaactctctcaactcttggaaaagcttcattcctctctcctatcccagtcatcaaagcttgcagacaccatctgccttggtaccatcagggccaatgttatcattcctttaatcttagttcattaatttccacaagaatcccaggtctcctagatcaccctgcattcccttggactctgatccccactcacctatgtacactccttcgtctgaccctgtctcccacctttccttttccctatgagggctgtgaaggttgatcatcagcagtatcccctggatcatcttcccagatgtgcatttcatttccttccctttctctctcccaagtagatgctgtttctatccaactaccactgggcctgcaggtgttagaagtgccttccttgttcctcattgttgctttgaagttgttcaggctgccacctctatatagcaaaacaaaaactgtgtcatcagatgctattatctactttcctcccttattgcacttccctgctgatccctaaatcctttcctctaattctgttaagattaatgttagggttcttgagagaaacagaatcaatacaatatgcatatttatagaaatagatttattttaaagacttggatcccatgattattgaggttggtgagtccagcatttgcagtgtgggccagcagcttgagacccaggagagctgatggtaaagttcccattggaaggctagcaggtggacacccaggagagcaaattgtgcatatgaaatctgaaggcagtctgctggagaatcctctcttgctcagggagctcattctttttgttctatccagactttgcaccaactgagttaggttgattcacattaagcagggcaatctcttttactcaaagtttaatgccaagctcatccaaaaacaccctgcaagttgacacatgaaattaataatcacaggtccatcctttatcaacttggcaaccatatgcatctctttaacccatacttaatctccaaataaagacaataacaaggtcatacttccaccttttatgataaagatatcctgcatgcaactgaaaactcactaaccctttccccagaagaggatgcaaagtcttggatgatgttcactcttgtgtatcccataactttaaatactgtgatgtaaagttaactctacttaaatgctatgctataaagtcagtacatgataaggaggtaagaaagagaagaaaacaaaggtatttgttttcttctcttcatgttcataacaaaataaggaagaaatactcatgatagttacacttcttgtttctgtaactggttgtatagtcatagctggtactcataactaccctcttccactagcaagcccatatgctccttgctctcaacaagtacctcaacaggtcatagttctttaccttcttttcttgatggcactgcttctgggttaattctcagtgattttgatacccacagagatgatccttttaaggcccaggcctcttggctgcctggcctcctctctccagtggcattgtcctcatctactgtatttctggaaactcattccttcttttgtatgaatgcttccatatatgccctccctgagcctctctggctggagttcatagtagcgtttgctgccttagtagtttccatgcaggaccatgttatctgttatccccctcaccccccaaggatttccctgaatcccagtctttctctgagtctttctctatgtttatgagtaaacctgggcatgattagggctgcagcaatcacacagctctctgaagaactgctctgactgatactcatcgtaagcaccttcctgccctccaaaattgtaataccgttgaaggctagagggtactgcaaaagcttcctccaacatgctggtggggttaggagtggagaagaacaaatgagcagccttctagtgttatagacgccagactgtgagtcccagctgagcctcacagataagtttctctgcagtgttggagccacacgggtgtagtgttgtatcctgccttcctactcagcatcatttaaatgtttcctcatgctattgcaaatgctcattatagatattcttaatggctgcttcatatgtcattgaatgattgtactgtatttgcataaaattggaaaggtactttttatttttttaaaataaaccagaatacaagcctaatacttcaatcatttatcaaaatacagagttctgtgttcccctttaataagttacactcatttttaagaaagaaagtaggatattaaatagtttccttttgcttattttgactcctctttactttttctgctatttcagtggagaggccttgcctttcccttgtaagggaagttctactgattattgttcatacatagtcacatgacactgctaagaatatctgcatgacacatgtaagaaaggaggctaagctacttaagagctctcatgagcatgtactttcagatgacaaatatttaagggtgaaataaaagtgaagtatatcagaaatccatgtcagacatgtaaacatgttatacacttgagattcatcagtattttgattaatagatacttttccttatttttgaaggcaaatgcacaaaacttggaattttcaattaagatgacctcttccctaaacgtgttgctaaatttttatgccacgagagagggaaacattgtgagttttaataatttatatctctgtggtaaggaggagttggaaaaaaaagagcagacctaggaaaaatatgccatagcatgttcagacctctgtatcaaatgtgcacaggagtaacgtattttgaaagaagggaattaattcattttaatgtattcttccagttctgtgagtctctaggagaattttttattctatggaacacattactaggatgtagagggtacatctgtctatcctataggatatagatataggtaaaccacagcattgaagtaggagcagacagaaaggacaaaggacccaaaatgatgggctacaacttgccttgtcctctttccaaaccacgctgtccactgtaatcctaaagtggggtcccatattccagtaccaatggatgacggaataaggaaagaaaaaaaatttcccaggatgctttgggtagtctgaagttggatacaaatagataaagccacctctgtgcttctcatttatttccgagtctaatactgaagccatcaaaacaactacatttttatgaagtagttttaaccatccaatggaaaaattgtgccagggtaatactggcaagttgttttctccggtccacgggatgtgatggatgacctggggagacagaggtccagccttcccggagtggagatggtgagaggttcatcagtagctacaggcatgtcatggtgatcacactggtaatttgtaagttataaatgtgaacttgtaagttgtctcttagttgtgtaaatttgttaaaaggaggatttttggggacagtaaattgaagattttgtgttcttggcagttgctagtcctcgggttttctacaactcagtgtcatctaagtcagatgagagtttcttctacagtgtagagagatgatgattctcccataaataaaactgagctctgaggctctaggaggaaaaagaaagcctgacccttttgacttataagtgtgggtaggagagaattagtgactgccaagaacaaaacattgtcagctacctgttcctaaaatgtcctccctctaacaaacttaaatgactaagagacaactttaaaagttcggatttataacttagagattatcaggatggtcaccacgacatgcctgtacttcctgagagggaaggcacagaggtcaagagtgtgtgttctgatgttcctcttcctagagtagggtgtcagagagtatgagtgtgtgtctcacagggagtcgagtagaggactagtctagggggaagctgcaaacctctccaggaagctctatttgtaaccgcatgctctgtgacccaagaacaactgtagttcattgactgggaagctgtctatcaggtttctaccaagcattctctggctcctgcccttctgcctcccctgtgggtcagcccacataccctcaaggcactagcccattctcccggtagccattaccacagtgtccactggtgctttccagctgtcctgagctttattctaaaagtgaaaatgtgaaggaacaaaatttatcctgggtcctgggattaagttccaccatttgtgactaggagaaccttctgaggtttacatataaaaaccaaggctctgcagctgttatttgcttacactgtaattgtagtgtttacatataaattctaagtaagtacctgatagtaatttgctctctttggaatgtaaatattctccttaaaaaaatctactattagttgtcttaatccctttattttgagaacaaatggaacagtaaatttgagcctactgtgtttgatcacaaattcagaattggtgaggtctaagttagtgaagttttaatgcatatttttttcatgatcttgtgttctctagtataattatgtggtctaatttcaaatgtagccagctgccagctcttatattgacacacttttattacagacagaagaaacgtaccagacttttacatagtagagagagcaaagaggatcattatccagttgaaactgaaagggaaattctcagtgggctgaagagctgtgtatttttattgagtgttcattagtggtctgtgcaggggatccatattaaaatacccgaagaatgtgaagcagacagagaaaaaaacccaaaaggcaggagagacttacactgtgtccagacagtcaggaaacaaaagcaggggattgcaggcatctctctaatatcaagatgacagggggatattctgggctctgatacaaacactggccttttttgtttgttttctctaagaccagtcattgcagataaagccagaaaaatgaatcaagatttataagccaggttatttagttgccaataatctatgatggatgtatgtatgtatgtgtgtgatttcagagcccagactctgcagtgatgacagcaatgaagtctctacctcctgggagccagtagcacacccacagtggtgaccactagatatttctccagacattgttaaatgtctcctgggagacactatagttcctgctgagaatcactggtttagtccacagttctcaattagggaagtcacaactcctgctcccttgccccactcccacactcctgctaattctagccacttttttcctcagggtgtgggtatgggtctccatctaatgccattagaaatgattttgcaggaacttctgtcaccaagtatggccaacagaagtcatggaagctgttcttccaccttcaccatgttcacttctgaagaaggttctaccaggatctaatagaaaatacaatcaaagtttacaatacagggataattagatctccctcaccagttttcagcttctagccctgttctcatttgtcagaaataaaatcatagtgtcacttctgatgggaagaggatgttttgcctaagacagcatgagcttggagcctccatggggcatcaggagaggcaatggttcaaatagaggtcaaaatgcctataggatctggtgcctggtagttttgtggtgatggcatttagactgtagaaaggaaggttctctgcacagctagactggagctggtcaggcttctcctgcattgcagtgatccttggtagaatatagatctatagagagtgactgaggagagccatttgtgggctagagtgcccctgcagccagaggggagttctttgttcattctttcatttacttagcaatcaacaatttagcccacatgtgctatgaaccaagcattagacaaaggcatgagaattgaacatttatggagatagatttttgaaacaggaaaaaatcaaaagtagggagcctggtcagtgatcccacccaaacttggagcatagccagcagcccttcccaattgtggagcccagtctgcagttctgcccaactatggggcacagcacacagcttcacctgacttgggagactagtaacaacttgatgggctgcagagcacacctctggtcccacccaggcagggagtacaaccagaccctgctcaatgacaggcctcagcctgtggccctgcctaattttgttttattttcaatataaaataaatttgtggaacaggtggtgcttggttacatgggtaggctctttagtggtaatttttgagattttggtgcaactgtcacctgagcagtgtacactgtactgaatgtgtagtcttttatttcatcaccccactccccccttccccctgagtccccaaagtcctttatatcattcttatacctttgtgtcctcatagcctagctctcacaagtgagaacatatgatatttggttttccatttctgagttacgtcacttagaataatggtccccaactccatccaggttgctgtgaatgccactatttcttctctcctctcctctcctgttctcctcttctcttctcttctgttctcctcttctcttctcttctgttctcctcttctcctcttctcgagatagtctcactctgttgccagactggagtgcagtggcaagatcttggctcactgcaacctctgccttctgggttcaagcgattctcctgccttagccaccatagtagctgggattacaggcatgcgccaccacacctggctaattttttatatttttgatagagacggggtttcatcatgttggtcagggtgatctcgaactcctgacctcaagtgatctgcccaccttggcctcccagagtgctgggattacaggcgtgagtcactgcgcctggcctatttcattcttttttatggttgagaagtatttcatagcatatgtatactacattttctttactcactcattggttgatgagcatttaggctggttccgtatttttgcaattccaaattgtgctgctataaacatgcatatcaagtgtcttttttaatataatgacttcttttcctctgggtaaatacccagtagtgggattgccggatcaaatggtagttttgccttcatttctttaaggaatctccatgctgtttcccatagtggctgttctagtttaaattcccaccagcagggtaaaagtgtttccttttcaccacatccatgccagcatctattattttttttattttttgattatgaccattcttgcaggagtaaggtggtatctcattgtggttttaatttgcatttccctgatcattagtgatgttgagcattttttcatgtttgttggccatttgtgtgtcttcttttgagaaatggctattcatgtccttagcccactttttgatgggattatttgtttttttcttgatgacttgtttgagttccttgtggatcctggatattagttttttcagatgtatggcttgcaaatattttctcccattctgtgggttctctgtttattctgctgattatttcttttgctgtgcagaagctttctagtttacttaggatccgtctatttatttttgtttttgttgcatttgcttttgcgttctcggtcatgatctctttgcttaagccagtgtctagaagagtttttccaatgttatcttctatagtttttatggtttcatgtcttagatttaagtctgatctatcttgagttgatttttatataaagagatagatgaggacccagttttactcttctccatgtggcttgccagttatcccagcaccatttgttgaatagggtgtcctttcctcactttgtttttgtttgctttgttgaagattagttggctgtaagtatttggctttattttggggctctatatgatgttccattggtctgtgtgcctattttttataccagtaccatgctgttttggtactggtataaaatagtatcaaaagtgtttaaagttaggtaatgtgatctagcaaggccagaaaagttttcttcagttgttccctcaaaaagttttccaaacttttagatttcttttcttcattaggaataccaattattcttaggtttggtcttttagcataatctcaacttttttggaggctttgttaatttttttattcttttttctttgtgtttgtctgattaggttaattaaaaacctttgtcttcaggctctaaagttctcttttcttgttctagtctattgttgacatttttcagtgcattttgtatttttccaagtctttcatttccagaagttgtgattgttttttctttatgacatctatttccctggagcatttttcatccatatcctgtactgttttttaaaatttttttaagttggttttcctctttctctggtatctccttgaatagcttaataaccaaccttctgaattctttttctggcaattcagagattccttcttggtttggatccattgcttgggagctggtgtgatcttttggggtgttacagaatcttcttttgtcatattaccagaattacttttctggttccttctcatttgggtagactatttcagtggagaggtcttaatctcaagccctgctgttcagattcctttgttccatagggtgatctcttgatgtggtgctttcccccttctcctaggggtggggtttcctgagaccttgactgcagtgattgttattgctcttctgggtctagccacccagaggggcaaccaggctccaggctggtgctgggggaatgtttgcaaggaggtgtgtgatgtgattcatctttgggtctcccagccatggataccagcatctgctctcacagaggtgtcagggaagtgaagtagacttcatgagagtccttggttatagatatatgtactatgctggctttcttgaatgctggttatgctagcagtgaagttgtcacatggacacattcaaaatttctggttagccaagacgttgcagttagggaaattaggtattgtcttcttcctggggtcaggtttattctgtcatgatttgctgtaatggcctaagttggttatcctccagccaggaggtggtgttttcaagagagcatgagctctagtagtagtaggggaatccaagtttgccctaagatggccagggtaattatattggtatctcaggtgatgggcaatattgtaaagctcccaaaagtttctatgttttgtgttaggctaccagagcaggtagggaaatacatcaggcaggggcagaggaaggagagtctggtttcagactctccttggacggggcttcctgcggccactatggggtgtgagggggtggttctcaggccaatggggttatgttccagaggggatcatggctgcttctgctatctcatatggtttgccagggaggtggggcaagaggctggtagctggtagcaggaggcttcacccagctcctacacagttggtgaggccggtctcactcccacagtgccccactcagaccttgtcccgggttgtgagctgccccactgagaaagcaagcatggcttttggaccttgcctatccctgtcttctcactctgttggcagctcctgcactcctgcacttgtgtctgcagcagctcccgcttctccccaagactctgctcaagaaaatttgtccactaccaatttcagttgggagatttttcaccctgcaacccctcctcaattctgctggctgccttcttgaggccccctgtgagatatagtcagagatggcttcctggggcttgagctggagactgggagtgtcttcaaagcatttcctgctgctacttctactattatattttgtgcaactccctaaattcattttacttctaggtaaggttaaatccttctttcatgatttggattttcagattccccagtggggatgtgtgtttggaggcagatttccccctcttacactttgggaactcacagtttttggcctgtttcacagaatttgcagtggtgtgccacttctttcaaatgatttgtgaattctttcagtttttctggtacattcctgtggtggttcttggagcaaacaatcacagtgtgcgtctctacatgctgctctgttcatacatgtgggagctgcacattagccctgccttctatccaccttcttccccgctccctgcctgattttagagcccagcctgtagccttgcccaattgtggaacacagccagagtcctagtccagttgcatagcccagcctgcagccccatttgaatgcacagtagaaccagaaacaccacccactggaaaagcacaacctggggtctcacctggccaggggcaattatacagcccagccaaaagccctgcctgaccacgatcccaacaagcagccccttccagagcccaaccagcggagctacccagccacagatcacaatcagcagccttggccagcttcagatcatgggcagcagccctgccctattagatactttgtcagcaagcctcacatgcccacagaaacaactagatggtccatccatctgatggcccctggactaactagtgaaggtccttccctgcccaagtgaacatgtaaaagccttgaagagataattaactccccgatatgcagacattgatgtaaggatatgaggttcataaagaatcaaggaaacgcggcaagcagcaaaggaaatgaacaaagcaccaaaaaacactaaagaaataaatatcaatgagatgcggtggctcatgcttaatctcagcactttgggaggccaatctcagcactttgggaggattctttgagcccaggagtttgagaccagcctggacaacataagaccttatagattttttaaagaaattatccaggcatggtggtgtatgcctatagtcccagctacttgggaggctgaagtgggagtattgcttgggcttgcgaggtcaaggaggcagtgagccaagaccatgctactgcactccagcctgagtgacagggtgaggccctgtctcagaaacaaaagacaagaaaagataacacaggagggagggagggaggaaggaaggaaggaaggaaggaaaaatgagtatctatgaaccgattgacaaagaattaaaaataatctcaaggaagtttagtgaatgacaaaaaaagacagctaaaggaaattaagaaaacaatacatgaacaaaatgaaaagttcaaagagaaatcattttttaaaattctagagctgaagaattcagtgactgaacaaataattcaatagagagcttcaacataattctcaatcaagcagaggaaagaatccctgaactctaagacaggtcaattgaattatccagccagaggagcaaaaagaaaaagaatgaaagagtgaaggaagcccacaggaagttctaatactataatggtggtgtataaatcattttcaactctgatataagagttaaaaaacaaacatattaagcataaccataattacaataatttgttcctggatacagaatatgacaaaaggtataaattgtaacatcaataacctaaaatgtgaaggagcaagagcaaaattatagttattatatatgatcaaaattaaattgttataagcttaaaataggatattatagctataaggtattttaagtaagcctcatggaaaccaagaaggaaaaacctgtagaagatacacagaaaattaagagaaaggtatgaaagtataccatgacaaaaagtcatcaaattgcaaaggcatgcagcaaaagagaaagagagaaacaaaggaactacaaagcagccagaaaacaatgaacaaaatagcaatagtaagtccttacctatgaataattattttaaacataaatggatttcattctccaatcaaaagacatagagtgagtgaatgggtttttaaaagacaaggtctagtgatttgctgccttcaggagactcactttagctttagggacacacatagactgaaagtgaaaggatggaaaaatatattctgtgaaaatgataaccaaaagaaatcaggaatggctatacttatgttagacaaaatacactttcaataaagcaaaatggccccaagagacaatgaacgtcagtatataatgataaaggggccaattcatcaaaaagatattataatttaggcacccaacattggagaacctaactatataaagaaaatagtaacagagttgaaaggaaaaataaatagcaatgcagtaacagtaaaagattttaatatcccactttcaacaacagatagatcatccagacagaaaatcaataaaaaattagcagattttaataacactatagaccaaatggagttaacagacatatatagaactttccatccaatagaagcaaaatagacattctttccaagggcacacaaaacattctccaggatagattatatgttaggccacaaaaaaagttgtaacaaattcaagaagtttggaatcatttcaaatgtattttctgaccacaatggtatgaaactaaaaattaataacaggaggaaaattggaaaatttacaaacacaagagaattaaaacactcctgaacaaccaatgggtcaaataataaatcaaaagggaaatttttaaataccttgagagaaacaaaaatggaaacaccataaaccaaaacttaagaggaggcagtaaaagcagttctgagagggaagttgttagcaataaatgtctaccttaagaaaaagaaagatttcaaataaacagccttactttacacctcaaggaactacagaaagaataataagctatgttcaacatcaacagaaagaaaggaagcaataaatattaaagcagaaatatagaaaataaagactagaaaaacaatagaaaagaccaatgaaactgagttggttttttgaaaaaaaaaaaaaaatagacaaacccttggctagactaacgaaagatggagaggacttgagtaaataaaactctaaatgaaacaggatacaactgatacagtggaattacaaaggatcataagaaagcactgtaaacaattataaaccaacaaattggataccctagaagaacgagtaaattcttaggaacatacaaccggccatgactgaattatgaaaaatgacaaaatctgaacagaccaataatgaataaggagattgatttagtaatcaaaaacctgccaacaaagaaaagccccagactagatgactttaaaggtgaattctgccaagcatttaaagaactgttgccagtccttctcaaactcttctgaaaaactgaagatgagggagcactttcaaattcattttatgaggctaacattacatggatactagagcaagatggggacatgacaagaaaatcgcagaagaataactctgatgaacatagatgtaaaaattcttaacaaaatattagccaacttaacagcaattagaagtatcatacactatggttaagcatgtcaagggatcttatccctgatatgcaaggatggttcaacatatacaaatcagtaaaggttatgcaaacacattaacagaatgaagaatcataagattataaaatgcagaaaaagcatttgacaaaattcaacatccttctgagattagaaaactcaacaaattgtttatagaagaaaatgtaccccaaaataatagaagccatatataacaagcccacagctaacatcatactcagcagtgaaaagccgaaagctttttctctaagctcagaaacaagacaagggtgcccactctcactgcttctattcaacatagtactaaaagttctatatgtaggcaagaaaaggaaatacaaggcatacaaatgcaaaaagaagtataattatttctgtttgcagatgacatgatcttatgtatagaaaactctaaagactccacacacacatacacaaaactgttagaactaataaataaattcaactatacactggaactcattcctggtcctgaatgactcctggggaaggtgtgagttgagcaggtgaggagcaacctgctcttgccacagacctctggaatcctggcagcagaagaccccaaaacccccatgaacacttgagcttgcagggagagctgcttagagaggtggtaggaggataactccagcttgtacagagcccagagggtttgatatggcagcatctctagtggagcatgatcatgaatgcccattgcccaaggcttgtcttgctcccttaggagactttagcctttggggaactgtcagacctgaacagatcagggtgatcttgttcatgagatggggctagttcaacctgaggacctccctgtcttctggcctctcacgggggcccagcctggctgcaccttcttgtggtacatccttagatgcccagctagggtgtctcccagaagcccacactgtagctcctgtgctagaagaccatgcctgaccattgaagagctccagcaaagtggccctttctgaattgcactagcccacctactccctgccccaactacagcctcctccatgctgcattgctagtatacacttgcccacggccactccccacatcaattcactagtgtatgcacacatgggttgaccttgccttcctttcccattggcatgtgtaggcatgtataccccactagtgtgaacatgtgcacagaaggcaccagccccatacctgccagcaccccattcctgcactgattctgccactggagtgaacatgcacacagatgctagcacccctgcttctgccaatgccctgtctcagccaacaagcatgcgttctgctgcactgctgctgctggcacatgtgaatgagcacaggtcccactgcaacccactagtggagcgctttggctggcaccacccataagggtgttgtgaccagtggtccaggaacatgttggcgtcttcagtgcagcaggttcctaacctcaacaggctagggagcaaagccatggcttgatgctagccccccagagttagagcatgcagctcacgagtcctcagctgacccttggtcccctaaatcttccagaaatgaagctagtcaaccaggcttaccttataccataatcaaacccccaaggacatcaaagaggataaaagaaataaaaacccatctaaaggacagcaaattcaaagattaaaggaccatcagcccacaaagatgtgaaagaaccagcaaaagaactctggcaaatcaaaaaaccagagtgttttcttacctcgcaacaaccacactagttctgcaacagtggttcttaaccagactgaaatggctgaaatgacagaaatagaattcagaacatggatagaaatgaagatatcaagattcaggagaaagttgaaacccaatccaaggatgctattgaattcaataaaatgatacaggagatgaaatatgaaatggccattttaagaaaaaaccaaactgatctgatagagctgaaaaacccactttaagaatttcagaatacaatcaaaagtattaagagcagaatcaaccaagctgaagaaagaatctcagagctcaaggactagctctctgaaataattcagagaaaagtaaaggaaaaaacaataaagaaaaatgaacaaaaccttcaagaaatatggaattatgtaaagagatcaaatctacaactcattgatgtccctgaaaaagagagagaaagcaagcaacttggaaaacatatttcaggacatcatccatgaaaagttccttaaccttgccagagaggccaacattcaaattaatgaaatgcagagaatcattgtgaaataccacacaagaaggccatccccaagacatgtagttatcagattctccaaggttggaatgaaagaaaaaatattaaagccagagagagagaaggggtgggtcacctacaaagggaaccccatcaggctaacagtggacatttcagcagaaactcttaagccagaagagattggaagcatatatttagcattcttaaaagaaattccaaacaagaatttcatttccagctaaacttagcttcataagcaaaggagaaataagatcctttttagacaagaaaatgttaagagaatttattaccatcagccctggattataagaggtcctgaagggagtgctaaatatggaaaggaaagactgttaccagccactacgaaaacatgcttaaatgcatagaccagtcacactataagcaaccatacaaacaagtgtgcatactaaccagctaacaacaggatgacataatcaaatatgcaaaaagcagggattgctattctaatttcagacaaaaaatactataagccactaaagacaaaaaagtcaaagaaggcattttgtaatgataaagggctccattcaacaagaagacctaactatcctaaatatatacacatccaacacaggagcacccagattcataaagcaagttcttagagacctacaaagagacttaatcatacaatagtactgggagacttcaacaccccactgactgtgttaggtcatcaaggcagaaaactaataaagatatttgggacttgaacttgacacttgaccaaatggacctgatagacttctacagaactctccactccaaaacaacagaatatccatccattcttttcacctgcacatggtatgtactctaaaatcaaccacacaattgggcataaaacaatcttcagtgccttaaaagaaaacaaccaaaattataccaatcatattcttggaccacagtgcaataaaaaatagaagtcaatgccaagaatattgctcaaaaccatgctaactacattaattacatgaaaattaaccctccccttgaatgaatgacttttgggtaaataatgaaattaatgcagaaatcaagaaattctttgaaacaaatgagaaaaaagttacaacatactacaatcatagggacacagctaaagctgtgttaagagggaagtttatggcactaaacactcacatcaaaaagctagaagtatctcaaattaacaagcttaccatacctagagaaacaagagaaacaagaaaaccaactccaaagctagtagaagacaagacgttaacaaaatgagagctgaactaaaggaatttgagatatgaaaaactatgcaaaagatcaacagatccaggagtagttctttgaaagaattaataaaacaggccaccacctagactgataaagaaaaaaagagaggatccaaataaacacaataagaaatgacaaaggggacattaccaccaacaccacagaaatacaaaaaacaaaaacaaaacctctcagaggctactatgaacacttacttctatgtatactatttagaaaatctagaagaaatggataaatttctgcaaatgtacaacctcccaagattgaaccaggaagaaattgaatccctgaacagatcaatatgagttcttaaattgaatcagtaatataaagcttaccatccagaaaaagctcaggaccagatggattcacagatgaattcgacctgatgtaaaacgaacaactggtactattccaaaaaattgaggcaagaccccctccttaactcattctataaggccagtatcatcttgacaccaaaacccagcagggacacaacaacaacaacaacaaactgtaggccaacgttcttgatgatcatagatgcaaaaaccctcaaaaaaatactagcaaaccaaatccagcagcacatcaaaaagctaatccatgattatcacataggctgtatctctgggacgcaaggttgtctcaacatatacaaattaataaatgtgatttatcacataaacagaactaaaaacaaaaatcatatgatgatctcaatatatgcagaaaatgctttcaataaaattcaacatcccttcatgctaaaaaatctcaataaactaggcattgagggaacatacttcaaaatagtaagagccatctgtgacaaacacacagccaatatcatacttaatgggcaaagcctggaagcattcccctttgaaaaccagtacaaaacaaggatgccctttctcatcactcctattcaacatactgttggaagtcctagtcagagaaattggacaagaggaaaaaaaatacatcaaataggaagagaggaagtcaaactacccctgtttgcagacaatatgattctatacttagaaaacccaatagtctctgcccaaaagctccttaatctgattaataactttacaataaagtttcaggatacaaaaataagtgtacaaaagtcactagcattcctatacaccaacaacatccaagctgagagacaaatcagtaatccagttccattaacaatagccacaaaaagaataaaatacctaggactacagctaaccagggaagtgaaagatctctacaatgagaatttaaaaacactgctaaaagaaatctgtcatgacacaaacaaatgaaaaacattccatgcttatggataggaagaatcaaaacagttaaagtggccatactgcccaaagcaatttacagatttaatgctattcctatcaaactaccaatgacattcttcacagaattagaaaaagctattttaaaattcatatggaacaaacgaaaaaaagcctaaatagccaaggcaatcctaagcaaaaagaacaaacccagagacatcatattacccaatttcaaactatactccaaagatacagtaaccaaaacagtacagtgctggtacaaaaacagatacatagaccaatggaatagaataaagggcccagaaataatgtcacacatttacaaccatctgatctttgacaaaattaacaaaagcaagccatggagaaagaactccctattcaataaatagtgttgggataactggctagcaatatgcagaatattgaaggtggaccccttccttacactatatgcaaaaatcagctcaaggtggattacagacttaaatgtaaaactgaaaactataaaaaccttagacgataacctaggaaataccattccacatgtataacctggcaaagattttatgacaaagatactaaaagcacttgcaacagaaacaaaaattgacaaatgggacctaattatactaaagagcttctgcccaacagaaactattaacagagtaaacagagtaacagagtaaacagagtaaacagacaacccacagaatggaaaaaaaattttcaaactatgcatctggtaatggtctaaaatccagcatctataaggaacttaaacaaattaacaagcaaaaaataaacaatcccataaaaggtaggcgaaggatattaacagacacttttcaaaacaaggcatacccatggtcaacaagcatatgaaaaaatgctctgcatgactgatcattagagaaatgcacatcaaaactgcaatgagataccatctcacaccagtcagaatggctattaaaaatgtcaaaaaataataaatgctggtcaggttgcagagcaaggggaacacttatactctgatggtgggaatgtaaataaattcatctgtttactggaaagcagtgtggtgatttatcagagaacttagaaataccatttgactcagcaatcccattattgggtatatacccaatggaatataaatcactctactataaagacacgtacaggcatatgttcattgcggtactgtccataatagcaaagtcatggactcaacctaaatgcccatcaatggtagtagaccagataaagaaaatgtggtaaatatacaccatggaatactatgcaggcataaaaaagaatgagattacgtcctttgtagcaacatcagtgtagttagaggccactatcctaagcaaactaacacattaataaaaaaccaaacaccacatgttcccacttatcagtgggagctacacattgagtacatatggacacaaagatgggaataacagacactggggcctacttgagggtagggagggtggaattgaggttaaggatttaaaaaaaaaatctagctatcaagtactgtgctgattacctgggtggtgaaataatctatacaccaaacgcccatgacacataatttacctgtataacaaacctacatatatacccctgaacctaaaataaaagttaaaaaaataagtgaattcagcaaacctgcaggatacaaagttgacatacaaaaatcagttacatttctatatcataacaaaactacctgaaaaagaatacaaggccatttacaatcacatcaaaaataataaaaaatttttttttgagacggagtttcgctcttgttgccgaggctggggtgtaatggtgtgatctcagctcaccgcaacctccacctcccgggttcaagtgattctcctgcctcagcctcctgagtacaaaatcctagaaataaatttgcccatggtggtaaaagatctgtacattgaaaattaaaagacatggatgaaagaaactgaaaacaaacacatagaaagacttcctatgttcttggattggaagaattaatgttgtaaaaatatgtatactacccaaagcattctctagatccagtgcaacccctatcaaaattctaatggcatttttatagaaatagagaaaaacttttaaacatttatatagagccacaaaaacctccaagtagccaaggcaattttgaacaaaaagaacaaagttagaggcatcatacttcctgatttcaaacaatattacaaagctgtagtaatccaacagtatagtactgacataaaaaccagttcatagaccagtggaacagaactgagagcccagagataaacccatgcatatatagataactaatacctaatagtgaaaccaagcattcacagtgggcaaaggatagtttcttcagtaagtggtgttgagaaaactggatatccgcctgccaaaaaataaaatagggctcctctcttacactacttggaaaaattaactcaaggtggattaaaggtttaaatgtaagacttgaaaccataaaactcccaggagaaaacattaggaaaaagctcctttatgttggctttagcaatgatttttttcacaaaagcacaagcaacaaaaaaataaacatgttgtactacattaaactaaaaagcttctgcatagcaaaagaaacactgaacaaagtgaaaacacattctacagaataggagaaaatatttgcaaactacatacgtatctaataagattttaatatccaaaaatataaggaacttatataatgcaatagcaaaaagctcacaaatcccatttaaaaaataggcaaatgatgaatagacatacaaatggcctacaggtatatgaaaaagtgctcaacatcacacatcacagaaatgcaaagaaaaccacgttgagatatcttgtcacccctattaggatggccattatcaagaaacaagagataacaagtgtttgtcaggatgtggagaaaagggaatccatgtgcactgttattggaaatgtaaattggtacggccattatggaaaacagtttggcagctccttaaaaaattaaacataggactgccatatgatccagtaatcctactactgggtatatatccaaaagaaacaacatcattatttcaaagacatatctgcacctccatgttcattgcagcattattcacaatagccaggacatggaagcaacctaagtatccatcagcagatgaatggatgaagaaaaggtgagattgatatcaaatacaataatataataaaatattcagtcataaaaatgaggggaatccttctctctcactgtctttttgtatatttgcatgtgtgtgcacacccacatagtaatgtgtagttcaggggaacactccaagataaggagggaccctagaaccatgaagtaccatatacttttgggccctgctccctagtgggctgaggtccatcacagaggatggtacctaagcatgggaggtagaaagcaatggctctgtcctgcttctctgagaactgggccaaatctacaggcaagaaatttacaattgtggtagttcttgtgctaggagccttcttggatattgtatgttctttacaaggttgtatccatttgacttttttgggggtattgaggtccctaaaagataaattgtgaggccatcctcagaggcaatttgtgtggatttcactgggtttttcttttctcctgcaacaccaattaagtgcttttcttggctctgttggataagggactgagttcctgagattcagagttctttgtgttctgcttgggagttctgccctgggtacctctccaaacccttgacatttattgagcaccaattatatgctaggtaatatgctttatctgggagtttaaaatgccaaaatagagtatattaaccatatcttttatttcctgtattctgatcctttgacatctggagacttgctgaccctaaagggtctgctccttcaagaatttgcccgttcctagagatagtaaacaactggtccagggagtatgcctttcaagtgcaaaccaatgaatccaaagctcacaccccaaacacctcctttacggagctctcacactgaagtgtaagtctttttggatataaaattatgggttgatagtctttttctttcattttctttgaatatgtcaactcactaccttctgtcctccacaatttctcgtaagaggtcagctgttaactttattgaggatcacttgtatgtgatgtgttactttttttcttcttgaaaagacagaattgaaaatattctgtcttttctttggtttttgacagtttgactgtgatgtgcctaggcatggatctttttgagtttatcctacctggagttcttcaagatttctggatgtgcgattaatacttttcatcaaatttgagaaattctccacattatttattcagattatcttacatccctttttaagatcacttctgtttttctgagtcttccattagaaatatttcggtgtgcttgatgaccttccacaagtttctgagactctcttcattcttttcacattcctttttttaattgttcagactaatctgaattgatttatcttcaagttacctgattatttctgccagtgcagatatactgttgagcccttctagtgatttttttaaaattagttgttgcacttttcaactccagaattttaatttgttttttttcataatttctatctctctattgatattctctggtgatacatcattcttatactttcacttaagtcttgagacatggtttcttttagttctttgatagtatttataataatttatttaaagcctttgcgtacttctctcaagataagggagtagagagcctagagttcaaactcaacctggattgaagtccccttctttgacttccattgccattacatctggcaagtagtttaatcaagctgagaatctgttttaccatctgtaacatgggactatgattccatctttcatagttttacatgacattatccatagcacttactgccgtctccgataaaccaaggtactatcccctcccccaaactcctcatctccctcagaatacatgtattcagtatcttcttggcatggagggaagcaaagactaacaatgtgtggctcctcatctcacagagatctgccattagcaaacagttgcatgccaacggcatgagatatgtcaaggtggaggggtgggaagcaggaaagggggcacctaacttggtcagggaagttttttagtgtataatgcatatcctggctctggggagttgcctaggtgaaatgccaaggagagaggcctgaagcacacagtatttggagggaactgcaggggggttgccatgactggaatgcagtcacatccagggcaagggcaagggcaggggcaggggcatagcaggggtcattcagacaggaagggcctaatactgcaagccaggaagtttggtcttttctcattcctgggaaatctctttagctaatgacggtacttctagacatccttaccctgccctgaaagagggaagaaggagagacctgacacagactgaataatgtgcaggtatgtgagtgccaggaaggactggattaggttgtagcaagcaccattgttccaatttgttccattcttccaatttgttccattcttccaaactgacaggtgtcatgggagagaattctcaaatgatacaaatagattaatattttcgtttagctagagctaagcctgagtttacttactgatattttcttctggctatagaactgccttaaggttaataaagtcttttttctttttttttgggttttacttttctgtctgttttaggaaatatttctctaaaagggcattttcacttagcattcatgttttttcccatatcctgtaaatgaaggaagtcaaaggaaatcaaaatataaacttggatgcaaaatcagatttaaatttctagattaaaaaataactgttttcacgccctttctctgtagttaacttgtgtttttccaatgaaaacattaaatacaaccaggcattattttgagcttaatttcagcagatgtttcattattccttgtgcaaagggaaatgtgatcacagggctttctttgggtctcagcagttacttacaccaacttatactatagttcatgacgtagtgactgatgagtagttcagtatggaatgaatgatgtcatgtcttcaggttttctgatcttaattcctgccaaagaaaagatgaagtgtatatactagctgaggatattattctgtccagtccattttcccatgtaggtgggctgtcagaccaacaggagatttactgtgattcaatgacacacgcctctgggacctttcatttctctgtagctgcatcctatgctagaaggcagtgagggttattctaatttgagaagcagatacctttgggagaggcagattgtatttagaaaacccccaaataggaacattatagaacacagtgcttgaatatggcccaattaagttagatcttttggtttagccaagggcttcaagtgtatagaactgtttgcaatttggaatgccagtcacttaaaatttaaataaatgtaggcttgtgatttgagttcaactttgaaaactgcatggactttagggctatcctttaaaaatagtttttattatgcatggaggaaaatctttagtcagcatgagttcttcttataatcaatctttgaacagcagagtgggatggcaaacaggttaggaacataaattcaggagccaaacgtcttcaacttgtagccgtttacttgcccagtgacagtggtcaacttaatttaactgtctttcgactcaatttctctcaattaaagaagagaaaatatagtaactataaaagggttcttgagagactttagagcagagcctgccaaaataacacattccacaaaaaatgatagctactatcattattattaatgattatcatcatcattaacatcactgagacctgtatagttgtctaatggagatagtgttttcagaggttgtgatgatgtgtagaaattatgtctgaattatctagaattattttttaatttttaaaaacaatttcaagtgttattagcatgaagagaataataataaacagtgcttactgagtaccaagcattatatgtgtatgctataatatatataaaatatatagaaaaaactgaacccagtacagttgtatatcttgaaaaggtgactgcagctgtcacacaccatagatgcttgaagctattatttaagatatttttgtatctctgcatagttgggcctggagtttcatttatgaaatagagacaactgatgaattttttctaatcttccagctttatttttagaaatcatattatttttcatttgcttttttctcctaatgtgaatagcataaatagtgcttctgattataaagttaatgaatacttacatagagaaatgtaaagactattattgtcttaataattccaacagtctctatacgctttcggtctgatttttctttctttcttttttttaaagatcattgtctcttactgtatttatgtcaaatggaaaaaatgtaaatatttctttattattattattattatactttaagttttagggtacatgtgcacaatgtgcaggttagttacatatgtatacatgtgccatgttggtatgctgcacccattaactcgtcatttagcattagttatatctcctaatgctatccctcccccctccccccatcccacaacagtccccagagtgtgatgttccccttcctgtgtccatgtgttctcattgttcaattcccacctatgaatgagaacatgcggtgtttggttttttgtccttgcgatagtttactgagaatgatgatttccaatttcatccatgtccctacaaaggacatgaactcatcattttttatggctgcatagtattccatggtgtatatgtgccacattttcttaatccagtctatcattgttggacatttggcttggttccaagtctttgctattgtgaatagtgctgcaataaatatacgtctgtatgtgtctttatagcagcatgatttatagtcctttgggtatatacccagtaatgggatggctgggtcaaatggcatttctagttctagatccctgaggaatcgccacactgacttccacaatggttgaactagtttacagtccccccaacagtgtaaaagtgttcctatttctccatatcctctccagcacctgttgtttcctgactttttaatgattgccatcctaactggtgtgagatgatatctcattgtggttttgatttgcatttctctgatggccagtgatggtgagcattttttcatatgttttttggctgcataaatatcttcttttgagaagtgtctgttcatgtcttttgcccactttttgatggggttgtttgtttttttcttgtacatttgtttgtgttcattgtagattctggatattagccctttgtcagatgagtaggttgtgaaaattttctcccattttgtaggttgcctgttcactctgatggtagtttcttttgctgtgcagaagctccttagtttaatgagatcccatttgtcaattttggcttttgttgccattgcttttggtgttttagacatgaagtccttgcccatgcctgtgtcctgaatggtaatgcctaggttttcttctaggatttttatggttttaggtctaacgtttaagtctttaatccatcttgaattgattttggtataaggtgtaaggaagggatccagtttcagctttctacatatggctagccagttttcccagcaccatttattaaatagggaatcttttccccattgcttatttttctcaggtttgtcaaagatcagatagttgtagatatgtggcgttatttctgagggctctgttctgttccattgatctatatctctgttttggtaccagtaccatgctgttttggttactgtagccttgtagtatagtttgaagtcaggtagtgtgatgcctccagctttgttcttttggcttaggattgacttggtgatgtgggcccttttttggttccatatgaactttaaagtagttttttctaattctgtgaagaaaggcattggtagcttgatgggaatggcattgaatctgtaaattaccttgggcagtatggccattttcatgatattgattcttcctacccatgagcatggaatgttcttccatttgtttgtatcctcttttatttccttgagcagtggtttgtagttctccttgaagaggtccttcacatcccttgtaagttggattcctaggtattttattctctttgaagcaattgtgaatgggagttcactcatgatttggctctctgtttgtctgttgttggcgtataagaatgcttgtgatttttgtacattgattttgtatcctgaagacattgctgaagttgcttatcagcttaaggagattttgggctgagacaatggggttttctagatatacaatcatgtcatctgcaaacagggacaatttgacttcctcttttcctaattgaataccctttatttccttctcctgcctaattgcctgggccagaacttccaacactatgttgaataggagtggtgagagagggcatccctgtcttctgccagttttcaaagggaatgcttccagtttttgcccattcagtatgatattggctgtgggtttgtcatagataactcttattattttgagatacgtcccatcaatacctaatttattgagagtttttagtatgaagggttgttgaattgtgtcaaaggccttttctgcatcttttgagataatcatgcggtttttgtctttggttctgtttatatgctggattacatttattgatttgcatatattgaaccagccttgcatcccagggatgaagcccactttatcatggtggataagctttttgatgtgctgctggattcggtttaccagtattttattgaggatttttgcatcaatgttcattaaggatattggtctaaaattctcttttttggttgtgtctctgcccggctttggtatcaggatgatgctggcctcataaaatgagtaagggaagattccctctttttctattgattggaatagtttcagaaggaatggtaccagttcctccttgcacctcaggtagaattcggctgtgaatccatctggtcctggactctttttggttggtaagctattgattattgccacaatttcggatactgttattggtctattcagagattcaacttcttcctggtttagtcttgggagggtgtatgtgtccaggaatttatccatttcttctagattttctaatttatttgtgtaaaggtgtttgtagtattctctgatggtagtttgtatttctgtgggatcagtggtgataggcctttatcattttttattgcatctatttgattcttctctcttttcttctttcttagtcttgctagtggtctatcaattttgttgatcctttcaaaaaagcagctcctggattccttaattttttgaagggttttttgtgtctctatttccttcagttctgctctgattttagttatttcttgccttctgctagcttttgaatgtgtttgctcttgcttttctagttcttttaattgtgatgttagggtgtcaattttggatctttcctgctttctcttgtgggcatttagtgctataaatttccctctacatcctgctttgaatgcgtcccagagattctggtatgttgtgtctttgttctcgttggtttcaaagaacatctttatttctgccttcattttgttatgtacccagtagtcattcaggagcaggttgttcagtttccatgtagttgagcagttttgagtgagtttcttaatcctgagttctagtttgattgcactgtggtctgagagacagtttgttataatttctgttcttttacatttgctgaggagagctttacttccaactatgtggtcaattttggaataggtgtggtgtggtgctgaaaaaaatgtatattctgttgatttggggtggagagttctgtagatgtctattaggtgcacttggtgcagagctgagttcaattcctgggtatccttgttgactttctgtcttgttgatctgtctaatgttgacagtggggtgttaatgtctcccattattattgtgtgggagtctaagtctctttgtaggtcactcaggacttgctttatgaatctgggtgctcctgtattgggtgcatatatatttaggatagttagctcttcttgttgaattgatccctttaccattacataatggccttttttgtctcttttgatctttgttggtttaaagtctgttttatcagagactagcattgcaacccctgcctttttttgttttccatttgcttggtagatcttcttccatcgttttattttgaacctatgtgtgtctgtccacgtgagatgggtttcctgaatacagcacactgttgggtcttgactctttatccaatttgccagtctgtgtcttttaattggagcatttagcccatttacatttaaagttaatactgttatgtgtgaatttgatcctgtcattatgatgttagctggttattttgctcattcgttcatgcagtttcttcctagcctcgatggtctttacattttggcatgattttgcagtggttggtaccggttgttcctttccatgtttagtgcttccttcaggagctcttttagggcaggcctggtggtgacaaaatctctcagcatttgcttgtctgtaaaggattttatttctccttcatttatgaagcttagtttggctggatatgaaattctggtttgaaaattcttttctttaagaatgttgaatattggcccccactctcttctggcttgtagagtttctgccgagagatctgctgttagtctgatgggtttccctttgagggtaacccgacttttctctctggctgcccttaacattttttccttcatttcaactttggtgaatctgacaattatgtgtcttggagttgctcttctcgaggagtatctttgtggtgttctctgtatttcctgaatctgaatgttggcctgccttgctagattggggaagttctcctggataatatcctgcagagtgttttccaacttggtttgattctccccgtcgctttcaggtacaccaatcagacatagatttggtcttttcacatagtcccatatttcttggaggctttgcttgtttctttttattcttttttctctaaacttcccttctcgcttcatttcattcatttgatcttccatcactgataccctttcttccagttgatcgcatcagctccagaggcttctgcattcttcacatagttctcgagccttggttttcagctccaccagctcctttaagcacttctctgtattggttgttctagttatacattcttctaaatttttttcaaagttttcaacttgtttgcctttggtttgaatgtcctcccgtagctcagagtaatttgatcgtctgaagccttcttctctcagctcgtcaaagtcattctccgtccagctttgttccattgctggtgaggaactgcgttcctttggaggaggagaggcgctctgctttttagagtttccagtttttctgctctgttttttccccatctttgtggttttatctacttttggtctttgatgatggtgatgtgcagatgggtttttggtgtggatgtcctttctgtttgttagttttccttctaacagacaggaccctcagctgcaggtctgttggagtttgctagaggtccactccagaccttgtttgcctgggtaacagcagcggtggctgcagaacagcggattttcatgtaccgtgaatgctgctgtctgatcgttcctctggaagttttgtctcagaggagtacccggccatgtgaggtgtcagtctgcccctactggggggtacctcccagttaggctgctcgggggtcaggggtcagggacccacttgaggaggcagtctgcccattctcagatctccagctgcgtgctgggagaaccactgctctcttcaaagctgtcagacagggacatataagtctgcagaggttactgctgtctttttgtttgtctgtgccctgcccccagaggtggagcctacagaggcaggcaggcctccttgagctgtggtgggctccacccagttcgagcttcccggctgctttgtttacctaagcaagcctgggcaatggcaggcgcccctcccccagcctcgctgccaccttgcagtttgatctcagactgctgtgctagcaatcagcgagactccgtgggcgtaggaccctccgagccatatgcgggatataatctcctggtgtgccgttttttaggcctgtcggagaagcgcagtattagggtgggagtgacccgattttccaggtgctgtctgtcacccctttctttgactaggaaagggaactccctgaccctttgtgcttcccgagtgaggcaatgcctcgccctgcttcagctcgagcacagtgcgctgcacccactgccctgtgcccactgtctggcactcactagtgagatgaagccggtacctcagatggaaatgcagaaatcacccatcttctgcgtcactcatgctgggagctgtagaccagagctgttcctattcggccatcttaggtctgatttttcaacagtatgcgcctggtactttcagaaggtgttgaatgaacatttttgaaaatacaaatgtatatatatacacagaggtgtatatatatatacatttgtatgtatagacatgtacatatatatcttttttgcttctatttactcaccagcaaataatagtttctagctccttatgtctatgacaatgaattggatcaatatacataaatttgtattttttgtagcaaattgactttgatgaaaaatactacaacttcttttaaaatattgtttgggctggacacagtggctcacacctgtaatcccagcactttgggaggctgaggtaggtggatcatgaggtgaagagatagagaccattctggccaacatggtgaaacctcgtctctactaaaaatacaaaaaaaaaaaaaaaaatagctgggcatggtggcgcacgcctgtagtcccagctacttgggaggctgaggcaggagaatcacttgaacctgggaggcggaggttgcagtgagccaagatcgcaccactgcactccagcctggcaacagagcgagactctgtctcaaaaaaataataattttatatatatctatatatctatgtatatagatatatatgtagagggagagagtttgatatgtttttgtgtattttattctttgagttctttagttttaaatatgaagaacataaagtcagttgttatcctttcttattctaacttgagagtcattttggggaaatgtttttatttcatttatataatagctcttataaattacctgttggtcttatttgtttgtcttatttttttctgcaaatcccaacatctgggttatctcagggtctgtttcctttttctttgaccttgggtgacttttttttttctatttcctcacatgtctagcaattgttgatggtatattgaacattgtggaggatatagtacagagactctggtttctgtagttttctttctcctaaagtgtattgagttttcttttttaaggcagttaaatcatcttcattgtatagagcttcattttacattttgttagaaaggagctctttcagattttgtcgttagacttatggtgaatatcttaatcctgggacatagtgtgtactcataaaatgtggttcttctctggtttcataggaaagcttgagatatttattaagaccctctaacttgttggccttcaactccacactcttctttcctgtgaagggcagcagctgaaatctctgctcagatttttcacggttcactggcctccttggcatctctcccacacacacacacaggtctgggatcagacaaggatttgaaggaaatttgtaggtagattttttagctcttctctgggactcctttctttctgggttcccactaccacctcaatttccagccaccctggcaacactgaacttcattctctgatacttcatgacttctagccacacaaactggtgactgttttcattgaagaagccttataaatatggatcttacccagtgcatatggttcccctttttattattattatttttttaattttattattattatactttaaattttagggtacatgtgcacaacgtgcaggtttgttacatatgtatacatgtgccatgctgctgtgctgcacccattaactcgtcatttatcattaggtatatttcctaatgctatcccttcccactccccccagggtcaaattcctcaaatatttgtcatcttttggcttctctctagtgccttcaattacttattttatatttttccatagtttataattgttatctgcagaagggctaatgtacgcaatctagttttccattgctggaaatcacttggaataactcagttttaaagctgcattttaaactttgttgatgttgtataaaaaatgataaaagctgcataattttctaaggagtaggcattctcaaatttattcagccatttcttcattgagaaaaattcaactttgtttttatatttctttccagtgaaaacaatgctgatgctaagaggcctccctggaaccagacagcttggttcatttcatattactatctcctacttcataaatgtgttagcttcaacaagttacttggtctttttttgcttctatttactcatctgcaaataataattctttctagctccttaggtctgtgacaattaaatggatcaatacacataaatatttaagcagttctttacccatagaatgcaataaatggtagcacattttgttgttattatttatcccaggtgttctgaaattttctttgattgatatattttgatgtcatatttcattcattgtgttggagactcagtgggtccttttaatctggaaattagcatttctcagtttgaggaatttttgcataattttaaaaataatttattcttctcaatcctctctgttgtctctttctatatctcttttaactttcttctttttactattttctctttgtttgttttggggaagttgcctcaattttatcttccaagctttctattgaattatttattgtcattatgttttcaacttccataagtttattcttgttcactaactatttttttaatttagcatcctgtttctttttcatggataaaatcagtatcttctgacatacctagatatcataggattgttttaggttttcttcaactctgagcattacacccatttcttctgttatcctgtttgttagttttgttctttgtctttcaagttggagttttcctcaaatatctgataatcttgggctgtttactcatatttaagaataagcaataaaatgctgattggaggcaccttaacaagtggggagattggggttcaccatagaataaagcaagctgtttccttgctgctccccagttgtgaaaattaccagttagtaatatctccagggctttcatttaaacgtatcagttttttcctcaaagaaatgttttagtctgctgctcaggtataacctaaatgccactatcttgggaaacaagtacggacagtgagtcagaggcctcaatgttcttgatgtcgatttttaatgaatcttcctatttttagtgtgacattacactgctcagctatgcctagtgtctttaaatccagagcctctctagcccagtctctcctgagaggaagttacctttctgcttcaccctttatcttcatttttggaggaccctggtgactcctgatattttaacctttttagctcttaccgaacaaatagccattatcttgttgcatttctactctgtaagcttagatttcagtttttttcactataccaagtcagttttccttcctacgtacttccatcttttaaaattttgttgacattcttcttcttcttgtctttttttctcgtttcttcgtccctgagcatttttttaaatgacttttgagggtttttttcccatcttttttctagagttttgagagacagcataggaaatgaatgttttaatccaatacattttactagaagtatttttgttaaaattaatccttagcattttataatatttaatctgatttatgaatattaaacctgatatgtgaacatgctcccttttttcttgttagcttttttttagtgagctgtagtataatgagtgatgcactgaagtcatcctttgcaatttgaagacccatgggtttatgatcatgaaaggtggaagtggttggtgttttgcatgttaattcttttccctgtggcctagtttcagtttagatgctcagagcagatttgatcctctccaaaatatccttcccttttgcatctcatcaaaggatatattaggcttgtacgttgggcaactttgcatgtccagctggacacaaatcttatcaccagtcttaagatagtttgcaaaggtgggtatcaaaatagagatttagaacccacaaatgacatttaaaattattttaaatattattttaatttgtctatttttgtcagaacacaattatgcatcatttctggctgactgattaatatgactttgaataattttaactaggctcagttttcctcagtggctaagagcatggtctttggaggcagttaagctggatgatcttgggcatgttatttactttctcacagcttaaattttcttctttgtaaaagaacgttaataatagtacctgcttcctaatgttatgaggaatacattagttaaatatgcaatgtgcttaaaacagtgtgtgacttctaataaatatggtatgtttgctattacatactttgaattaggaatacagggttggacaatccaaggaccataatcatataaccctccccactgcacctgccccccctccgcattaatatagcagaagagtatatctgttaatggcagatcagacaattgggatatcctttcactgaggacatctataaaagctgaataaaatatgagagaaaaataaaaaatatgtctctttaaagccattgtagagataaaaagatactgaagagtcattgggccagagcccattatggggcacaatgatccaagaatgtgagaacagcatttgaggccagttttttcctcaactgcactttgaggaaacagcacttttgacagttccttggagatagggagataggaattagaggcctggcaaggggagagatcctattgacaaaccctcactttgggttgaaatctcaaaaagtcttacctgttaagtaagagtgaactggatgtggaaggcctgtgcaggaactgcagcttagcttcaaattgtcccaatcctgaaattgctaatgcatgcaagcttgctggtaccgtcagcacctgacggaaacaaacatacatcctctctagaggaaaataaccgtgtacaagtgtagatgagaagaaataaacataaaggaacagaagaaatggaaaacataacagacctacagagtccccagatactgagttatcagacacagatttaaaaataactatatgttactacatttaaggagataaaggaaaagattaggaatttagggagaaaaaccaggaccactaaaaaataataaagcagaaaatgtatcatataataaagcagcacatctacccactaaatctaaaagttgaaattatataaaaaaagaaaatttagagttgaaaaatgcaaaaaaaacttaaatatgtgtttaatggcagatttaatatacatgaagagaaaataaataaaaaaagaatttcttatctaggtcagaaaaatatccagaatgatgtatgagaaaacaaaaggatataaaaccagaagatagactatctgacctgaacaatacagtaagaaagtccaactaatgtgtgtgattggagccacaggaagaaaaacagattcaaaaagagttattattcgaagacaaggtacctgagaattttccaaagctgatgaaagtttatgaaatctacagattgaagatgctgtctctataaactctctacaaatcaggacaaaaatataacacaaaacaaattctagtcacgttatattaaaactgaaaatcaaagcagaatccttaaaagcaaccagagaacaaaaggcagacaatggattgtagctgatatctgactagaaaccagtagaatatctggaagaccatggaatactatcctaaagtgctaaaaggaaacagcatctacttagaatttcagaacaagcaaaaccacccttaagaaatgagagggagagatcacaattcagacaagatggcatggacttgtccctccctgctcctccctgctgcttaaagttataaacccaagaaagaaaacacaattgtgatggttaatgttttgtgttaagttggctgggccacagtgctcagatatgtggctgaacattattttggatattctatgagggtgatttttggagaagattaacatttaatggttggactttgagtaaagcagattaccctccacaatgtggatgggcccccatccagttagttgaaggacttaatataaaacactgacctcacacaagcaagaagttctgccagatgactgcttttgaactcaaactgcaaggtgtatgtatataatagaaacatatattttgtttctcccattttatccaaatgaaaacataccatacctacttttctgcatcttgctttttgtacttaaccctttaaatatgtaagttcttgaagaactttccatattcgctcataaataatttttcttcctttttttccttaacagccacatatttttccattgtatggctatacagtcattattattttttttttttgcatgaatgtaagtgcattgtctttgtagggtaaattcctagaggtggaaccactaaaaatcaaagaaaatgaatctcaatccatgtctctctctccctccctccccccaccccccttctccctccctatcataatgatattgacaaattgccctctatagaggtggtataaatttacattcctaatagcaatgtatgaaagtgcctatttcctcatagacttaccagcatgatatgatacaagcttttcaatcttttcaaagccaataggttaaataacaaaaagtccttcagtctgcacttatctttttatatatttgatagatttatgagccatttatagttctttttgtgaactctatttcctttgctatttttctctttgtctatttttatattgggtttttgctgtttttaaaaaaactccagttgttgaaatttttatattgggggaaatcattcttttgtctttgatgtgaaaagacaatttttgaatattggcccccactctcttctggcttgtagagtttctgccgagagatccgctgttagtctgatgggcttccctttgagggtaacccaacctttctctctggctgcccttaacattttttccttcatttcaactttggtgaatctgacaattatgtgtcttggagttgctcttctcgcggagtatctttctggcgttctctgtatttcctgaatctgaatgttggcctgccttgctagattggggaagttctcctggataatatcccgcagagtgttttccaacttggttccattctccccgtcgctttcaggtacaccaatcagacatagatttggtcttttcacatagtcccatatttcttggaggctttgcttgtttctttttattcttttttctctaaacttcccttctcacttcatttgattcatttgatcttccatcactgataccctatcttccagttgatcgcattggctcctgaggcttctacattcttcacgtagttctcaagccttggttttcagctccatcagctcctttaagcacttctctgtgttggttattctagttatacattcttctaaatttttttcaaagttttcaacttgtttgcctttggtttgaatgtcctcccgtagctgggagtaatttgatcatctgaagccttcttctctcagctcatcaaagtcattctctgtccagctttgttccattgctggtgaggaactgcgttccaattttcaacccagaatttcatatccagccaaactaagcttcataagtgaaggagaaataaaatactttacagacaagcaaatgctgagagattttgtcaccaccaggcctgccctaaaagagctcctgaaggaagcactaaacatggaaaggaacaaccggtaccagccactgcaaaatcatgccaaaatataaagaccatcgagactaggaagaaactgcatcaactaacgagcaaactaaccagctaacatcataatgacaggatcaaattcacacataacaatattaactttaaatgtaaatggactaaatgctccaattaaaagacacagactggcaaattggataaagagtcaagacccatcagtgtgctgtattcaggaaacccatctcacgtgcagagacacacataggctcaaaataaaaggatggaggaagatctaccaagcaaatggaaaacaaaaaaaggcaggggttgcaatcctagtctctgataaaacagattttaaaccaacaaagatcaaaagagacaaaaaaggccattatgtaatggtaaagggatcaattcaacaagaagagctaactatcctaaatatatatgcacccaatacaggagcatccagattcataaagcaagtcctgagtgacctacaaagagacttagactcccacacattaataatgggagactttaacaccccactgtcaacattagacagatcaacgagacagaaagtcaacaaggatacccaggaattgaactcagctttgcaccaagcgcacctaatagacatctacagaactctccaccccaaatcaacagaatatacattgttttcagcaccacaccacacctattccaaaattgaccacatagttggaagtaaagctctcctcagcaaatgtaaaagaacagaaattataacaaactgtctctcagaccacagtgcaatcaaactagaactcaggattaagaatctcactcaaaaccactcaactacatggaaactgaacaacctgctcctgaatgactactgggtacataacaaaatgaaggcagaaataaagatgttctttgaaaccaacgagaacaaagacacaacataccagaatctctgggacgcattcaaagcagggtgtagagggaaatttgtagcactaaatgcccacaagagaaagcaggaaagatccaaaattgacaccctaacatcacaattaaaagaactagaaaagcaagagcaaacacattcaaaagctagcagaaggcaagaaataactaaaatcagagcagaactgaaggaaatagagacacaaaaaaccattcaaaaaattaaggaatccaggagctggttttttgaaaggatcaacaaaattgataaactgctagcaagactaataaaggcctttgacaaaattcaacaatgcttcatgctaaaaactctcaataaattaggtattgatgggacgtatttcaaaataatgagagctatctatgacaaacccacagccaatatcatactgaatgggcaaaaactggaagcattccctttgaaaactggcacaagacagggatgccctctctcaccactcctattcaacatagtgttgaaagttctggccagggcaatcaggcaggagaagaaaataaagggtattcaattaggaaaacaggaagtcaaattgtccctgtttgcagatgacatgattgtatatctagagaaccccattgtctcagccgaaaatctccttaagctgataaacaacttcagcaaagtgtcaggatacaaaatcaatgtacaaaaatcacaagcattcttctacaccaacaacagacaaacagagagccaaatcatgagtgaactcccattcacaattgcttcaaagagaataaaatacctaggaatccaacttacaagggacgtgaaggacctcttcaaggagaactacaaaccactgctcaaggaaataaaagaggatacaaacaaatggaagaacattccatgctcatgggtaggaagaatcaatatcgtgaaaatggccatacttcccaaggtaatttacagattcaatgccatccccatcaagctaccaatgcctttcttcacagaattagaaaaaactactttaaagttcatatggaaccaaaaaagggcccacatcaccaagtcaatcctaagccaaaagaacaaagctggaggcatcacactacctgatttcaaactatactacaaggctacagtaaccaaaacagcatggtactggtaccaaaacagagatatagatcaatggaacagaacagagccctcagaaataacgccacatatctacaactatctgatctttgacaaacctgagaaaaacaagcaatggggaaaggattccctatttaataaatggtgctgggaaaactggctagccatatgtagaaagctgaaactggatcccttccttataccttataccaaaatcaattcaagatggattaaagacttaaacgttagacctaaaaccataaaaaccctagaagaaaacctaggctttaccattcaggacatacgcatgagcaaggacttcatgtctaaaacaccaaaagcaatggcaacaaaagccaaaattgacaaatgggatctaattaaactaaagaacttctgcacagcaaaagaaactaccatcagagtgaacaggcaacctacaaaatgggagaaaattttcgcaacctactcatctgacaaagggtaatatccagaatctacaatgaactcaaacaaatttacaagaaacaaacaaacaaccccatcaaaaagtgggcgaaggatatgaacagacacttctcaaaagaagacatttatgcagccaaaaaacacatgaaaaaatgctcaccatcactggccatcagagaaatgcaaatcaaaaccacaatgagataccatctcacaccagttataatggcgatcattaaaaagtcaggaaacaacaggtgctggagaggatgtggagaaataggaacacttttacactgttggtgggactgtaaactagttcaaccattgtggaagtcagtgtggcgattcctcagggatctagaactagaaatgccatttgacccagccatcccattactgggtatatacctaaaggagtataaataatgctgctataaagacacatgcacacgtatgtttattgtggcattattcacaatagcaaagacttggaaccaacccaaatgtccaacaacgatagactggattaagaaaatgtggcacatatacaccatggaatattatgcagccataaaaaatgatgagttcatgtcctttatagggacatggatgaaattggaaatcatcattctcagtaaactatggcaagaacaaaaaaccaaagaccacatattctcactcataggtggaaactgaacaatgagaacacatggacacaggaaggggaacatcacactctggggaccgttgtggggtgggggtagggaggagggatagcattgggagatatacctaatgctagatgacgagttagtgggtgcagtgcaccagcatggcacatgtatacatatgtaactaacctgcgcattgtgcacatgtaccctaaaacttaaagtataataataattaaaaaaagacaattttttcctcatttgactttgcttataatgttgtttattatgcggacatttaaaatttatgttgaatttattcagtgtttttaatgacttctgaattttgtgtcatattgagaaaggcatttcctactctgaaattataaaagaatcatctcatgttttcttttattacctttatggtttcattttttagtctttgacactataaccatgccttacaatccacaccaggataattccaaaactgaatcaataacttaaagattgtttctatagttgtaaaaaatctaaaattttttttaaaaatcagttttccttgagactcattcttctctactcctcccagataatctcaaatttttctatttttgtttatttatttcatcatttgtttcatctctccatttccttcttgaaagggttctcttctacttttcctccatatctagaatattcttccaaccttttaaactcgttttttttcccccattttcctttggctcctttcctcttgtctcttcatctgctgttgccactatgtttcttactttgttttagtaatttctcacttctcgtgcatgccttttggcataatttttgcaatggttattatttttccccacaacttccccaaatcctaccatgtcatattttatcattttttgatatttccccatttcttcattcatggatgtcatttatcattaagtttttcattttttaaaaaatatttggtcactctttccagtgttccagtaagtcttataatgagagatcttctcctgttgttttacttttgtgcttattttttaaaaacttaatatttttgtatagtttctgagttcttatttattacttattatcaaaagagtttaattttatcatgaatagctatctatggaaagttcataggggtaggggctgtggtccaggttagctgatttttttttttttttttaatatttggtcagcaactttatttcaccaaagccagtggagaaaggagtattttttgttttgattttttatttgagggctggggagtagtgaaaaggaagactgcttatagtaaatatgccttctctgtgtatgattccttgtataattgtcgctatttctttttgggaaacaaacaaactgggtttatttgagccagctgatcaatgcttcctgtttcaaacaagtgttggcacctcaggtggtgtcccttgccttgaagaagggtagttttgctggtgtttgctgatgtctgcagcttcaggaagctctctctgcagccttttatctcctcttcctcccactccacttcttctgttttagataactttccacgtatatttggtctctgtcattttttattgtctcctggtttagctgaaatgaaatttacatttttgtttcttattttcccagttgctttttaaacaattttcaatataagggagaaatactgactttcaccctgccaagttcaaacaagaaatcagcctgtttttttttaagctgcctaaaggtaatgcatatttatttttaaatgtcagatagtatgaagaaaattttcatgatcttctcttgccttattctaaacagaaatataggcttcattgtatatataaagtttgtgatattcatattgctcagatttttttttcttttaactatgtataatgagcatcccctctgtattggtgaaagttgatctaattctttataatatctgcatgatattccagggaataggtgtaccacatttaatgtaatcattctctattgaagactttcagattatttccaggtatttgcaactataaaatgtggggtagtaaacattgattacacattcctttacactcatgtgctttgtttttctaagttcacttttccaaaattagtattgctggatcaatggtatttaatttaaatacattacagtctactttttgaaaagttgcatcagttcatctctctactgaatgaaggagctaatttccctacatctttgctacctttggaatgaccaatattattgcattttactaattcagggtggaaatgtgttatgccatcaataggttaacatgaagaataaaaataatatatctttttaatatcctttgtcaatttttaattgccattttttgttattttgtagagattcttttaaattttaggactactaaccatttttcttatgttacacataccttttctgttttttttcttttgactttatttataatgactttgactttgttgactttatgatatctttagttatagtacttcaaatttttatatagacaaatacatctctctttgtatttatggattttccgtcttcctctagaaagcttcttctatcctaaagttataaaaagttaataaaataattctattttcattatttttaaaaatttatatctttaatctgctttacatgtgaagagagatcattatcctggctctaggagtaatgacaatagggtgagggtttagaatgtaaagtaactgggtacattcttacctagcccaagtgaaaactggtgagaacctgaaatcaggcgaggttgtgggatggagatgagtagggatggcatactgaaacaatagaggtggaatttaagaattgaaggctgacttcctgtgtgtgattgagtgaaaggaaggaaagtaaggtcatcttggatattggatggcagcagttgctactccctaaggcagaggccttaggggttaagcacatatgggttcagtgtggactaagttggggactgagaagataatcttacataagtgcattgctagaaatttagattttctattaatctatgtaagttatgtaaattaaatttagcctaactcttgcctagtgagcaaacagactgtttcagagtgtgaatttttttctattaagttaaagaagtgcattgtatcatgatctgaaagttgaataatcaaatgtgaagagtgatcatttgactagccttaaaagtaagttttaagttgtaaaattaatataatgatattatagagaacttggaaaatgtaagaaaagccactcatgaatgactgctcttaagcatccaccacttcataataacctacttcctgcttcggtttttggaatggagggcatagataactttctgtagcacttccaataaaatgcttctcacataatgtctcatgggtgctcagataaataaatgtggtcagcacgctgcttttctttttgtcacctggcaaaactttaaagggacacatcccctttgtgttttaagaggttcttgcaagccaagtatggtaagagtttgttttggttcctatctcagctgatgttatcaaacttgaccaagtgggttgtatggccttataaataaaacccaaaactcttttatagatggttttatgtcttctagatttttgtaaattgtgcagtttacataaggcctgaggctgaactatatgtttttattttttggccttttcagattggaaggatttacccacctttgcattaattacactaagatctgcaattatcctgtgctcatccccaggttttttggaagttttccaagtctttaaatataattttctttctgattcttgaagcataataggaacctgagtaattgttagtttgttcaccagttgatgctaatggagtagccattaagtattatttcaagccctttatataaaatggaaatttttagtagctggtattgtaccacctcttgttttatggtctctgcagctataaattaatgtgaaatcaattataattcaatagggaccagttttcaggctgtttcctataacatgataataacatttattttcattaagaaagcaatccatgttcattgtgagaaaattggaacaatcaataactaaaaattataagacatcctattgcccagagattagcactgtgaacatttggcatgattagttaattattttaagtggaaatcacacacacacacacacacacacacacacacacgcatgcacacatacattgtttagaaaaacaaaaaattgaggcaatttaatatagttttttaatctataatttttatttataaatatgctttgaacatttttatgtcagtgctgtatccacttcatagcagtatggtattctatcttagagctatataatagcaaatttaatcaatgttttattattagatattttagtaacttgaacaattttgctattgtaaataacactaaaatgaatatcgtcatatatatccttgataatttttgtttattcaaataatgtttattttaaaaggaagagaaaatatgtgcaaaagcaaatttttaaaaattgcatcatacgaaattttatcactcaaagataactgttggtaatttttttgtgattttctttcagtatatttctatctatttatacaagattgtactattcatactatattattttacttcttattgagccatgacatgcatgtaaatgcataaatcataagtatatagtgaaattaattttcacaaattgaacacatcaatgtaaccagcacccagataaagaaatgtcaccacttcccaagcctggccccatctagccactgccttccagagggtaaccactacactgcttctaacattctaaactagttttgcctgattttgaactttatacaattgggatcatccatctgacttactttgctcaatacaatatacctataccgttatatgttattgaagtttgtctgtgtttattgctgtgtagtgttcccgtgggtgaatataccatagtttgtttttctcttgatggacacttgcatagacggttcatttggatctattttaatagtgttgctgtatactttcttgtattattgtattattttggtaaactatatgctgcatttttcctctgactttttaccttaatatgtcataaacgcctttcttttaaatacattttattgacataaaatattgtattgtgtgattgtaccacaacttaacctgtcctgcttttggactttcagtttatttacagtatttttctgtaatagacaacactgagatgaacatcctggtacataagtctttgcacattttttcattttcttgaagaagattcttacgcagattgaaatggctggctcagtatttaaggatgtttgataattactgccagattgccatctaaacatttatacttacttatagcccctctacaaatgtatataagtacctgtgttcccagaatcttattaaatgaaaaattgcaacttagtgtaattagcagcatttggttattaatgatatgtgatattttattaaactgtgttggacatagatggtaaattgctttttctctttaactttgtcattttatcttttagacagttctatatttttcttgtattttatgagggtgcttaatatattaggataattatctttcctggttttccctagatttttgcttgcattttttttttcttttttttttgaggcggagtctcactccgtcgcccaggctgaagtgcagtggcgcgatctcggcttactgcaaccttcgcctcccgggttcgagcgattctcctgcctaagcatcctgagtagctgggactacaggtgcctgccaccacgctcggctaatttttgtatttttattagagacggggtttcaccatattggccaggctggtcttggactcctgacctcaagtgatccacccacctcggcctcccaaagttctggaattacaagtgtgagccactgtgcccggccaattgttgcttgccttttaattttatccatatatatatttttttttcgctatgtgaaactttttttgcggtaaacatttgggtgttacttttagtttatttcttaacttctactgaatctcaattcctttatgagaagaactaatattgtaaagatggcagttctttcccaaatcaattgacaaattaatcaataagaaaattcatttgggtttttacttctaccttagtaaaatgattttaaagttcacctggggacataaatgggcaatgtcaaaaagtcagacagttttgaaaaataaaaatgatgagagatgatttgcaatactaggttttaaagtatgttcctgacctgagatcaggtactaagtcaccagcttagaacaggtcaggccagaaagtcctgagaaaaactcgtgtgtgtgtgtgtggtgtgtgtgtgtgtgtgtgtgcgcgtgcacgtacgcatatacatgcctatgtatctcatccatggatcatccaagtcagatagattggtcaataaatggtgttaggacagttggccaaccacagccagctctgtgagaattctaaggagcatgtgtcagtgacttagagaaactaaagtgataaatggaaacaaaaaacaaaatggaaaatgtatttcagtaataaaaggatatttggtgctattctcaggcaggagagaaatagaacaccaagactaacatctactcactgaatatcaaatatcaaattgccaggacagaggctctgacattttgcataagttgggtggcacgcctggtccagtcagctgtgccccagtggtgtgaccctgtctgctctgggcccacccctgtgcatcggtcaggggtgaatttcagagaaggggccagttcatggtagggtaacacccttgaaggtgaaagaatgaagatcagtgagccatacagcctaagcaccacttgctgcaaagaacagtcacagtgaaagcacatctctcattattagtgttgttgtttttgtcctttgcaggccaagttcattttatcccccatgccttaaatgtgagagtcttaacatttaggtttctctatagttgtaagaaatttcttttcagttctaacctaaacccaccatggtcaaagtgcaaagccccagcaataattaccctttatcactcttaggaatttatagttttatttttctctttatatcaggtgcattatcacacagacaaaaatgtactgtgggtttgtgaaaatcccatttaagcatttgtccttgacccttctaggtactttaatagaatatcacttacgtacacattgaccttttataatgaatcttccattatgtactaagtattcttgtaatttctctgtttttgttttttttttcatttgcaagggttgtattaaccagtacctgtagacacatctgtgtccttcctcatgttagttattttagccaggaataacatagacaattctgcctttgttttggtctcctagctttaaagttgcatccatcatcagcttcttctgaagctcatctaactctgttgcttcttatgataattaaatttgaaaaatagctaaatcaattcagtaattatgttggaatagctactggagtttgtcatcattgctttgacttagtgtagagtttaccagatagtcatttctttggatgtgaaaaggtagatgttatcaaagaaagaggtttctgcagacatatatgtttgagaaacacagagttaagcaaaggcaaattgattctgatagacttcccagaagctccaagaagctaatatgtcttgtgtaagccccatgaaggcaatacaattagaagcatttctcatatttatttcaccttagagtccctttctcaaactgcttgtgggaacaataacctgagaaacacactttagggaagtggtgatataattaaatattgacatactaattttctcattagtaaatttaaaaacatatcctctctgttgtcatgttggttggctataaaccagagaaatcaaggggtaggggcaccggtctggaagttaggagcacctgaactggctatgtgtctttgggaaactgcttctctctcctgggactgattgcattttctcatccttaaatgagattgtcatacctatgtgacctcttattcatggacacgagccttctccagctctaggatgctatttcatttgtcgcacagggactctgactgtgtttgttgtagaaaaaggaagaagcttttaccaatttaaagaaagttttctcagtctctgacttgtccatttggagctattttatttatttctttacaaaaacaagtcctgatctttttttttttttttttttaggtttgatatgatcaaagctgtcacttcagtctttcactaactgggctccttagaatctcatttagaattctcagaaaccaaaagccagtgaaataaagtcaaaggaacagaaatgtcaccttccaggaaactccaaaatgccattaacacctttaatgaggctttttaaaggaagaatcagtctgcattttcagtgggccctctagtctgtctctttatgctcatcaggaagctagaagatggcagcccatgagcttcttcccttgcctttgcagtctgtgggtaggatgttacttctaattgacttaactgaaacctagtgcaagtacattaggtttcttcctgccctcaaccctaacaccacttgggcaaagtggactgacaatttacttttgagaaatagcattaatggagtgaaaaataaaattttttaaaaaaatagttggaattcctgttgtgatttgttggttaaatcttgagattggttcgcattatgcagtcataaggttttaaatcatctagcaaaagatttctggggattgagctgttcctttctctatgtttactaccattatttggaaatgaaaagggcagataaccttcttttaaatagcaaccatgcttggggtctcctattcttaatcattacaggctagaaaaagggggcagggaactctggacatcagattttaaaacctgaggttttaaaactagaaagcatttacatgatattaaggcagggactctgagtcagaccaagacacagtcaaatcccaggttgccattgtcttagacataatatatattgacctgttttctcatttgtaaatggtggtggtagtgactgtcaataggattttatgggaatgtataaatttacatatacatttataaatgtagtttatatgtatgtataaactagagcatctggaacatagtagatatccagtcaaatagtgatctattataatcattattgttatttttattgtaaataataagcatattccttgaacaatgctttaagtatttgctttagttatgatttttatagattatattatttttatttagttttaggtttattttatgcttatgaaagataccttaaggacaatagtatgcatgacttcaaccttttaataacaaggtgaagcagcagcagcaatactgtgtctctctaatgagatggaatattactgatagctctgaagcccctatgtgattattcccaatgaaatcctctctcctctccttagaagtaccacattccactttggttttaccacacttattcctagacaataattttttgacattctatgtttttgacccttatgatctaaaaaaaaataatacttgtatgcatgctgtacatgtattctgtacatgtggtgtgcttctctgtctcaacattatgttaagatttatccctgttgatgaatgtacctattgtatgttctttgccactgtggtagaatattctattgtataaaacaaatatgccctattttttaaatcattcctcctatttatggatgtttagtgtttttccagtcttatttatttatttatttattttttgctattttgaatgtgactattgttactattcttctgttaggttaactatgtgaaatcgccatttttataggtcaatgatccaaactaaaaatttcatatgatacaacccaattgatgtctggtgtatatttttaagattatatctgaagcatatacctaagtgtggcagaaatgctgatttatagggtatataaattttcaacttttaaaatgaaacatgattgtattacaaagagattacaccaatttatacccccaaatgaaaactgtcattgtcccacttcccaccaacatttgatataaattttcattttggtggatgtaaaatatagttttaatttgcagttctgtaattaccattgaaattaagcattattccatatgcttatttgccatttctattttttgagatggagtctcgctttgtcacccaggctggagtgcactggcgcgatctcagctcactgcaacctctgcctcccaggttcaaacgattctcctgcctcagcctcccaagtagctgggactacaggcgacgctcaccatgcccagctaatttttggatctgtagtagagacagggtttcaccatgttggccaggctggtcttgaagtcctgatgtcaggtgatctgcccacttcggcctcccaaagtgccgggattacaggcttgagccactgtgcccagccaacaattatttttaaaaatagagtttcccataatttttaggtatgtactgcttagaggtgtttccctacaatatcatctttgctgctgctgagaaaatggcaaaataagattatttatgtttttatccttttgaagaagagaacttattgatttttagtttgtatttcatagtcatatggttaaaactttaagggatatattatacataggatttttttaaagtattataattttttttataaattaacatatttttatttttataaaataattattttgtttgtattattttgcagttacatataatacttaacatttagaacttcaaagcacaaaagtttagaacttttagatattgccttttggcattttgcagaaatccatactaagtcttatgtatggttcactttgttataaagaatttttttttcttaatttaagaattgggatgatgaaactggcaaatgacccattattttctctttttctctgtggccttggtgaggtcatttgtaaatatttgctgagtctgagtcaagagaaagatactaccttacataaacacttacatataaacactatatttaactctattttaataacaaaataggttgattttgtccatgtagagattttatcttgcttgtatcattttggtttcccaggtcttgtttcatcatctgtgttgagtaaccatggggaggaagctggacctgtctggtttgactgatgatgaaacagagcatgttcttcaggtggttcaaagagacttcaatcttcgcaaaaaagaagaagaacgactaaggtgagatgcctgttttgctcagcagcgtacagcaaaccacatgtggacaagcgtaacaggtttcctgagggtattccctcctgctagccctgagtttggatatacacttatgtttgtcagaatgtcctgtcctttgtagaaaggtttgccagtttcagaaatgtcagttcagaaatgtgttgctcacggtcccaatcagggttttgttgggacttctgaccctgtatgtcattactagctatagaatgagtggagcttgtggtgaacacgctgccttgagcttcctcttggccttagttttttgttggcaggtcttattgaaggataaccaaagtgttaagtgaacagttcttgtgagaatgagtctcatgcatgtacaatgttctgtttaaactctcagctactgtagcacaggaaaagagctttgaagatcagatacaaggaaactgaccaccaggctgggatgggatcacctggcttagcaccacttccctcattttatagaagaggaaactgaagcctgaagaggtagtctcctgactcctctgcagttgatatttccccatgaaaggctcttggaaatactatggcaggtcagttccaactatgcctaagttggaagaagtcagagtgatagaaatgaggtcatgtgttaggcctaatgtattgaaactgatggtaggtcagtattagtctccctcatctataaaacctattattccttgggattccatgggtttattcacagcaccatcttcttccttagacactaagcaaaaacctgttttgctcactttgattatccaacagctagaacagtgcccagcacagttttaaatcaattaattattaatagatttcttgtctttcatcaaacaagtatatatttaatatatactatatgtgagaccaaaaaatggtggaaataaagattacactaaggtgcttatagcctagcaagggacataacattgccaagaagtataaagtctgaggtactccgagatagaaggaaaacaatccctttttggtggtaggaaagatttaccagttttaagctgagtgagaaagggcatgagtagagctttggcataatcctgaatttccatatttacatatagaatataaaagagaacagagtcaaggacgtccccaaggttttttggcataggaaactgaagaatgaagttgtcattcactgaatataaagacagaggagcagggtattttgtagccaggtaaagttgagagctctgtctcaggcatcttcaatttgagatgaatattggacatccaaaggagatgccaacttggcatttatgtatttgcaactaggaatcaagtgggaggtccaagttggaaattaaaatgtcatggaaaaggtcaccagaacaataggagagtagatggagcagggaaactagtacagttgcttggcagcgctaagaccaacttgaagtttgtggtcactattttacattgagaccagtttctacatggtagtgttttccctgtatctttcagcctctttcctctactgaaccattggaaagaaccatgtcttgatcagttttgtgccccaatctctggacacagggcctggcacaccgtgggtgtgccctaaacctctgtggaatggatggatacatgtagattgattgtcaatccatatgactaacttcatgtgtggtttgaagaatccaccttaatatttcctttaaatcataaagaccatctgtgtgtcatgcttcatctcctggaaactcacatatggataagccaagaccttgtttaatgtccttttctgactgtggagacttgccttagctccattgcagagtcaggtgccagtccatgtggaagagcagctttagggcttggtttgaggaggaaaattttaaagaaagagcagctgtcactgtagtagacccaacaaaatgggcaccgtctatctcatgaggacaggtagtcttagtggacagcagtcagtagcctactgcaattctgtgaaaatgcatggttatgggaacctgcttataatggagaaaatgatgcttgaaatcaccagtggccaaagaggaatgactgcttgccatggcagctcttgtggcactggaactggacattttttctctgaagacagttgttactattgtcctctgcccatgaccagtgacatgccttgatagctacctagcaaactgaggtgacattctgaatgattccagcaaagaatattactgtcgaataaaaagattatgacactgcaaaaccactgaaattgccaaacatttgcctcacctttttatattgcttgaattttgggtatgtgaaagaatctaggaggtagtattattgaactgaactttgaaagtattttagaattatagaaagtattttcctttaatgaatgtataactcataatagaagacttttttaaattttacaatcttgaattagtttccttttcccccgaccagctgttctttatttacctagtttctctggctaggttttgtgaggttaggtcttgagtgtagtagagcttatccagtgtttataatgatctgttcttcagttcagacgttaagtgtaatagtaaataggaggtgggagtgtgaattaagtgtcctcagaacacatcatggtaatgtaaagagggataatggggatgaagaattcatggaaagagaactaaaatgtataaagcagtcagcttgaactggcactgccctgggtactgcacaatttatcttattgattcctcactaaagtcactataatgttagcaccagcttacatggaggcatccaagaacagagagattacaaagcttgctcagaatcacacagttaattggagtagggccagtattttgttttccagattctctccattacgtagactgggttaaaccatttcaaaactgttttactctccctccctccttaaaataattccttagtatcatctaatgtccagtaaatttatccaactatcttttttctacaatgtgttcaaatcagaatccaaacaaggtccactcattagtctggttgttttgaatcttaaaccgcttaattttgtcattatttctgagataattcagaaggcaagcatggtatttggtgtctctgataatattttacttttttagtttgtcattttatggttaggctgattagacttggagcttagttttgttgtaattttctccccctttaatatggtcctttgataacaatttagatcttttccaaattctgctatttaaattttttaaaaattcatagctaagtgtttttctttgtttgttgtttgtttgtttgtttgtttggagacagagtctcactctgttgcccaggttggagtgcagtggcacgatgcaacctctgtctcccgggttcaagaaattctcctgcctcgacctcttgagtagctgggattacaggtgcaagctctcacacctggccaattttttgtatgttagtagagatgaggtttcaccatgttgcccaggtgggtctcgaactcctgagctcaggcaatctgcccacctcggcctcccaaagtgctgggattacagccatgagccactgcgcctggtcgtgtttttttttatttcccaaaagcatgtatttagaatggatgtgatattgttacccatatggaaggggcaatgtgactgtcctggctctggcaggtaagtggagaaggacactggggaaagcttacagccctcattctttacaggactcctactatcccccactgtctgctacagctcacagtgagcagaggcacatcgtggttggtgtgtagatatcagctgctgtgtgtaggtagtcacaggcctcactatgtaaagtgattctgtcaaccccatgtcagtaagatgagacactttctcagcactggggatgtgatgcattgaatttttaatgtcattaaagctatatgtttatagcaggactgttgggggaagatagagaattgataggcctgagaatagtagacaggcaataccagatactggaggtgaggacttatttacaaattcagtagagtaagtgttgattccatttctccaagacacacaacaggattaacactatggatggaggatgctggaaacaaaaggcatggtgacgcctgctcctacctccaggtgctttgggttttatctagattactcaagtaaatgtgtcaaaaagttcatattgtacttggttaattttattttctgtgtttcttttttatcagatgatttcaggcaaatagtaaaattatgcaaatggtaaagaagaccttataatgaaaagcctaagtcctctgctccatatttagttcttggtcctttagacctcctggcatgaccttcataaatctaaacatgtgcttctgttgctatatttcaatatatcagtattagacattctttcagttttctgctctgaaattggggacttagctcacttacttatattacccttgtcttttgtttcttgatgattatattattatttttggcttggtgttctactagtcatctttcaaacttaaataatagatggaaacctctgagtcttgttctgtcaatgtttgccattctttttcagttctgacagtgcaacattcaaatagtgtccctgtctttacctctttacctccttctgccctgtgtcccagctttccctataatagctttactctcatacatacaaggttggggcattcacccgctgttccaaaaacatatttgagtctcctgttttgttcataggatgattctaactgttgtagcccttatatagttacgattgaaaatattaacattgtttaccgctacctctccatctttttcagagctttattgaagttagcaggtatctgattgttcttttccttttctctttaccattatgaattaattgtttttatttctttgctattattggaaagtggtcttgagagggagcagaggccattaagtgtttgctttgtctgtcatctggaatctaaattccacagtaacttgcttactagtcaaggtcatgtgaggatcctggggagcgtgcagaggtggaaagcactcccggtgtgcagcatatgtgcagagcatgctttggggtcaaacagatatgggtatgagtccttctatcatgattatcatgattatgttgggctatttgacctctgagcctcagaggtcaaaatgaatcctctgggcttcattttgacccaaagcctgggtcattgctgcacattaaccatgtcccatttgtaggaaagttgacatttctggaaacttcaccctgacttttccttcatctctgttgatagagcctctacgggtgaggcaccccatgatatgggctgtgttctttctgtaacagctctatccccaggttctatgattgcaggcattggtcttgcctactgagaacatatcttttcatgaactttcaggtttctacacttagctttgattgccctctctgcttctagtgttcctccatttaggagagtatggctaaacatactgagtgcctaaacagaattcaatggaaataataaattagcataacaacacagtatcttcaactttgtctatagcagttatgctttcccagtaatgaaatatatcatctatgtcatatgactttttccatacctttattctctcagttatgtaactcttgagaaattttcaaatagtagaaaaaaataaccgggcacctatgccacatttaagtccatgatgttcaaaagtcttacccaactaccagatttctactagtatttgagtgggagtgtggggccctcagctgggatcagtgtggtatttatagctgcaccaggtactgttggacagcttttggacaagcatgtttttgatgacattgttcatggcagaaataaagtcttggagaagagaagaggcactgactggaagaagaaatgcaaaatacagcttcctaggctatcaacagactagcaggcagaccatccaggttcagtgtgattaggggtgggagaggttaagacttgtttccctctgttggaccccagtgcttcctgtgtgactcagatagaggaggcctggcatcaattggagtgcattggtctccccatggtaactcttgagtaccgaactcctgagtaccccatggactgtgtctgcttgggtgttgggcatttggtttagtgttcatcatcaaaggccatgttccctcctctccatctgcctttctgtgtatctggcagacaaaattttaagaactttttcttcacatctacagtgtagcatatcatgatgtttcatcagtataaatatatagatagattaaattattaaaataagtaaatagactgtcacctgtgtggcagagataaacagtgctcaccaaatatcttatgtgctcatgcatattcccagtgccttctgcagttagattgcagccatgtgattaggtctggataatcgacagtgagaggaagggcctgtattacttccaggtcggggcacttaagagctggtgtgactctactacctctcccctcgccttctgtggtgtccttggaggccttgtgtggaaacatggcaccacatgatggagagagcctgatccctttgacactggatggaagagagtttctgatgatcagcaggagactttgtgtgggtttattgggttaagtcattgaggccttggggtttatttctcacagcgacatagcctagtattactctaagtaatagagtttttgagagctaaaagagagccaaatatttattatgccccaacctttgacttgtagatgaagaaacacgctcagagggtgcataggcagttagtggtagagtctggatgcgacctgagtttcctgatgccagggctccgtgtcgtctgccattgggcctctcaggtagtagaagacacctgcagcaagatatccagacctaaactggaatcacagtttatgcactatgattttatatcatcaggaacatttacaaagtggttttaaaaatgactgttaattgtacaatcctctggtgttcaaactgagtcttggagtcattgatgagatagccacaggctttaaaatttctcatttactatgtgcttgccaaaagctagttagcatttggataacttccaaaggttgctggtgctctaatggacttggtctgtggagtagcaggggttagactggatgcaattattttctgtaactgcgactggcgcctaggctgggccaggggaaggaagggagagcagagggcagtgagtgtgagatagcacttcctgctgtgtctttcccaggcgcagctgccacagcccagcagctatgatgtgtcagctcctcttctggcctgtgttaaggaaggggaaataaacgcttttgagacctgtttctgttgcccataatggtaccattactcacttgcagatgtggcccacatcttccttgccacctccaggggtaatcttccaccccccccattgctcaggtctaagtgttctgagaaaataaataagagctgccagggtttgttggagacccactatgaggaagcaaagcctttctcaaaatctagaaataatttgtgtttctagtcagtgacacagagactcctctgaggattaatcaccatttcttaaagtagaaagaacatggtactttaataaaatgagttagtgatctttcttcattcaagatttattttcattttaaacaaaaattttattataagaacttagtagaaactcaaaaagtttctatttcaaacagtaacattcctttgtttttactgtcttttgttctgaacacttaaattaagctaatgaattagcaaatacttctgcttatatccttccctgaagctggaagacagatcaccttgtctttagaagaaatatgccttatggtttgtgaaataactgtgtgtgcacagagtgcatttgcctgaggtctcctcatggccttttgtagctctttgatattctgtactaacactttggcattaacctgcccagttaatgaatctgctgtctcagtggggatgctccaaggtagttccttcgatgggattggtagatcaggtcacctggcagtgccctgaaaaatcagagttgagagcaggtgcatttaatggtgcagtgggaggcaggacacagctctggttgagatcactttgtgatgggggaaggcctaggaggagacagaactgggagacctggggagagagcctggagactcatggagggcaggtgcgcaggccgcagaaaggagagtggagaggactgatcttaaagctagaaggtatctcacaagattatttttaaaactctgtcttagtattggtatttttgtcaataatggaaggccaatattaatccaaagctgttgggtatttattaatttgcttcaaaatcatattttgaatgtcaggacccttctgggcaaatatgaaaggggtgaaagggcagtaggggactcacaaatttagtaaggttattagcccttgaagaagagtccaaaagatgagctaaatcctatatgaataattaggatgctatagacaatgagaaataaagatattaaggcagactcatgggaatacatctgtcttagaggagggggctaggaaaaggaaaagacttcctgaaggagaggtgtgtttgatttgacccttgaagatggactggattttttagtggattgacacataggtctgagcagcagggagcatcctgggtaaagtaatatggatagaaaagggaacatgttttcacaaccccaaatcaggacctgtggtggggcaggggaggaagagactgttttgaagataattctacttcactgttactaatagcattgaatagagtgtggggttccaggaatatcatctccctttatcccaacaatcctgggaaaagcacgttctttttttttgtttgtttgttttgttttgagacagagtctcactctgtcacccaggctggagtgcagtggtagatctcagctcactgcaacctctgcttcccgggttcaagcgattctcctgccttagcctcctgagtaactgggattacaggtgtgtgccaccacaccccgctgatttttgtatttttaggagagatgggatttcatcatgttggtcaggctggtcttgaactcctgatcttgtgatccacccacctctgcctcccaaagtgctgggattacaggcctgagccaccatgcccggccgcatattcttatctatttacaaaatgggagaaccgaggctctaaaacggtgttaaataatttgctcaagttgtacagagtaagaagtgaattcaaactcaggcggagcagccctagagtgagaccagtaccaaggcagtacactgcccttggtactgaaaacaaggacattcaggtgccgtgggatagaatagatgaaattaggaccatcttggaaaatctggcacctgtgcttgctaaaacttgggatgtgttcagggatgggaaagtggtagggtttaagtcagtatatgagaagtgtgtagttgggacaatacagtagccaactagccacatgtggcattaagcactttgagtatgtcttatccaaattggggtgtagtctaagtgtgaaataaatgctagatttcaaagatcaagtataaaaaatgtaaaatagctcaataatttttatattgattacacattgaaatgtttctaaaattacatcttaaatatatttttaaagttaatttcacttttttttactttttaaaatgtggctactagaaagttttaaattatatatatggctcacattatatttttattggacagtgctggtctgaaatgcaagattaagcagtttgggatttattaaaccaaaaagtaagctttctttcccaattttgtttaggattattccttttttatatgtggtttttaggtatctgtaagagccagctaaagttttagctaattagtcagatattggcctttgctatcaaatattgttgtctctgtcacgtgaaggtggtctctgagtcatgcctcagtgttgggtttattacacagtttaaaaaaaagcatactgtgtccatgccatattcatgacaaagagtttatgcatctcaggacagaatgaaccctttcatgtttccctgaagttaatggttgaccaaatacttcatgacctttgaaataacacatggctttagaatggcccactattcaaaatttatatcacatctttggcgccgtaaagttatcagacattcacctgtggggtctgcctttagaaatggtcaggagagtttgatgttacaagtgtgcttgtaatgtagaaaaaggaatcatgctgatgctcttatttgctttttaacttgtggtccttcaaagatgtacagttactaatttggagattcaaatatgttctccccataatcccactttctttaataacagttttctactaggttgcttttatggctccaagttcctgatcttatttacttttccactgcaaatgccagagactcagcttctgggccctgataaagcttttgtggccttaattcttggcctgaccttcatttcttagacctctggctgtggaaagcatttctttggcattacatgtgcatagaattcaggacttgaaagggagcaaggaggaaagtttccacagcaatttgaaaaagtagcttttctcacttacagtaattcaggaatgtacaaaatcctttagccagaaatggcctgaaaacgcagaggaggtaagcacaatgaacagcctggaaatcagagtttcttcctctctctgtgctgtgctggtggcatgacaacttacttgttctcacaggctccttcagtgcctgggggcagtttcctgcctcagggttaaagggctgccttcccctccttactcagcttctgaagccaacagatccacctcctggtccgtttctgaacctgatacctgcagaaggaaattcatcaacaacctctccctgactgtcagggtgacttataatgagcttcttctccttctcccagatggggagattcctgtcctagcccaaagacttttttggctggaaaccaggttgccttaaattgccaggagagccagcctccctggcctggtcccagccctctgtgctcaccttccccctgctggtctgacttacaggctcccattttgtgtcagcttctcctctatcggtgggtgtgggcctaagacttaggaccccttccctggctaattcttatacctcaggctggaagagactagctcctgcatacccagctggatctggctctccagatatggtgatgtgcccagtaggttggcaggctgtttggttctgaccacctctggaattagtactagaataatacgaaaacagaagacaccaaataattaagtgataaaaagttacaaaaactgctaaatgtagtacctaatcaattatggtcaaagtcttccactgatgttggaaaaattatcttagctgctccaatcaaaattcaaatatatccaacaaaatctcttccaaatcttaagcaaaatcctttaaaaccagaaactttagaaggaataagacgtatagttttagactatataaaagaggcttgattattccctgtacaaccccatataacacttcagtccttcctataagaaaaccaaatggtagaggatggaggtttgtgtgagaacttagagaaattaatgatattcctcatcatctggtagtgccaaacccccatacgttgttgactgtaatatcaactaaaggtaaattcttggctgggcatagtggctcatgcctgtaatcccagcactttgagaggctgaggcaggcagatcacctgaggtcaagagttcgagaccagcctggccaatatggcaaaaccctgtctctactaaaaatacaaaaattaactaggtgtggtggcatgcacctgtgattccagctactcaggaggccgagacaggagaatcacttgaacccaggaggcggaggttgcagtaagctgagattgcaccactgcactccagcctgggtgacagagcaagactccatcttaaaaaaaattatttactgtgataaatttatataatacattcttcaatattcctgtagataaagacaatttctcttttccttcacttgggaagacagaaaatacacatggagagtcatgcctcagggatacactaagagccctacttatttttcacaaatattaaaaggtctctcagatgttgacttctgtaagaaatctattttaatgcaatacatagatgatttgcttctctgcttagaggataggcaaacctctatagaggatgagattcacttgttataaccattagctctaaagggacacaaggcctcaaaacaaaacacattagttttgtcacacaaagatatttgggtaatttaatatcaaaggaaggtcttttcatccacctaaacagtatattggccttccctgacccccaaaactataaaacaactaaaaagatttctggggtgacaagatactatcagaattaaatttcaaacttctgcctaaaaactcagcttttatatactcttctgaacaagataaactagaacccctgaaatggactaagaaaaatcagttaacattgaaagaagttaaaaaaagctttataaatgccccagctttgagacacccatgttatgatattccattttcattgtttgttcatgaaatcatacaatgccttagggcagtctaacacaaaaacgtgcagaccaaaacagaccagaaggatacaagactctgtgactaaaaaatggccaccttgcacgaggacaataactgctactgctctattagtaagaacaactgaagaaatagtgatgggctttcccatcactgtttttgttccacattctatggaagcacttgtgaattcacaccacactcaacattgttctatcagcagattagcttcttatgaaatttctcttctttctatacctcacattacaatctctaggtgcagtcatctataacctgccactcttctgcctctacattcagatgagatgctgcatggttgcataatcttaagcaaccagctttgctcttctagaacagacatacaagagattcctcttagtaacactgatgttatgtggattacagatagatcctacttaaaattaaatctggaacttatcgcacaggttacagtacaatatctttaactgaaaaaataaaaccagaagtcaccttggctcaacaaataagacggataacattaattagggcctgttaactgaccaaaaaactctgctaatatgcatacagacagcagagatgctttcagaatagctcaaaaattttaagtgctataaaacaaagatcttctgatcaatccattaaaaaagataccttattatacaattgttaaaagccatattattaccaaaatgtctggtcattattaaaatcccagttcattccaaatcagatactccaaaaaacagacaaaacactagccaataatatagtcaaaaaaagctgctctaaatacatctaaacaataaaataaacaatctatattaacttcaatctatattaacttctaatatcagtgacctaaagaacattaaatttgacatgaaactttttaagtatagaactccaaaatccaagcaagcaagcaaaaaactaaacagaaggaggaacatatcctcccaaagatgaggtatatgggccaatgcacctatacttcctgctacatttcagtcatcatttgtaaacctacatatatgacttaactcactggagtcctgataaaatagttgagaaaaatggtatttctaaaacatttctccagccatagatcataagatatataatgactatcacatttgcccaaaatgtaataaaaaaatttatacagttcccaaagacattttccccttcctataaaggcccctttgcagcatgacacttagattttattcagctaccaccatcacaagaatgcaaatgtgttctaatggtgatttacatattttgtcattggatcataacatttctacatggaagaacaaaggccttaacagtaagtaaaattatctttaaaaaattattctaactcgaggaactcccctggaacttcttagcaacagagtcacttgctttactagacagacaattcaatcagtacaatcagtatataaaatctggctcgtcctccaacatatccattatacttattatccccagtcatctggttagtaaaaaacacaaactaaataataaaactcaattgacaaaattaactgaggctttaaaaattccttggccaaaagctcttccattgattttgtataacctaagatcaaccccttttaatagacatcagttgtctccatttaaaattataacagataaacctataaaattcactcaaaaaattatacatctctgatattaaatggagacatattcaactattacaatggcagctaactaaaaattatatactaataaaaaattattttcatggtgagcttctgggagacaaaaatttaaagaccatgaatttcaaccaagagattttatttactaaaagcagtatcttttaaaagactctctccaaccaaagtaaaagggatcttatcaggtaattcttactagtaacccttgcactgcaaaattagaagacatagactcttaaattcatatatcttatctcctaaatagatgatttcaccagaaggtaatcttcattattagataggtcaatgccaggccaaaaaaaaaaaatgacatctgagacagccaaccttcccaagacactagaccaggcccatatctaaacaaatcgttgatattaataatcgttaatagatgaaaaatattttcttttataagttcccattaaatttatttcttttcacccctcccctaattcttatgttttaatgctactattatcaactgttacctataacacaatctcttcttacagtgggcacaagactatgctaatagccagaaaaaagacacttgctagttatgtggccccatgccctttctaggggttctgtcctaccatgatagacatctcctctccaaagactaaataaaatatcaaaaatatatctttgtttttcaagaacagtcaccagtacttagaactgatatgtctaaagataatatatatcactcatctattaatgaaaccttacaaaataagacattaaaaatttttcaataaaaaccccagttcattagctttaacagtggcactgctccaactaagaggtaagacagtaacactgtctcaactaaaagataagacagctcaattcaagatgatacaacacaaattatggacaattttatctgatttgcttgctcctctggtcagcttagtcagcttatccttttatattgagaacaaaaaaaaaaaaatcacaccaaagatacctggccaactaacactaagaaaataaaatagataccccccaaacagtatattcatgccattatattacaaagtactgattgacatgccactaaatagacacaatgaacaagcatttattggctagctccaaaaagaacaccttggctgtgtgataccaatctatggccatagttaccatgttctttgggttatatttggacataagcataccaaagcataccatttcaaaccccacaaaccttcctcatttgtaatcttattgggtttattctaaactcagctgattaaatcatttagctttcatctttatgccacaactagatattaaaaatgtcatttaacatatagaggccctaaccaaatataaaaccggccataaatgatagccacatagatatcttattattaaacaataaagtaactcctataaaaaaggctatattacagaaccatatgactttagacatacaacagcccaagggaaaacatgcactatcataaatttcaataccccaaatcaaataacatcactaaattaatggctgatataaaaacccaaataactaaccatttaaagccaaaactctccctgagcaattgactaagtaactggtttaagtcttgggaaacttggtgacaaaagttattacttattcaaaaattataatcatatactatattttatcctgtttttgtcttcacttatacaacattcatttacaatagagtcaacatacatatgactaaaaagaataacataatggttagtcaaaaagattacattaattaaagatacagccacttagtctgacttatgtaacaagtcacttccttcacgttactttaaattcagcctgtactccatcaactttataacttatccaattattcattgccaggaacatgacattctggaaatgagccttcatagcaaagtgaaactaaacacaaacataaaaagagtcaaaactactgggtttatctaggatgctttctttgaaagaaaatttaaaaaaaataaaaaaataggaaaattaaaaaaaaaaaagctgttgaaacttccaaaacactttaagccttgagagagatgtgactgtgatctgagtcacataacatgtagttgcaacttctgcttcttagattatgaattaactctctcattgttctcattctgtaaatgactaagagagatcagagactagacctccttcccttcaaatcactgacctttattatagattagctgccttctttattgtcatatgcctaactcagaccagatgatgcccaagaccccaagtctgttacatctgtagcataaaatgctaaatatacctttctcatgaaaagatcttcttgaccaatcagatcattataacttaatgttaagccttatattaaaaagtattaagattctattaaactttccaaactttatctatataaataacctccaaaacttctccactttggattactgacttccattctttttttttttttggagacggagtctcgctgctctgtcgcccaggctggagtgcagtggcgcgatctcgactcactgcaagctcagcttcccaggttcacgccattctcctgcctcagcctccggagtagctgggactacaggcgcccgccaccacgcccagctaattttttgtatttttagtagagacggggtttcaccgtggtctcgatctcctgacctcgtgatccacccgcctcggcctcccagagtgctgggattacaggcatgagccaccgcgcccggccctgacttccattctttaaaaatctatattcccaaggaggccagcatcaaatttgtgctcaaataaactctatatttaatcatattttctaactctgattatttaaagttagcaatggcagactgttataaatcaatgccttagcctctgccagaggaccctcttccctgaatgctcatgtgtggtcaacccctgaagctgtgagagttacccctagtcatccattttgcagtgcctaacttgtcttttatatcttgaagggtgagtatcccgcaaccacctgggcctcattccccatcctgcctaatgaggcctgagctgtgccattgcttcattctatgtgtaggggctcagggaaaacttccccttcgccctctgaaggtttgctgaaaatcagctaacaaaggacagattaataggggaaatggcatacaaatttattaatgtgcatgaaagtcttatgaagatctcaaggaaagataagatggttgatgcttttatatcatcttgggattacagaaagaatggggactcagagcatgaccaaaaaacaggttatggtggtaagtgaggttgtggtgtcaagataggttataggagggagagaagaggagggtggtagcaaaggtagtcttgttatgcagactaactacagctgtagcagccctcagggagactagatggtaaatgtttctttcagacttttaaagtgtcagactctcagttaatctttcttagacttggacaagggagggcctcagagaaagcatggctacatcaatgcagattctctctacagatgcaaatctctcccacaaaagacagctttttagctatgcctatatttccagcccttctgaaaagcaatctctaaatgtatcaaagacatgtatttttaggtgaaatattttggttttcttcacgtgcgagaaatgtacctggagtaggggcttcaccacttcccaggctggtctgagtcctggtttgagggacctggttttgattgttttcagaattccagctacgccctacctgctgccttatttatcaggctggagactacctgggtgcccctgctagatttccctctcctgctctaaagcccaaggctcaggcaaggtcctaggtcagactgcaaggtcctagccacaggccaatggctttggcttgtctcccttcttgtgcagtatctctaagtgctgagaggaggtggtaggtgccagcaatctgcatttctccaggcctgggcttttgccatgcagccttgccttgccctgtccatctgccactcccacttcccttcctgccttcttttttgtcacctcctgggttggcccctctggtaccagttttatccaattgtgtgggtctggaatcacatctaagcgcttatgttgctgtaacaatataaacagattcgtgtgatcctgaagtaggcctgtaatggcccacattctctgccatgtgtgcgggtatgtgtggtgtgtgtgtgtgtgtgtgtgtgtgtgtgtgtgtgagagagagagagagagagagaaattcattgatgactgtatttttaatcctccttccttggtacactatttattcattttacatgaacctcaaagcagaggcacagagctggtattgaatgccagatccttgatcacactatctatcttactgaaaatgtaagagctaaggggttcattgatgctagtttgttttgtagctagagtatccttacctgacttgtgaccttgggcatgtaccttcatctttttgtgccttcacctttctcaccatacaaggaagatgatggggcatctgactggagagttatgaggattaaatgtcttcatcctcatttaaaatgaaagccctatattaataaatgttcctttgactatgaaaaaaaaataaaaaataaaatgaaagctctttgggcaacctctagaacacagtaaatgctcataagaacctgagataagaactcttactggcttaattgtgactggttgatctagtccatgaattccataattatagatacctttaaatttttatatctgtttagtaaactcaaatgttttttatggtttggcttttcctaaggtaaggtatattgtcctattattattagattattctctacaagcagaaagaaatgctagtgtttgttttacaactgatgtttaattgtttagaccttagatgtttctctttattttgtatattcactcacgtactgacttgtggttagagaagattcttagctgctgagacattttgtttttcatttgaattagagtctcagatgtcttttatttagggaggttttttcatacattttctgtttccctgcataccttctgcaggaactatacagtggcttctgctttttttctgattaaagaaacaaagcatttctatatagagaatggatcagtgggcaaatgaagagtgaatttctgagaaaacaatagtttctgctttgatagcttaaatacacaggggaagctttttcagtatgaagtggaagctttgcagctactgagaatgtttgttttctcctggagaaacatttctgtcttaaaggtggttccaaagcagtgctcatcctagcaccatagtgagggagagtctccctcctgggctggttcttcgtgagtcacaagggccagtcctcctataccagcctcttcacttttaaggcattctgctctactgtgtcattagaggcttcagtattgttgatgtgctcaaaagatcactggacatagagatgattctggtccactgttgccatttttgggaatgacaaaggatccctctggcagtaaaactctacttgaattttatgcctcccctttacctgtgggaagcctctcactaaaattaacgttatcagaccttagtttcctctatgaagtagagagaatattcaagaataaatgatggaattttggggctaaagtggaatttagaaatcagtcttgaatttaggtaaaaataacctgctcattttctaaatgtagattcttagtccccaggaattaagcatgttgcaaaaatcaaccagcaagtgagcactggtgaactcttcctgtttccacaattgtgacagtaggccttttgctaagtttttgtcttccagtgtacgtagtagacagttaagtgacaggaactctactccactcccctaactgttttcaagggaatatttaaactcactgtgttgcctaagtacaaacaatcatcatttaaaccatttgttttttgagggagggggttgaatcttgaaaactgagagatgaatttgcagcctgtgttacaaaatttgcacatattcaggtgggaagttataccccaactccaggtacattgtaaagatgttgacagctggctgggtgcagtggctcacgcctgtaatctcagcactttgggtggctgaggtgggtggatcacttgaggtcaggagctcaagaccagcctggccaacatggtgaaaccccgtctctactaaaaatacaaaaattagccgggtgtggtggcacatgcctgtagtcccagcctactcaggaggctgagacaggagaattgcttgaacctgggaggcagaggttgcagtaagccaagattgtgccactgcactccagcctgggctacagagcaagactccgtctcaaaaaaaaaaaaaaaaaaaaaagtgttgacggctgtctgacttccccttctgggaagatggattagatgtacttttttccattcttctcattaagtataactaaaaaccctgggggctcaccatatctaagacaaacataataagaggactatgaacagtggacagaagaaggcagactggctgtgttccctgggtactgaggagtggcatggtgttgagttctcttaggtttttgttttgttttgttttgttttgtttgcctcatatatttgagtcttgaaggtgaaaaagttggcaataccagttgtcacagaaataccaattgtcagagatgaaaatgttcccatctccaaaaccagcaaaagccaaaggactaggaaaagggcagccaaacaagacagacaatttttacatgataactgctctactccatccaaacgacacagaaaaaaatctgtggcctccacccctacctagaaaaagctaagcaggaagctgagacttttatccttaatggccagtaatgagcccttcacctctcttgtggtgtaagtggggccacttggacagccagaccaacaagcacctggaagaaacaaggaagctccctcccagccagtgtggtgtcagaggaggcctagtggagagtaaaaatattcaccactgcccagtaacaatgaggccacctccactgtagagtaagcagagatcttgtggggagctggaatttccacccagcagcaacaaggagctccctcctcaggtatcaacagaggtcaaatgaggaccctggacttctgactctctttggcagcagtaaatccagagtgttgtcagagagagccgctaaaacagaggtttaaataagattcagagtttcagaacataatacaatagtatacaagtgtcaatacaaatttgctcatcataccaagaacctggaacatctcaaactgaatgaaaaagacaatcaatatatgccaagactgagagggcagaggtgatggaattatcaggcaaagattttaaagcagccatgattaaaaaatatatttcaatgagcaatttcaaacatactagaaacaaataataataataaacccttaacgaggaagtacaaagtctccgcgaggaaataaaggatataaagaagaaccaagtagaaattttagatgtgaaaaatgcaataactgaagctcaatagcagaacagaagaaaaaaatcagtgagctggcaggtagaacaatagaaattacctagtgtgaacaacagagagaaagtagagtggactgaaagtgaatagagcctcaggaagctatgggactataatacaggatctaaatttatattattagagttacagaaggaaaggagaaagagagttgaaaaaagtacttgaagaaataatggctgaaaactccccaaatttgacaatagacacaaacaaacaaacaaaaacctgagtgaataccaaacaggataaacccaaagaaatccacaccaagacacatcctaactatactcttgaaaacagagaaaaatgataccatacctgcacagggaaaacaataagaatgatagctttctcaacagaaatcatacaggcgagaacaaaaaatagcatgtattttttaggtgctaaaagggaaaaactgtcaactcagaatcctatattttgtgaaaatattctttaggaatgaaggagaaatcaaggcattctcatatgaaggaaaactaagaatctgttaccaggagacctttgctaaggaagtgataacagaagaaatcctagaacatcaagaaggaagaaagaacatggcaagcaaaaatattgataaatacaataggctttctttatccttttctaaatatatttttaaaattatgtttcacagttgaagcaaaaattataatactgtttgatgttttaaatgcatgtagaataaataagacaattatattgtgaatggggtaaaggaacataaaggaaggtaagtttactatacttcacttgaactggtaaaatcattataccagtagagcatgatgtatgttatggctataaaatgtcatacctaccaaccactagaaaaagctatacaaagagatatattctaaaacactctacataaatcacaaggaaattctaaaaaatgttcaagtaatctacaggaaggtaggacaagtaatctacaggaagtaaacacagaaataaaaaatagtaaaaaatttcatatttaagccctaacacatcaatgacattaaatgtaaatggcctaaatataccagttgaagatacaaattagcaaagtggatttaaaaaacatatcctagtcatatgctatttacaagaaattcacctcaaatataacgatatagataggttgaaagtaaaagtatagaactatatatatgatataaaaattaattttaaaaatcaggattagctatatgaatatctgataagctagatttcagagcaaagaaaatcaccataatcagagaggggcattgcataatgataaacaggtcgatcaacgaagaaggcatagtgattctaaatgtttatgcagcaaacaacagagcttgaaaatatgtaaaatttaaattggtagaactaacactgaaaatagacaagccaacagttagagatggagacttcaacaacctctcccaacaaccgatagaacaaacagggagataatcaacaaggatgtagaaaaaatcaacaccacagtcaagcaacgagatttaatggacatttatagaacacttcccccaacaacagcagaactcaaatggcaacagaatatatattgagaccatattctgggctataaaacaaaccttaacaaatttaaaacttgtgaaataatagagcgtgttctctacaatataatcaaactagaaatctacagaaaaataaacaggaaaaatctacaaacacactgaaactaaatagcacacttctaaataatccataggtcaaggaggaagtctgaaaggaaataaaaattcattgaactgaattaaaatgaaaatacaatatttcaaaatttatgggaaactgctaaagtagtacatagaagaaaatttatagtactaaatgcatactggaaaagaggaatagtctcagaccaataatctaagttcccatcataagaactcagaaaaagagcaaaataaacccaaagcaagcagaaggaaggaaataataaggatcagaactgagatcatttaggttgtaaacagaaaaacaataaaaataaatgaaacaaagtctggttcctcaaaatgatttaaaaaataaatcttcagcaagactcacaagggaaaaaaaggagaaaacacaaattgtcagtatcaccgaggacacagacaatatcaatatagactttgtctacatcaaaagaataataaagcgaatatgatgaatatttcttttttcattatttcaacttttattttagattcagagggtacatgtgcagatttgttatgggggtatattgtgtgatgctgagtttggggtagaaatgatcccatcacccaggtagtgagcatagtactcaatagggaatttttcagccattgttccctcctccttttctccagtactccccagtgtctattgttcccatctttatgtccatgtatacccagtgcttagctcccacttataagtgagaacatgtggtatttggtttcctgttcctgtgttaattcacttaggatgatgccctctagctgtatccatgttgctgcaaaagacataatatcattctttttaatggctgtgtagtattcaatgatgtatatgtaccacattttcttgattcaatccaccattgatgggtgcctaagttgattccatgtccttgctattgtgaatagtgctgcaatgaacatatgagtgcatatgtcttttttgcagaacaattcattttccttagggtatatacccagtagtgggatggctgggttgaatggcagttctgttttcaattctttgagaaacctccaaactactttccacagtgactgaactaatttacattctcaccaacagtgtgtaagtgttatctttattccacaacctcaccaacacctgttattttttgtctttttaataaaatagccatgctgactgatgtgagatggtatctcatagtggttttgatttgtatttctctgatggtgagtgacattgaggatttttttatatgcttgttggttgcttgtatgtcgtcttttgaaaagtgtctattcatgtcctttgcccagcttttgatggggttatttgttttttgcttgttgaattgtttaagttccttatagattctggatattagacctttgtcaggtgcatagtttacaaatattttctcccattctgtgggtcatttgtttactctgttgatggtttcttttgttgtacaaaaactctttagtttaattaggttctacttgtcaatttttgtttttgttacaattgcttttgaggacttagtcataaattccttgccaaggtcgatgtctagaatggtgtttcccaggttttcttctaggacttttatagtttaggtcttacatttaaatatttaatccatctcgagttaatttttatatatggttaaaagtaggggtccagtttcattcttctgcttatggctaggcagctattccagcaacatgtattaaatagggagtcctgtcctcattgcttctttttgtcaactttatcagagatcagatggttgtaggtgtgaggctctatgtctggattttctattctgttctgttggttttatgtgtctatttttgtaccactactgtgctgttttggttattgtagcttaattgtatagttcgaaattgggtaatgtgatgtctttgttctttttgcttaggaatgctttggctatttgggctctttttggttccataataattttagaatacttttttctaattctgttaaagctaatattggtagtttgataggagtagtgttgagtctgtaggttgctttgaacagtatggccattttaacaatgttaattcttccaatctatgaacatggaatgttttttgatttgtttatgtcatctgtaaattctttcagcagggttgtgtagttctccttgagagatctttcacctccttggttggaaatattcctaggtgtgtgtttgtgtgtgtctattgtaaatgggattgctttcttgatttggatcccagctttaacattattggtgcacagaaatgttactgatttttgtgcgttgattttgtatcctgaaactttcctgaacttatttatcaggtctaggatccttttggcggatattttaggatttttttaggtatagaatcattgtcagtgaagaaatacaatttgactttttcttttcctatgtggataccttttatttgcttctcttgcctgattgctctggctagggcttctagtaccatgttgaataggactgatgagagaatgggcatccttgcttgttcctatttttaaggggaatgcgtccagcttttttctcttcagttgatgttggacaaattcctggaaatgtacaacctcccaaaatggaatcagggaagaaattgaaactctgatcagagcaatatcaagttccaaaattgaatcaatcataaaaaacctaccaaccaaaaaaatccctgcaccagatggattcacagccgaattctgccagacatacagagaagagctggtaccatactgaaactattccaaaaaaccaaggagaaggaacttctccctaactcattctgcaaagtcagcatcaccctgataccaaaacctggcaaagacacagcaaaaaaagaaaactacaggccagtctccctgatgcacatagatgtgaaaatcctcaacagaatactattaaaccagaagcacatgaaatatttaatttaccacaatcaggtaggctttatttgtggaatgcacggttgattcaacatacataaatcaataaatgtgattcaccacataaacagaattaaaaacaaaaaccatatgatcatctcaatagacgtagagaaagcatttgaaatccagcatctctttatgagaaacaccctcaacaaactaggcattgaagacacatacctaaaaataataagagctatatacacatataaatttgacaacttagatgaacttagagaatttcagttttttgaaagtataagttactataactcactcaatataaaatagattatttcagtagccttataactattaaagaaattgaaaaattagcccctgtccccaaaaataaatctccagatccagtggcttcactggaaaattctaacaaatgggtaaagaagaattaaaaccaatttacataatcttgcagaaaatataggagggactacttctcaatttattccataaaactagtattaccctgatgccaaagaaacaaagacagtacaaaaaaaaaagataaagggagaaaattacaaatcaatatacctcctgcatatagatgcaaaaatcttgtacaaaatattaacaaaatgtagcaatatataaaaagagttatacactatgagcaagtgaggtttatttcagagatgcaaagctggttcagttttaaaaaaacaatcaatgtaattcatattattgaaagagtaattaagaaaaattatgtgatcatatcaaccaatgcagaaaaagcatttgacaaaattcaacacacattcctgaaaaaaattatcaaaaaaaaaaataggaatagaggtaacttcctcaacttgacaaaaagcatgtacaaaaaacctacagctaccactgtacttattggtggaggactgaatgcttcccccttaaaatcaggaacatgtcaaggatgtctactctctccactcttaatcagcttggtactagaagttctagattatgcaatagatgagaaaaggaaataaaatgcatatagtttggaaagtgtgatgcatactactcttatttgcagaagtcatgatagtctacatggaaaatcccaaggaatcaccagaaaactcccagaactaaaagcaaatttagttttagatccaagataaacctacaaaaattcattgtgtgtgtgtttgtggtctgtgtgtgtgtgtacactagaaacaaacatggacacatatggatactgtgataaattgtatcaaattaaaacatatggacacatggatactgtgatagattgtatcaaattaaaatatgatattgtttagagtcactcaaaaacaaatgaaatatttagatgtcaatctagcaaaacagataccagacttatatgctgaaataaactaaagatctaaataaatggagagacatacagtgttcatagattggaagactcaacatattaaagatctcaattctacccaaattgatatgtaaatataatgcaattcctatcaaaatcctagcaagaaatcttagatatcaacaagattattctaaaatttatagcgagaaataaaggaattagatagctaaaacaattttgaaaaagaataaagtgcgaccaataggtctagtatatttcaagacattgtatagctacagtaatcacaactgtggtattggcagagtgatggatacataaatcaatggaacataatagaatgcagaaataggcccgtacaaatattccaaaatatatttttaattgaactataatttacatagcacaaaagtcacccttttaaagtgtaaaattcagtggtttttagtatattcacaaggttgttcaaatattatctctgtctaattttagaaaagtttcatcgctccaaaaagaagccccattctctcaacctctagcaatcattaatatacttttttttgccctatggatttgactattctggacactttatgtgtccaggtggaatcatgcaatgtgttgccttttgtgtagggctttttcaacttggcatgttttcgaggttcatccatgttaagcgtgtatcagtatttcatccacttttatggatgaataatattttcatttttttgtttacccattcattagttgatgacctgagttgtttccactttgtctattataaataatgctattatgaatattcattaacaagcttttgtgcagaaatatgtttcacctctcttgggtatatactgaagagtggaattgctagttcatatggtacttctgtttaaccttttgagaaatcgccaaacttttctaaaaaggctgtatcattttatattcccaccagcaatgtatgagggttccagtttattcacatactcatcaatactcattatttcctgtctttttgagcacagccatcctggtgggtatatcattgtggttttgatttatattttcttgatggttaatgatgttgagcgtcttcccacaggcttattggccatttgtgtatcttttttagagaaatgtctgttcagatcctctactcatttttatttgggttacttgtctttttattactaagttgtaagcattctttatgtattatgaatacagttcacttactatatatatgatttgtgagtattttctcccattctctggattgtgtttttactttattaataatatcctttgaagcacaaaaatatttaattttaatttatctatttttgtctggttgcttatgcttatttctaagaaaccattgcctatccaaggttgtaaagatttacatctatattttcctctaggaattttataaatttatctcttaaattgaggtctttggtccattttgatttaatttttgtatatgaagtaaaataggattccaacttcattcttttgcatgtggatgtccagttgtctcagtaccatttattgaaaagactactgttcctcatttaattgtcttggtatccttgtctataaccaattcactataaatttaatggcttatttctggatttcattccattacattgagctatgtttatcctaaggcagtacaagaatgttttggttattctaactttgtagtaagttttgaaattgtgatgtggagtcctctagcttagtttttattttttaagatgattttggccattcttgcctttgtatttccatatgaattttaggataagtttatacatttatgcaaaaatcgataacaaaagaacaaaaacagctggaattttgatggggattgtatcgaatctgtagatcagtttggagagtactgacattttattattgaataataagtgatttaatccacaaacatgggatatctttccatttatttgcatctttaatttatttcaatgatgtttgtagttttccatgtacaaatcttgtaattttttgttaaatttatactcaggtattttttttctttcaataatattgtaaatagaatttttaaagttaccattttggcttgttcattgttagtatatataaagacaattgttttttatattgatcttttacttaaaccttcctgaatttatttattagttctgacaattttttatggactccttaagattttcagtatactagatcatgtcatctttgcatagagataattttacttcttttcttctcttaattcctttttttccttcttcttacctgtccaggatctccagtacaatactgaatagaagtgatgagagatccttgtattgttttttatcttggcaggggggaaagcattcagtctttattcatgaactatgattttaactgtgatttttcatatatgccttctatcaggttgagaaagttcctttgtggtcttagtttgtgcttttattttgaaagggtgttggattttgtcaaatattttttctgcatctattgacatgaccatatggtttttcttctttagtccattaatatagcgtacaattcagatagacttttagatgttataccaattttgcattccttgaataaatcctaattggttatggtatttgatcatttttatatgttgctgtatttgattttctaatattctgttgaggatttttgcatctatattcgtaaggaatattggtctgtacttttcttgtgatatctttatctggttttggtatcaggttactgctgccacatagaattagttgtaacttatgtccctgagttgcatagtcctctaatatttactaggttgtgttccatagcctttattctgtttatggccccatgctggtcctcattagccctccactgaaagccaggcattccagaagagtgtatcacaagataggactgtggtttctagccctggaagaaccattccaaaactcttgtcttacctggtgatggaaagagcagtaggatcctgtataaggaggcttgcactaatgtttaaagcgacatcatagaaaagaacaggagtttggaagatgcctccaaagtggaaactgctcactctatcagtcagtcctgcacccacaaaatgagtcttttttttttggaacggagtctcactctgttgcccaggctggagtgcagtggtgcaatctcagctcactgcaagctcctcctcccaggttcacgccattctcctgcctcagcctcccaagtagctgggactacaggtgtccgccaccatgcccagctaaatttttcggttttttgggggttttttttggtttttgtttagtagagttggggtttcaccatgttagccaggatggtctcgatctcctgacatcgtgatctacccgccttggcctcccaacacaagatgagtcttatctctccctttcaatgttcattgacctggtctgtgctgggccagaagtggtcagagagatccatcgtcaagaattttgagagttcattgagtcttacctgcactcttgtagcctaatagcattgaggctgctttctacctttagggtatatgtcttacacattggtagtgcctagtgtcagaggccaggagcctcacttctcagagatgtgcttaaactttccttggagcattggcacaccgtctgaattagatattttaaagtaatcataatttgcattgagtattgttaattctaataatgagtaggccagaatttaaatgaggacagaatacatagcatttctaggactgctctagaataaggggtcctctgacaatctagatgaatttagatgcaggaaaatgggcaaaagtctcatgcattatgatctttctgatttcttatttattcacccatcattgcaaagttggtagctaagcattaagaacctttcgtgcagggtttgacaagatacatactcatgggccaaatctggactaccacctgtttttgtaaataaacttttattggaacacagccactccacttgtttatgttttatctatggctgcttcagtgctacaaaagcagagttgagtagttatgatagagactggcccaaaaagccaaaatatttactatctgaaattgtacagaaaatgtttgccaacatctgttagaatcacaaaatcactcaaaatatttctttgctaaatcacatttcaaaagttgccctgtaggtttatgctttcatacgtccttgtcactggaaaatccctcatcatatggttgtgttctgcatttcactgtctaaaactttgaggagaaactctgagaagaagccactcaattccaaatctcattctgtagcaaaaactgttaagtaaaattcccatacatctttacttttatgaattttaaaacgacatctcataaacttgaccttcaagaaatatattcaaggtttcaggcaataaaatatcaaactttgcaaaatattatttaacttgttttaagattagggaaagggataagatatactattttgagaacgactgtgtaccaggcattgtgctagagactacattcatttattgttgttctccttttatatcttttatattttttatagataaagaaactgaggttcaagattgaacgacttgctcaaagttacaccactaggtctgtctggttctcaaaagtaggcttcttttattacctcagtggttcttaaaggaaggctcctagaaaacaacattagcactgcctgggaacttgttagaaatgtaaattctcatgctttagacctgttgaatcagaaactctggaggtggcattcagcaatgtgtgcttgagtgaggcctgcataaatgtctgagaacacctggattatactatcctatcatgcactggataatgttgtggtatgacagtacttagttcctttgtcttctctggggaattttggatgcagttcaaccaacaaaacttgatgctgtgcccatgtactgattccttcctgtgcctaaaagtacaggctgtggtatttcagtacatcagctttgtctgcaagcctggagctaaggagggcagaagaagcagatgtgataggctttgtttttcatgtctactctcaggacctttttctttagtgaggacccaagatcacacttgagatatgggcttcagaaagcaagatgaacaaatgccatccccaggtggcagagacgagtctgggacccaggctgggagctggaggagagcccaaaccagcatgctatgcaagcagaatcatggcagaacaggcaagagcaaccagctcaggaaaggagaagaacaaggtccaaagggaacaaataagggttaccttccttctttagttttgcatgctttaatatgctgggcttcaggatctgatgagaagctttaagatgtgcacaatctggctttggagtccagctggggaagaaacagacagcagcagtgactgacttattctttctaaaagttaatgtttttgtagatgagaaacgttatcagtatacagcgaggcatcctgacaggaattgagggtgacaggaaatgttagaataatctgttgttcaggtgtgtttgaaggctttgtctcttagactgtggacagatataatttgaaggcagatgggcagtggctagaacagatggaaaatacctcccctctagtcccacactgtgtttccctctcgctgatactatgtcttcctcccacgacctggtgacagcttgtttcattctgttgccttacatgtcagtgacagcttccctgtcttcactggagttgctttctcaggaattaactcatgtaagagtcctggggctgatctgcccctggcattcagctttctcgctggaaaccacataccttgagttcaggtgatgctttttgtgcctgggtgtaaacacggactgcactattggtttaagattctttacatgtgcttctacagggttcagggacggggcagataaagatagagtgaaggctgtgggactggaaagtctcaagtgtgggtgtgttcaggtggggagggtgactgtcagttttgaaggtatggaaacactggagcacaaggcaggcaggggttctgtaaatatgacagttggtgctcagggaacaatagaattgaagagtcaagtatattcatgaactgggtgggttatcaaaatacagatcaccaattacaaggtcaggaaccctatagcttcgaggagaagtggattaggaagtcagggccattgttctgcaggaagcaacaggaaagctagaggtctggcattccactgaggaccttggctcatgtttccatatgggaatttcttctcatcattactttggaaatttgcatacttccccaaatcctaaatcccaagaaaaatcagtagaaacatcatgaaaataaggaaaagtattataattcttctgtgagcaatatgctttacagtcaatgcagagatgttactggtttaaaggaattcactgatgtcaaggacaagcaggaacaggaaatgctgatgtatggagttgaaggtgaaggtcaacatttctagcaatcaggacaggagcacttgggagagaaatggccactattgccatgttgtaagtatgtgtttctagcctcctttgctgctaacatgagtcatttgtgcaaaaatctacaaatataggcatgatatactttatacaaatcttatgaatgacgttttgaaatattaaaaaatttcagaaacaaaataagtccttaatttggcaatttcaacacctacatctgtgtaatactgttaaccttcctaggagagtcaaatattatgttattcaaattctattgaataacgttcatccccattttcctgtttggatattcattataggctgaagttctttataaatactactaaaccagtatttctttttgttaaagacatttttaggtatctgcaataatgagtgaagagtatacagagtgttggaagtgtttaagaaatttatgactttgggatttcccaggattctcaggaattctaatttctttctgaatcctcaagattaatatttgtggagaatctggaaacactagccttggctctagtcccttcaacagaggagtcagaaccattgtggctagtgcagcctccacaggggagtgatgggggatttatggggctggaggaaacaggaatgggagaagggaccacgaaggccaactccatggctcagatgtgcactcacaacttgagagccccagtatctccaagcagcaaacaagacatggtagggtggacttccagttctggaataatgatgcctctctgagaacattcgccttggcctgtgctgagttgcacagccacatgagctgcagtgagactcagggagacactgtcacagaaagaatcagaaggcagagcatgcaaatacagcatgcagaaatatgcttgcaccgtaatacacaaagactccccgacgtggagcttgcagttctgggttgcttcagcctggcagattcctcccagggctctaattactctcttgaggacttgtgacttatatttaactttaaaatgtatacgtgtgtatctctgttgcactgaagccaagttgtcattctccaggtccctaaatctgtcctcatctgtctttgtggtctggcttagtttagtgttttatggaacttggtttaacttagtcttcacattagttgttatccccaataacagttaattatttccattgaaacaaaggttccatgaggtaggtcactgatccaaagtcacccagcttggcagtgacagagcaggcgtccatgcccagatctgcctacccacccccatacacttggtcatcttgctccaacccaggttaaatcatttagtgctttcagtccaggtctcttgctggaagggccttcaagtgactatggatggcccatcccctgccttcctataggcaggatgttataatctccctactagggatgacctgtctgagacattaacattgtgcatgtgcctcacacaaggtcaaatagtaaaatgtgaaagagaaagtagagtcatgaggtttttttctgtcaaaccatgttgttcttatttttggcttttaactttcaccatgaagaatggatagtttagctgaagggatcaacaaattttggaccaggacattctgaagagcatctcaggctggggaaagcctctggacatgggtgcagacacagtcctgctgtttactctgaccagtttctgtgatgtggccacctggtccttgtatatttgaggcctgtcatccatcagaggaactggaatttgcccaataacatacaatgtggcctttgtttgggcttggccttcatttattggcccaaataagaagggagcttatgaaagggactcaaagaagagctacaaagtgaccagaggcccaaaagatatgatttaataagaaaaatagaaacactaatgacaggttaactgctaaattatggctactgctgactttaactttcataacaatagtgaattttgtttagtgacactaagagcttttagtatccttgaattctaaccagggaagaatgaacactccactgatatatactatgtatgataggtatatgcttttgtggaggaaaaaggacaatttagaactatagtgaattaaattataggtagaattataaagagagagaaagtaaaattcaaatgaaaaggaggaggagagagaagtagggatgagagtccagagaagcagctttcaaccagctttggctaaactgtggtctcctaggagaaagcaggaagcttggcatctcccatgaaactgaaactgaacatgcctgtgtaaccagcacacagatcaagaagtgtgaactgtctgagtttcataagccaccctgtgctgccttttaatcactattcaccaaggataatgccagccttgaattctagtgacataaattaatttgcctatttttgaactttatataaatggtatcatttatatttatataaatatatcctctttcgagtctggtttcctttgttcagtcatgttcaaaagagtcacctgcatgttgcatgttgtacagattattctctttcctctatagtattcaatgtattgatctattctactgtctgtgggcatttgggtagtttctagtttgggtctcttatagatacttctgctgtgagcattctatattcttatgaccctatggctgcatttctgctatgtatatacccaaagatgggattgctaggtcatagagaatgcatgtattagggcagatattgccaaatagttttcctaagcagttgtaccagtttacactcccaccagtaacatatgagggttctgattattccatatgctcatgaaaatttggtattatctgttttaattttatcttcctacttttaaaaatattttagaacttttttgtagagacgaggtctcactatgttgcccaggctggtgtcaaatcctagcctcaagagatcctcctgcctcaaactcccagagtgctggaattataggcatgcaccaccaagcccggcccttctattttcactttagccattctgatggtgctaatataacagatgagaaagctaaggcgtggagaggtgcctaacattctacatctcacaagtggcaaagcaggagtttgagccctcttggcctggcaccagggcaatgctcttcccaccttgttatcctcccttcctcatagaagatgcttcatttcctgagtgatgacccacaccgtccagccctggccagtcctctgtccaccagagtgatagtgcagtcagcctctgtgggtccttgtgttgagccaactttagaatgtcatttccggaccttggaaaaccataggctgcccccaaatctcactttggcttcaaattaaaacttgccaatcccattaatgaatttcctaatgagccacaaactcagctcacttttggtttatctccttgtcttctgtggccaacctctaaggaattttgacatgaaacagctcaagaaagagcagccagttcaaagcagagctttcagcaggaaaacagccagagagggcaacactctagagtgatctggctctttctgtagctcttgaaaaggatacacatgaagactatgtagctacatggaaaaaaagtccatgcagttaaaaaaataaagcaggacataaaatatcatgatcactgaaattacatctagtgaaacacacacgtgcttatctgcacgtgtgtgtaagttagaaagaaaaaacaaaggcctaacagtgattgtcttaggttgataggatagtgggtgggatttgcagaatttttgtatctgcagaatttttgcaaagtgcccattagttttgtaaagaaaaaaacctaaatgtataacttctaaagagataattttttctttcatgtttttgctacctatatctaggaaaataacttagaattgtaattattttgaagctctggaattattatgttcaaaaattacagaaccaaaatgtaaagatttaatggcaggataatctgatgaagtgagtaacagaagccaatgttccagtgaggaaatgattctgaatcaataaaatagaatctgttccagaagtagaatttaggagagtataatttctgggtgtgtgtaatatgtatacatcaatgagtatgtatgtatgcatgcatgtgtatgtgtagatatacacatgttatttatctgtttatcctaattcttattagacacctgtttttaagatgaatgaggtgctaaagaactgcaaagtaatatatgcttaatgtttgtataatagtagatactactcaataaaatatatgttaaggtacatatttttatatatgtgtgtgttttaacacacttgaatcatacatacataaatctgcatggaaatacacacaatgatatcattagctatttttttgtgcatgcattttgaatcattttcctttatactctattgtatttggagaatttttaatgatgaatatacgtttgtgtttaaatgaaaaatatcagatggtgccaggtaatgtctgaaattttagggccccctgtaaggtgagtaaagatactggaaaggaaaaggaagtgttgtagaaagatagtgctattttctattttccaaagggacattggattatattattcaaacctcaattctttttgctcttaagtagctagtgtagtggaagaattttgaatgttgtactagatctttggctaataatgagagtatgttcttagctctgttctcttttcaatggtatgttttattttctgtaaaatttatggatttaatagcttctatttcttcacttatcttaatggagaaaaattattttattttttaatggtacatgatttcttattgctcaaatatttcactgtacttggatggatggtgagacattattcattatttgcacttaatatttattaaagcaaacaatagactaaaaatgcatatgaaagcaaataagcataattttgtttattgaaattaatttctttaaaaatgctttctggttataaatttatgacaatatagaaaactaggaaaaggacatagaagtttaaagaaaataaaaattatatctaatttcacaccttagaaataaccactgtaaaacattggtaagttgtcttcttacatattcagcattttattaccagttactacttttaatggatatttattgagccccatggtatgcattgctgtactttggaaaaaagtgaatgaaaaaggtaaataaaatcctgccccacatcatttactgtctggctggggtcactatatgtgtatgtgagggagtgtacaagaggaaggggagacaattgaaggtaaaatagaagtacctggtgggtaatttaaaaagaaaagaggcttatttggctcatggttcttcaggctgtacaagcatctgctcagcttctggtaacacctcaggaagcttttactcgtgagtgagtgagagagggagatgtcaggctcttttaggcaccagctcttgtatgaactaatagagtaaaaattcactcattactgtggggagggcactaagccattcatgaaagagccacctccatgaccctaacacctcctactgggccccacctccaacattgggaatcacatttcaacatgagatttggagaggacaaacatccaaactatatcgggaggaaatacagtcttttaaaaatgtatgtgtgtgtgtgtgtgtgtgtatatatatacacacacacacttttttttacagtagactgacttttttaagcaaattggcattctatatattctatacagtttttcctcacttaacattatattaaacagtatcctgtatcattagatatgacagcattagattatattataaagtcatgtcatagcatacattacatcacatcacattataccatatcatataaatacatttcagtctattattccttgattgctggatattcgggttatgattttttataacataaataatgctacagtgaacatcctcatatattataaaattttatcttctccaattggtttttcttaaaatttatttctaaaagtagaattactagcttacatgtgaaaaataaaacttttccaggctactgagacacaccaccaagttggattttacagtcatgttggttacccattcaatgtttgctcactggagaaacatatcatgtttgatccttttgaaacttgctttgacaaaatgtcatggacaacatccaagaacatgccctgtgttgagttctttatggcaagtgctgtttggcaagggctctttagttactgtaaattaagcaaatagagctgagttttatgtacaccataacaatgttagcaactctgtgggcttagtacctctccgtgcgttcagagttggaaatgtgtgttcagtgcaggtcagaataacagaacagggccacgtcactgcagtttcctttgatcccattgtatgtacggcgtggaaggcagaaaagaccaataaccatctaagaagcagtaaactcttgggactttgtgccaaaataaaaatgttgtatgaaccttgctgcaaccagtattttatatatctcctaggaaagcattgatcctttaggtctgacaggtctggtttttggattttatagaaataggaattagcaaattctccttctattttaggtatgttaatcaacaaagacacctaggttttttccttttctcaaactttattttttattgatacataatagatgtgtatattttgggcgtacaggtgatattttgaaacattcatataatgtgtaatgatcaaatcagggtaattgggatttctatctccttaaacatttatcttttatttatgctggaaacattcaaattattttcttctcactattttgaaatgtgtaatagattattgttaactatagtcaccctattgatctatagaagactagatctgtctttttctgtctacctgtatatttgtacccattaatcaacctctcttcatctctccctctactatctccttcccagctctggtaattaccaatctattctctatctttatgaaattcgctttttaaactcccacatatgatatgagtgagtgcatgcaacatttattttcctgtgtgtggcttatttcacttaacataatgacctccacttttaaaaaattaaatgagatagttgttttctctggagcggcttccagttgtggatgtggtggtgataaagtgatcacatgagcacacttttagttctgatgaccttgactcttgtgttctctagactcatctgaggcacccatgactgagactgggttcaagaatgtgaagtgatcttaatgatctacaaattttctctttctgatttggaagagctgcatgcagtgcattaaacttttgaacctaagtgctttgatggctaaccataacttatgacaacactctcttttctgtattttaaaccctatttactattatttagttctatttaatattattaaagttttatgatgactccatccaatgaggaaaaacaaatggaaaacaacttgctgttgttccatgtccttactctgatgcagtggtcctgattttagagcaggttcttaggattaaagtggaagtgaacatccctgtgctttgggagaggattctgagctgatgatagctgacccagggtgggcttgggatatcatgactccatatgctgtggtgcctctgccctgtgcttgagttttgattgctttcctgtctgttttccataagttatccagtagaagaacactgtcctatgagatcagtacatccccctcttaattaaattttctggtgcttagtcatcaaaagccctatttaatatttaggcactgtgaaaaagacctggaagggatttcttttattagcaataagatacagacccttggagccctattaaatcaattctcgttagatgtggattcatagggccaagagttcactagctttccgctgctattatgttgcagtttgtatttaagcggactttgtagagacactcaaacttaatggattatggaccctgatcgattcaatatgtcctaaatttgtgaagctttatagtggtagggtgtgttttgcagtagtcatgtggtctgggaaagagagagaagccaagatagtttggggcataaaacagggcccatttgactcttcacactctcattccacacaggtccacaaaaccaatcaaaaaagaaaatcaggataggaatttgaaagtaccatgtggtaaactttggaactattaaaaaatcatactattgtaggctcatacattactgagtggatgtttaaaccattattccttctatggaaagcaaagtagctataactcaaaattacaagtgtttgtagcctataaccttgcaatttcatccccaggaattatcctacagatgtacttcacagatttgaaatggtatatatttgaggttataattgtaacattgtttaaaatatacaccaatacaatattaggaaaacatactatggtatatccagataatggaatgccatgttgttattaaaaaaagaataaggaagtactctatactgatacacaaatatctcaaagatatggtaagtgaaaatcaagattaaagacagttttgtctgtttttgtaggaaaaaagaggaagagcgggagaaagggagagaggggaggagaaagagatattctgtatatgcacaaaatacctctagaagcatatatgcaaagcacagagctttgatatggggaagggaattgggtagctagaggacagaatttaagaggaaaactttttattgtaaaacttttaatacttttctaaattttgaactatgtcattgtaaaatctagccaaaacatttgcaaatggaagctaagaaacacatgcttgtgtgatattgttagatgaatactgtgagttcatcaaaagtttttttcttagactttaaaataacacaactgtatatacaatcgcaagaagtattgtttatgagtttctacttctacttctaagtagggtaccaagagaaatattcatttttacattttctgtctatcactatatgactctgaaactataaatatatatacatagacttcattaaaatattactagaatttaatccttctgcttttatgggatagtatgttgataaaatattgatttttctattagtttcctaagatcttgactgggagatctggaaagaaagtcagagatgacttggttgagccctgtttcacccaagaggaaagacagccaagggaaattaagccacatgcttaaggttcacagatagtcaggtgtgcccagcgggttttatgttttatttggttaccttaagaatatatctttggctgggcacagcgggtcatgcctgtaatcccagcactttgggaggctgaggtgggcagatcacttgagcccaggagttcaagactagcctggccaacatggtgaaataccatctctactacaaaaaaaaaaaaaaaaaaaaaaaaaagctgtgcatgatggtgtatgcctgtaatcccatcaggagtctaagacaggtgaatcacttgaacctgggaggcagaggttgcagtgagctaagatcataccactgcactccagcctgggtgacagagcaagactccatctcaaaaaaaaaaaaaaagaaaaaagaaaaaaaaagaatgtatctttgacacaagagatcacaattgaatttaacttcaccccaaatgcctcttaataataggaatgttatcaagccagaagcagttgggaaagtgccttccagtctgtaacccaaaagaattctcagatcttcaagaacttaaagttacttatatttagtcaattaaaaagttaatcaaaagagagatcgcaggttaaaggaaaatgacattaaaataagtggtaagtaatgaaagctttaagatttgtgttaatttttaaaaatgttaaatacttgttcttatgattgtacaacttaatatgatgtcaaaagtagttcttaaaagaaattataaaaagtactaatattctgagtataaaggctatgattctttatttggtaggggagaagaggaaaagggaaaattctgtaggcatatctttagctactgttttattctctatggtgattgagaaaataggattaagtggtttaaaaatatgcaggtaatggccaaaaaaaaagttgagactacatattacttctgaataaccaaaaaaatagaacaaagatctaagaaagctttgatccctagaatgtcaagggagtggcaataaaacacaaaataaaatgacacagaaagatcaaatactgcatattgtcccagtaaatatgaatttgttcagcttcttaaaaaataaaaagccctcaaatttaatagaaaagcaaagtcaacgtgattaccagagactcacctacataaagtgacatagaaaagataaaaataaagaaatgaacattgtggtgggcagaatgttacaatgggcctgaggttctaccctatccaaccctctaacctggtgtatgcatcttacataattctcctgggattatgtagtgtgatatgaagcagtagactttaagaaaggaaaattatccagatgggcctgacctaatcagacaagccctttaagaacagagttttctctgactgctaggaacgaaaggtcagagagagagaagtgtgagaggttattaactgggggttctccagtgctgagacggaggagccacatgtccaggacctcagaatagtccccagccaacagctggaagacagcagagacctcagtcctactactgtaaggaaatgtgctctgacaacaacctgatgaagcttggaagcagatctttccctagttgggcctcccacatgaggacacagctaagcaacaccttcctttcagccttatgagagcctgagcagacgatccagataaaatgtgccgagcttatgacccatggaaactgagggatagtcaattcagtggcaaattggtgttgtcactgagtttgtggtgatttgttacatcacaagagaaaactaatacaaatatatcacccactagaagattctaaacaagaaggttggagtggtgctattaatgccaaaaaaagttggaattcgctaaaggcgaaaagcattaaatgggacaaagtaggattttaatttaaaaaggaataacttataagtatataaaagtaaacaatattatatggttaagatagccttagattcagcttttaatataacagttttaatactaagagaaataggcaaatgcttagctggagataatagaacatttgcaacagtgcaacaggtcaaacagacaaaaagcaagtaaagttgtgatattttaggatgagattaagcatagcaatcattaaactagggatttaaatgttgggaaatgaaaagagtaataaaagaaaacttggggtaataaaagaaagaaattaagaaaagtacaagcagaaattaacaatttaaagaaaaagagtagaattagcaaattaaaattcagctggcttgtttcctgaaaaaaatgaataaaatacaaaaaaggaatacaaatgaataaagtattaaaaaacctcccaataagactgttcaaagagagaaagagaaatgaacaattttagaacattgaggagatataagcactggtacaaagaagattaacatttacaagagaaagctagtctaaattcttggtactcaaattgtggtctacagactagcagccatggtttcacctgggagcttgttagaaatacagactcactgggtgtggtggtgcacgcctatagtcccagctactcaggaggctgaggtgggagcatcacttgaacctggtaatttgaggctacactgagctatgattgcaccactgcactccagcctggcctgggcaacagagagagaccctgtctcagaaatgaaaacgaaaataaaaataaacactctcagacactaccctagacgtactgaatcagaatctgcattttagcaagatcgccaggtgattcacgtttacttcaatttctctaaatcagtgattgtcaactttggctccacacagtaatcactttcagagctacaagaaaatgctctcaaagattgttatttcactggcctggacagcaagacttttgaagactatcaagatgacactaatgtaaagccagagttgacaatcactgctctaaattattctatgcaaattttaaaatctcaatgtaatggatgacttttcaaaaaatataaattttctggggagaggggtaattaagttaaaatgtgatacatcatctgaataaaccaccagtcagaacaacctaaaaatgtgtcatatagcctctcaaaagacaatggagtcctctggctccagtgcacattctttctggaaggaacataccctcatcctgggactcaaaaaatttttaaagagaaagtttttatcatgagcagtttatattttaaaattactaatcaaggaaacaaatcaatgtaagtaaaagccagaggcagtagaaccaggactgtaaaatatatagccactagaatcaacagctacagagtaataagaaaatacttgctgagttaaagaagtcaggcaaatatgaaaatatgaataaagaacaagcaaatttaaaaacaaagaactcattaaagtaagtaataatttaaataaaacttaacacacatattacatagcagattaaacattggtgaagattaaacactgtaagatgaatttttaaaaatctagaattaagaagtaagaaacagatgataatatgaaagagaggttaagagtcaaagagaggattgagtgagagaggctagccagagttctagaagaaaaaaaagagaaagaatagattagagcaatatttgaagagatattggttgagaatttccaacagttgatgaaaggctctgatcaagattttcatgaagcccagaaattcctaaggaggataataaaaataaatctacatatagactactcttagtgaagctgtggaacaccgaagacaaacagaagatctcaaaagcagctagagaaaaaagatttgcttctaaggaataacaaccagacagatacttgattgtcagcaacagagcaataataccttacatgtgctgacaggtattttagtgtaaaatttgtaggctttagtgatggattgggtatgagatcatgaaggaagcatgtcaagaatatctgtcaagttctggaatacaaaagatgccttcattgaaatgcaaaaatactgaaagagatccaggcttgagggagaagcttatgaatttgcttttggacaagttgaatttgaggtgcttttcagacatccaaaagaagaagaggttccttttccatgccatcatctatctcacagtttctagcttgtctaaaagcatattacaagaaacttggtcaaatgtcttgctgaaatggactcagtactctgtaacaatcccttgtcctgttagaaatgaagtttagtgtaaattgattttgagttgtaactcagccacttactgtgtaactttaaacataatacactcaatgttgaatcacctcaattttttcatctgtatcatggtaataaaattatatattaatcacttattgaggtatcatgaggactaaaaaaagtctgagaaacatttgctgcataaaatgccacacaaatcattatctgtcagtgatttctaacttctcagaatctttttccctccaagtgctcattcatcacctgtttcataaactgtctttccaaaatattattggcattgattttaagcagaatccacctccttttcacttttgaaatgtggaatgacattgatctgactttgagctcttaaggcctatcttcagatggtttgctatcatatttgcaagttatttctgggccctggatatgatttggctcaactggcaacttgaagtcagtacaaagcacctgtgtgctcttttgttttaattttatctatctcctgtcttgggttccagtttcttattttaactggaaaatagtctcttccttagaaaaggtggaagataaaagatgttgaagaggtctgatttttctactagcatctgttatctagcattataccatctgccccaagcaattttgttgttccttatttatattaccctggaacataatttcagacagcatttagtttgaatgtcttatataattatgaccttttctatatatgttcttaatagatctctgccatttaatttttatgttcttttgtctttagggtatgtttttcaaaaatatgaattcttccatctttagtttgtgctttttacacatataacctcattagagcacagtactttgcacatgataggcattccatgtttgtatgtttatatgaatgaatgcaaagatgaatgaaatagaattttccatgtaaccatatttgtgggttccttttcccttttatcaaggccattcacaattacattatcatttgctttcctttatacattctattccttttgaagttgtattccatcatgaatttgaccttttgataatgcatacattttttcatatgttttagaaacatatgctttcctgaaatcctttgctgcatctgattatgcccagcttttcattccttcagttttatgaattctgagatgattgctttctctaaaggtttctgtcacttcagtgtcaaagtgacttttttatttttggtgtctgacctcagctgggacagctaggatgactgggtctctctttccatttgttcttttatcctgagcttcttcacagcgtgatggcctccggattccaagaagaacatgagtagaagctgctgttgaggtcaaggctcagggttaggctgatagactccagcttgataacggatgctacaaagagctggtggccacatttaatctatattatatgctatttgtcattcattttcacttactttttaaatagttgttgattgtactgggctacatgatctagaaacctaaaataagtgagagcagtggaatcatcaaaatcttggcattcttttattttctgttatacctttttgtattcaggtttagtgctctttgcagaaatcctccttctggcagtcatttgtcacagagaaactggttattagtgataaactcagttaatatattttggaaactctgactgagaaacagtggccatatgggtcccttctcttcaggagacagaacaacaagaagttttgtcacagataagctaattacatctgccagtggtttagataactggtctaaatttgttttactcactaattttcaaactttgatgtgatgtcagtgtattaaaataaaactcaaacccccctggctttagctccatggatgatctagaacagggatccctaatcctggctggacactgaaaccacctagagagcttttaacaaactacactgtcccaagattgtcatgtagttgggtgggtgaaggggaaggagattggtggaattcagttgggagtatttttttcaagcttccaagtaaatctaaagtgcattcagaatagagaagcgctactttaaacaggggtttgaacattttttctgtaaagggccagatagtaaataccatagacattgcagatcataagctctctgttggaagtactcaactttgtagtacaaaagcagccataggtcttaggttaaactaatgagcatggctatctttcaataaactttgtgaacattaaatttgagttttatatatgtaattttcacattatgaaatattattcttttgttttttttccaaccattaaaatatgtaaaaaccattcccagctaatggaccatacaaaaacaggtgaggggcctgatttggcccacaggtcatagtttgctgacccctattctagaggactctgacaaaagttctctactttgactaaaatgcttctctcatagacagggaagaggttttcatcatctttataaaactgtcacttttcagttgctatgatgtttttctttttaaacgcgctttatgatggtataatgtacatgccatagatttaacctattttaactgtacaatttaatgatttctagtaaatttatagagttatgcaatcatcaccacaatcagatttagaatattttcactatcctcaaaagttccctttggaccatttgcattcagcctcttcccaccctggccccaagtatccactactctacttattttctctgtagatttgccttatctggaaatttcatatgtataggatataatacatcatcttttgcacatggcttctttcatttagcatactattttttagtttctccatgttgtagcatgcatgagtcatttattccctttcattgccacatagtagtctatcacatgggtatacctcattttgcttatccattcactcaatgcattgttttcactccctagccattatttaatgatgctgctgtgaagaattcctttccatcccatttgttgagagtttttatcatgaaggcatgtaggattttgtgacatgctttttctgtatctattaaaatgatgatgtggtttttgcccttttttcactaatacggtatattacattaattggatttcaaatgttacaaatcccacttaatcatggtgtataatttgtatgtatttctggatttgttttgtaatatttttagatattttgtgtctatattcctgatggtctataattttctttaattgtgacatctttgtttagctttatatcaggctaataccgcctcatagaatgaaatacgaagtgttttttcctaaactctgtttcctcaatgaggttgtgaaggattggtagtaatgaattttccccctctttatttatctacgaatgcctttgttttgccctcatttttgaaagataattttgctggagagtaaattattcgttgacaggaaagtaggaatagctagggactttgcaattgccactgagtatgtgtgcagcctcccacatatgtacagcctcccagaccaccagggatatatatgtaggagcttatcagggttcactacagctatctcattgcccaaatctccttgttaaatttctggcttgtcttcatgttggttgtcccaaataggatcacagcttcattgtcttcccccattcttttgcctctggaattgctgctgtttctgacaatgccccggggcatgaggttttactgttctctgttccaaatcaatctggtttctttctgcagcaaaaactgcaggttttcatggcttgtctcaccctggtagaactaccagctggcaggtgttggggatgtgttggagataataaggtaatggtagcagtcccaagctaaaattccacagacttccactgaggttcaatagttttacttgaataaatgcttctcaacttgttatgtgccttcggtctgtttccagggtcttgaaatagttatttttgataattttttctagttttaaaaatcattcacttttggagagaactggctgagttttttgatctgtcatttcagatatcctgccttacagtgtttttaattcattgattaatgctttcattgttaggcaacttatggaaaaccaatttttcttccgttgctattaacaaaatctgtaacaggtttatcagcttaagaaaatttactgcatcttggagggtggttccaagatggccaaataggaacagctccagtctacagctcccagtgtgagcgacacagaagacgggtgatttctgcatttccaactgaggtactgggttgatctcactggggcttgttggacagtgggtgcagcccatgaagccaaagcagggtggggcatcgccttacccaggaagtgcaaggggtcagggaattccttttcctagccaagggaagccgtgacagatggtacctggaaaatcaggacactcccgccctaatactgcacttttccaaacggcataccaggagattatatcccatgcctgactcagagggtcccacgcccatggagtctcgcttactgctagcacagccgtctgagattgaactgcaaggtggcagggaggctgggagaggggcgtccaccattactgaggcttgagtaggtaaacaaagcagctgggaagactgaactgggtggagcccaccgcagctcagggagtcctatctgcctctatagactccacctctggggcagggcatagctaaacaaaaggcagcagaaatttctgcagacttaaaatgtccctgtctgacagctttgaagagagtagtggttctcccagcatggagtttgagatctgagaacggatagactgcctcctcaagtgggtccctgacacccaagtagcttaactgggagacacctcccagtaggggccaattgacacctcatacagccaggtaggtgcccctccgagatgaagcttccagaggaaggatcaggcagcaacatttgccattctgcaatatgtgctgttctgtagcctccgctggggtgatacccaggcaaacatggtctggagtggacctccagcaaattccaatagacctgcagctgagggtcctgactgttagaaggaaaactaacaaacggaaaggacatccacaccaaaaccccatctgtacgtcaccatcatcaaagaccaaaggtagatacaaccacaaagatggggagaaaccagagcagaaaagctgaaaattctaaaaatcagagcacctcttctcctccaaaggaatgcagccccttgccagcaacggagcaaagctggacggggaatgcttctgacgagttgacagaagtaggcctcagacaatcggtaataacaaacttctccaagctgaaggaggatgttcaaacccatcgcaaagaagctaaaaaccttgaaaaaagattagacaaatggctaactagaatacacagcatggagaaaaccttaaatgacctgatggagctgaaacccatggcacgagaactacgtgacaaatgcacaagcttcagtagctgatttgatcaagtggaagaaagggtatcagtgattgaagatcaaattaataaagtgaagcaagaagagaagtttagaaaaaaaaagagagaaaagaaacgaacaaagcctccaagaaatgtgggactatgtgaaaagaccaaatctacatctgattggcgtacctgaaagtgacggggagaatgaaaccaagttggaaaacactctgcaggatattatacaggagaacttccccaatctagcaagacaggccaacattcaaattcaggaaatacagagaatgccacaaagatactcctcgagaagagcaactccatgacaccaataattgtcagattcaccaaacttgaaattaaggaaaaaatgttaggggcagccagagagaaaggtcaggttacccacaaagggaagcccatcagactaacaatggatctctctgcagaaactctacaagccagaagagagtgggggccaatattcaacattcttaaagaaaagaattttcaacccagaatttcatatccagccaaactaagcttcataaatgaaggagaaataaaatcctttacagacaagcaaatgctgagagattctgtcaccaccaggcctgccatacaagagctcctgaaggaagcactaaacatggaaaagaacaaccggtaccagccactgcaaaaacatgtcaaattataaagaccattgatgctaggaagaaactgcatcaactaacaagcaaaataaccagctaacatcataatgacaggaccaaattcacacataacaatattaaccttaaatgtaaatgggctaaatgctgcaattaaaagacacagactggcaaattggatgaagagtcaagacccatcagtgtgctatattcaggaaacccatctcacatgcagagacacacataggctcaaaataaagggatggaggaagatctaccaagaaaatggaaaacaaaaaaaagcaggggttgcaatcatagtttctgataaaacagattttaaatcaacaaagatcaaaagagacaaacaaggccattatataatggtaaagagatcaattccacaagaagagctaactatcctaaatatatatgcacccaatacaggagcacccagattcataaaggaagtcctcagaaacctacaaagagacttagactcccacacaataataatgggagactttaacaccccactgtcaacattagacagatcaacgagacagaaacttaacaaggatatccaggaattgaactcagctctgcaccaaggagacctaatagacatctgcggaactctccaccccaaatcaacagaatatacattcttctcagaaccacattgcacttattccaaaatcgaccacatagttggaagtaaagcactcctcagcaaatgtaaaagaacagaaatgataacaaactgtgtctcagaccacagtgcaataaaactagaactcaggattaagaaactcactcaaaacaacccaactacatggaaactgaacaacctgctcctgaatgactaatgggtacataacaaaatgaaggcagaaataaagatgttctttgaaaccaacaagaacaaagacacaacatatcagaatctctgagacacattcacagcagtgtgtagagggaaatttatagcactaaatgcccacaagagaaagcaggaaagatctaaaatggacaccccaacatcacaattaaaagaactagagaagcaagagcaaacacactcaaaagctagcagaaggcaagaaataactaagatcagagcagaactgaaggaaatagagacacaaaaaacccttcaaaaaatcaatgaatccaggagcttgtattttgaaaagatcaacaaaattgatagaccgctagcaagactaagaaagaagaaaagagagaagaatcaaatagatggaataaaaaatgataaaggggatatcaccaccgatcccacagaaatacaaattaccatcagagaatactataaacacccctacacaaataaactagaaaatctagaagaaatggataaattcctggacacatacaccctcccaagactaaaccaggaagaagttgaatccctgaatagaccaataacaggctctgtaattcaggcaataattaatagcctaccaaccaaaaaaagtccaggaccagatggattcacagccgaattctaccagaggtacaaagagaagctggtaccattccttctgaaactattccaatcaatagaaaaagagggaatcctccctaactcattttatgaggccagcatcatcctgataccaaagcctgacagggacacaccaaaaaagagaattttagaccaatatccctgatgaacattgatgcaaaaatccccaataaaatactggcaaaccgaatccagcagcatatcaaaaagcttatctaccatgatcaagtgggcttcatccctgggatgcaaggctggctcaacatatgcaaatcaataaacgtaatccatcatataaacagaaccaacgacaaaaaccacatgattatctcaatacatgcagaaaaggccttcgaaaaaattcaacagcccttcatgctaaaaactctcaataaactcggtattgatgggatgtatctcaaaataataagagctatttatgacaaacccacagccaatatcatactgaaagggcaaaaactggaagcattccctttgaaaactggcacaagacagggatgccctctctcaccactcctattcaacatagtgttggaagttctggccagggcaatcaggcaggagaaagaaataaagggtattcaattagaaaaggaggaagtcaaattgtccctgtttgcagatgacatgattgtatatttagaaaaccccattgtctcagcccaaaatctccgtaagctgataagcaacttcagcaaagtctcaggatacaaaatcaatgtgcaacaatcacaagcattcctatacaccaataatagacaaacacagagccaaatcatgagtgaactcccattcacaattacttcaaagagaataaaatacctaggaatctaacttacaagggatgtgaaggacctcttcaaggagaactacaaaccagtgctccacgaaataaaagaggatacaaacaaatggaagaacattccatgctcatggataagaagaatcaatatcatgaaaatggccatactgcccaaggtaatttatagattcaatgccatccctatcaagctaccaatgactttcttcacagaattggaaaaattactttaaagttcatacggaaccaaaaaagaacccgcattgccaagtcaatcctaagccaaaagaacaaagctggaggcatcacgctacctgacttcaaactatactacaaggctacagtaaccaaaacagcatggtactggtaccaaaacagagatatagactgatggaacagaacagagccctcagaaataatgccacaaagctacaaccaactgatctttgacaaacctgagaaaaacaagcaatggggaaaggattccctatttaataaatggtgctgggaaaactggctagccatatgcagaaagctgaaactggatcccttctttataccttatacaaaaattaactcaagatggattaaagacttaaatgttagacctaaatccataaaaaccatagaagaaaacctaggcaataccattcaggacataggcatgggcaaggacttcatgtctaaaacaacaaaatcaatggcaacaaaagccaaaattgacaaatgggatctaattaaactaaagagcttctgcacagcaaaagaaactgccatcagagtgaacaggcaacctacagaatgggagaaaatttttaccatctacccatctgacaaagggctaatatccagaatctacaaagaacttaaacaaatttacaagagaaaatcaaccccatcaaaaagtgggtgaagtatatgaacaagacacttctcaacagaagatatttatgcagccaacagacacatgaaaaaatgctcatcatcactggccatcagagaaatgcaaatcaaaaccgcaatgagataccatctcacaccagttagaatggcaatcattaaaaagtcaggaaacaacaggtgctggagaggatgtggagaaataggaacacttttacactgttggtgggactgtaaactagctcaaccattgtggaagacagtgtggcgattcctcaaggacctagaactagaaataccatttgacccagacatcccattactgggtacataaaggattataaatcatgctgctataaagacacatgcacacgtatgtttattgtggcactattcacaatagcaaagacttggaaccaacccaaatgtccatcaatgatagactgaattaagaaaatgtggcacatatacaccatggaatactatgcagccatacaaaaggatgagttcatgtcctttgtagggacatggatgaagctggaaaccatcattctcagcaaactatcgcagggacagaaaaccaaacaccacatattctcactcataggtgggaattgaacaatgagaacacttggacacagggtggggaacgtcacacatcagggcctgtcatggggtagggggagcagggagggatggcattaggagatatacctaatgtaaatgacgagttaatgggtgcagcacaccagcatggcacatgtatacatatgtaacaaacctgtacattgtgcacatgtaccctagtacttaaagtatactttaaaaaaaaaaaagcaaacttactgaatcttagtttataattaaaagcaacactaaaacaagtggattgtatagaagaatgaaagttttaagtatcaattcaatataattaaatattgtgtaacatatgttgaataaccgaagcagagttcaacagatttatatccggaatcgtttttcttctgaatggcagtgctcctgtctagcaccatggtgttcgtgattccttatcaacttagtgccccccatgtgagcaggctgaactgagtacttgtgatatgaggtacaaaacaggtaggaaaaaagactttgttgtgtatagcaaagaaggaactggcatcagcttcctgagctctcaggcatctcccattcccaatcttaaggaaggcctttctcctggttctggcattatccctgggaatgagtgggatcagcagtggatgtgacagtgacttgttcctccagtccccatcactgacttagggagcatcataagagccagtgagtttggctcttagaaatacgtaagcagtgaaacccactagtcccatctcttgcacctagtttagtctgtttatagtgtcagtccctctccccccattctttcctgcacctccccaaagcccatcatatccaaagtgggaatcaattctcactggacatttatccctgagactttcttgtaaaaaacacatgagtcctattaacaaaacaattgtttaattttacttagggaggcaaagtttaataatagcatgcagtaaactttttgctaataattgttctttttccctcttttccctaatcatgggggaaaatgtagttcattagcaagttgacctgctctcttgtttttattcaccaaacagaactctaaagaattgattcagctttgcagaggaacaatattgtattaagacagcactatttctacagttaaactagcatgactagcttataaatcaaagcagcactattggcgccacatatatgtgttgtgtatttcttttggcaaagttacaactttaaagaattgacattttggatcaccatgtggtagtttagccataacaggttgctaatgagggaatcaaggcagaggcagatgtttccttaaatgtgagcttacataagccactttagttggttctggttttaaacaattgcatttcttggggaccaagttgtacactggatcttccttctgaaaatcgatacctccccctcatgagtgttgtgctgtgcagacaggaacctcatggtgaggagaagtgcagctttgattgttgctgctcttttaatgtcatgccgaatggaatggcacttcgcaatctctcaaccacagcagtttcctcttctcattcaaatctaagatacaagcatttccctaactactgtttgaatccaaaatgtttatttggcagactggtgcaagttgaattctggaaggaaatctagttttaaaaaatgtcttagaacattatgttcagggttaaagtcaaggaccgtatttcccacacatgttgtttttcaggcaattttccttgagttttttgcagaagaagccagaatggtgtttacaggtggaagggaaatggtagcagcagacccagagagcaaagagatccacacgcatttccctgataattattttattcatttatacttctgtcttacttcagaaaggatttgaagtggcttactgatgtaaccacagttctgctagaatagataaggccaaaggaaataaaagtggagaaacaagaagagatcaactcatgttactctaaactgaatcacttgcagttcccacgatttgcgagtcccattttcctttcatgttctgggagttcaaccaggaaaggaacatgttgagtctggattgttgaggccggagagtaaggcactgggtttgaaggacaaaatcaaccacactggccttacttcctgaccttgctctctggaagaccccagatttggattttgaaataacccgttactagtcgagatatctaatgtcagaagaccacaaaactgcatcttttagtcctattgcattatttctactcttgaaattagctccctcaacaagatacattttcctattttgttttgagatatctgcttctcattatagcatcagccagccacatgtcttgcattaggacctttaagtcaacaagtaggagattaaagggaattaaatgcaagcatttcaggtaggcccagggaataagggcattaggtggcaggttacctggatggcgcagcagggttaaaattatccctatatgatcctgtttcatgaacaaaagatgaatggactctcttaaaagactttataaggccagttaagagcagaatagtatagcatggtaatcgacactcttgatgtctaattaattcatctggattcaaactgaagattagccattttttagctgtatgaccttgaacaagtggcttaacttctcagagcctgtttgcccatctataggatggttataataataccacctatctccagattgttatgaaggtcaagtaaaattatgcacataaaaatttaggcatcacctgacatgtggtaatccctcagtaagtgtcagtggttattgtgtctaaacccctgacctgttgttattgtaactctgcatcttcattgtttaaggaactgagtgactattaggaggaattaaattccctgtcagtctgctgggacataatttggagatggataaggaccccaaagcactaatggctacatggtctctgggctagttttttttttttttccacttgttcaatgaagggatgggaattgaggacctataaagttcattctcatgtgaaaattatctctgggtgaaatggtgcttctttgtttgtccagagatacatgtttcctctgagaagggcctaaattgcattgcaaaatgaagagattcaagggctgtagtgcagttacttcttcacaaagcattagcccagagtgtcctcccacccagggcttttcaatccttgaatgagcatgtaaaggcacccctaggtcttagagaatcagggcctcatgttttagagccctaagttactgagtgtgggctgtgacttagaatcactgtgtaggaatgtgaaagaaaatctgccagcccattcttggccaagatgctggatttggaagccaagattcacttgacttgcagacagtttctgtgttatagagcagtagaattatagatgattgattttttcaatttagttttatattttcaagttctcatacatcggtattatgagagaacatacacataagacaaagcaacagtaaataaaattatgtgcaaataattcagtaagctcatgtacgagaaggggctcatatcatctagatgttatagaaacgtaaacagaaaaggcacatactttggattacaaagggtctggatttggatccggtatcagcactttccgggtgacccagtaccagggtatatggtcttgttttctgtaaaatgggcaatgcttacctgatttggcagctgtgcagattaaatgagatgatgtgagtgaacagccggcaaagtcagttgctgtttcttctccctgttgggggaatatttgatggtgtgagaaatgagctatgaacaactcatcaagactgatatttaagtgaggataactcactttattgtcagttaagcctatctaatctcttttttctcatccatccatccatcatctcatttattcatgcatacatgcatgcattcattcacttactacttcatccctgttatattgcatgtcctacagtgtgcaagatgctattgatgcagagatgaatgaaataggtgactttgtttggaacttgtgaattcatatgcaaatgcagggatgaccccctgcttcttaagcactatcttgtgtgttgctatttaaacataatactatgatcacagtaaaaacataaagcttagtacttgagttaaagatgccagaaagttgatattctacatgtccaaagttgaaaatttatgtatatctgaacatgtgtatatttatatttctaataatcatatatctgtcttaaaagtaaaagcaatatttttcatgtgatttctctcatttgctcattgtttacagcttattttactagtatagtgacatattcatattatatgttagaaatctacatttgcaaagatcagctaagtttacgtttcagattgagaatagcccggaaggattgtgtctagccaattacatttttattcttaattttaaaactcagtattaaaatagttcactgtcttctattttctgtatactatctggggcagtatgtggtgctgagtgacttaatattttagatttctttttcagctgtacatttaaattcctttcttattttagtgcctgacagttcacccaagaatgtcacctgatgcatttaaaatgggaaaatatttattttcatcttctttatctttcttttctttaatttttagcccttaattaccattatgagcgacttggattctattttgtttcaattcagaaaaaaaactttgctttctactacttccaaagtattttaagcactatgaagagttttaaatggtatacatgataatatagcaggtaagaagttgctggcatgagtttcaaaccaagagacagtaagatgttgtgcaatggaccactgataaagaggtggcagcatagggctcctcacaattgtgtttgttattagagcctgaacgtgagaagaaatcacttctctgctctctaagagccttctctattagttattaggttactatagataaattcttaacacctatccaaggtctttattcttccctttcaaaattgggtaaaggttgatttttgtccatggcaaagtcttgtttcgatgttaaactcattgcagaatcactctgaggcctggctgcagtgctgtttataaaatccttgcttcagggtcaggctgcaagtaaaacattatttagaagagcttttggcctttcacaaaattgtcatgaacctttgaagaagaacttggaattatatactgctttgaagcatactgcagtagaatttcatagtcatttttatgggccatgacaatttttgaagatgcttaaaacttttcttataatcttcatttaatatgtgtattcatctgatcattataactgcttggagaatcaatggaagtataaatatattgggtcattttgatacagacattttctagttttgaaaggaaactagaaatccactggaagaccccagatttggattttgaaataacccgttacctggatggtgcagcagagttaaaattatccctatacaggcattaagtaatagtttgataaagtatttaatgtacaagtatagagcagtaataattctttataattttttctccatgtctttccataaattttcacaaatgcatacagtgcatttgtgaacatgttacatattaaactgattagtattgcgacccaattggattttaccttctttatgtacatatctgtagatccccaaagcctccaagtgtactgatttggatgattttatatacattccttaagaccattttctggtagccatgtaactctgaattgcattaaaagaaaaaataaagcattttatagaactaagtgtgatttttctcaatttaaactctacattctccctatttggagctacttaatgatttgctgtgtcatttccacacctgagtcagtacagctttatttttttacttaattatagcaattaagaatatatttaaaatctcaactctttgatcttcctagtagatatttttattggtcagggtcagttagagaacctgtaggagatatatattaggagatttattgcaaggaattggcttatgtaattttggggactgactaggcttgaccataatccatgagtcaggtcatcagaaagggcaggctggaaccctcaggcatgaacttccactgacttaatcaggcttgttgggattatctaggataagtcctcttacttaaaatcaactgattatgggttttaatcacacccacaaaataccttcacagctacacctagattaacaaatacctggggagtgtagcctagccaggttcacacataaaattgacaatcacaaaatttaaatgaaaaatatttcaaatttagcaaaataatatacatttctgcataattgtatatgtttgatatcagttgaaactagttgttccttttgtggttgcaatgaaatacacattgtgaaagtgaatgtttaagtccttataatcttgggccaggaaaggccattagcaaaatgatgtgggtggctgcccctgagcttctgtccctgtagctaaggcagacaggtggctactccaagatctcgaggtaagtacaccccagcctgttctgtcttctctcttgcctctcagaactaggctttctgaagggctctgtccaataagtacagagggatttccttggctgtttagagtgtatctattgccaaatcattatcaaaaacaggcaggcctaagcccagaagctttggaaggcaagggagggcaccctgagttttaccaagaacactgaagatattaaaggagaggttctccaatggttaccagaaaacaggttacagataatacgcatttgaaaattctgaatgaccactatattttcttgcttctgctccaacttcaagaataatagtttcttaaaggcacagattatatatcctcagagcatgtcttagtgaatagcatagatattagtgttccagcaggaaatagtacacccaaattaggataaggtgtggaggggtaaaccaaaagttttgtttaaaaaggtgtgagccagctctagagaaacctgaaatgatagtgtagtaccctgtagccattattatcctcagttgggggcagggggtgggtagggaacggagagattactgaaagcataaagagaatgccgaggacggagagttgccctcataggtgccgtggcctttgccgaagcaatgtaattagtcctctggagacggaaccaagggggaagaaatacggtaccctgattgtgaaaatccacctcactctctccctctagtcacctgccagggtttccaaatggctgaacccaccacatatcagagggccaagggcccaccaatgtgatcccttgaaattagccacctgagggcacaatggagagtggacccagaagggcacacaggagatagaatgcccttcactcacattatacagcagctccaagcatgtgaacctgaacaagctatgtcatttctctgagcctcagttttctcaccttaaaataatgtaaccatagttatctggcagggttatttaggggcagacagtatatgtaaatgtaaattactctttttttaaacttttattttaggtttggcgtatatgtgaaagtttgtcatgggagtttgttgtagagattatatcatcatgcaggtattaagcccagtacccaatagttatctttctgctcttctccctcttctcatcctccctgctcaagtagatcccagtgtctgttgtttccttctttgtattcataagttcttatcacttagcacccattcataagtcagaacatgtggtatttggttttctgttcttggattagtttgctaaagataatggcctccagctccatccatgcaaaagaaaagatcttattcatttttagggctgtatattatttcatggtacatatgtaccatattttctttatccagcctgtccttgatgggcatttaggttgattgaagtctttgctattgtgagtaatgctgcaataaatatttgcatgtatgtctttatggtagatgatttatattcctctgagtatatacccagtaatgagattgctgggttgaatggtagttctgcttttagctctttgaggtattaacatactgctttccacaatggttgagctaatttacactcccactaacagtgtataagtgttcccatttccctgcaaccttgccagcatctgttattttttgactttttaataataaccattctgataggcatgagatggtatctcactgcggtttttatttgcatttctctaatgatcagtgatagtgagctttttatcatatgcttgttggccacacgttatgtcttcttttgaaaggtgtcttttcatgtcctctgcccactttttaatggggttgtttttctcttgtaaatttgtttaagttttttatatattctggatattagacgtctgtcagatgcatagtttgtaaattttttcccattctgtaggttgtctactctgctgatagttgcttttgctgtgcagaagctcttaagtttaattagatcacacttgatttttgcttctgctgcaatttcttttggtgtctttgccgtgaaatctttgcccattcctatgtccaggatggtattgcctaggttgtctttcagggtttttatagttttgggtttcacatttaacttgtttttttttttgagatatagtggcacaatctcggctcactgcaacctccacctcctgggcatgcctcagcctcccaagtagctgggactacaggcacgtgccaccataccagactaatttttaagagatggggtttcgctgtgttggccaggctggtctcaaactcctgacctcaagtgatccgcctgccttggcctcccaaagtgctgggaatataggtgtgagccaccacgtctggccacatttaagtctttaacctatcttgagttgatttttgtatatggcataaggagggggtccagcttcaatcttctgcatgtggctagccagttatctcagcaccatttattgaatagagagtcttttccccattgcttatttttgtcagttttcttgaagatcagatggtcataggtgtacagacttatttctgggctccctgttgtttcattgttctatatacctgtttttgtaccagtaccatgctgttttggttaccaaagccttgtagtatagtttgaagtcaagtaacatgatacctccagctttgttcattttgcttaggattgccctggctattcaggctctttttttggttccatatgaattttaaaatagttgttttctagttctacaaagaatgtcattggtagtttgataggaatagcattgaatctgtaaattgctttgggcagtatgaccatatcaatgatattgatttttcctatccatgagcatggaatgtttttccatttgtttccatcttctctgacttctttgagaagtgttttataattctcattgtagagatctttcacctccctggttagctatgttcctaggtattttattctttgtgtggcaattgtgaatgggcttgcctttttgatttggtgctcagtttggctattgttggtgtatagaaatgctagtgatttttgtacatcgattttgtatcccgcaactttgctgaagttgtttattggctggaggagttttggggccgagactgggattttctagacatagaatcatgttgtctgcaaacatatagtttgacctcctcttttcctatttggatcccctttatttctttctattgcttgattgccctgactaggacttccaatactgttttgaatatgagtgctgagagagggcatccttgtcatgtgctagttttcaagggaaatgtttccagcttttgcccattcagtataatgttggctgtgggtttgtcatagatggttcttactgttttgaggtatgttccttcaataagtagtttattgagagtttttaatatgaaggggtattgaattttattgaaagctttttctgggtctattgagataatcatgtggtttttgtccttagttctgtttatgtgatgaatcacatgtaatgatgtgcatatgttgaatcaaccttgcatcttggggatgaagcctacttgatcatcgtggattagctttttgttacgctgctggattctgtttgcaggtattttgttgaggatttttgcatcaatattcaacaaagatattggcctgaagttttccttttttgttgtgtctctgtcaggccttggtatgaagatgatgctggcctaatagaatgagtttgggaagagtccctcctcaattttttgggatggtttctgtaggaatggtaccaactcttctttgtacatctggtaggatttggctgagaatctatcaggtcccaggctttttttggttggtaggctgtttattactgatccaattttggagcttgttgttaagtctgttcagggaatcagtttcttcctggctcagtcttgggagagtgtgtccagtaattcatctgtctcttctaggttttctagtttgtgtgttcgttactcttaacaatagatggagcttcacacagtggcaattgttgtagccaatgaggtttatctgaagcacaattattgctgattgaaaacttttcccagtaccctgctgtgatgactttaaatatagttggcattggcagtttttgatagtctccaaagagactaaattaaaaaaaatacaatagatagcattcaatataataactgctactgttattataattgtcacaactgctgttacctcaactaattcataaaatagatatgaagttcatttcataacagggaaatagataagagattgaagaagcattttgaactgtgttagaataactgtagcatcttacatatgtgtatgtgtgtgtgtgttaacctaaactctgataataagacaaagccccccatctcctttcgatgctcttagtgatcatacatttctacttttccccacttatttgccagacataaaaacaaaattagtaaactaccccagtttgaattccatttccctccaacctacctcatggtggagaatttaatgacagaaaatggccaaaatatttgagatcagtggggagaaattgtgactaatgcacattgtttgacttcataattactacaatgtgattccataaaaattgtattaggtggataataacattgtgagtagtaattgtgtctacatgtgtaatttcttttctctacagtatttaggattataagggaggatttatagatatgtagggaaaaaagtaattttttgcttaaccctcatatgttcttagttgaaacagacacttgtaacaacagcaacaacaacaaaaaagcagattaacgagggaaaaacagaagttttgttaacatgtatatttcatacatacgtgggagatacctagagaaggagtaactatcaaagaggtgactctgaattgcactttatataacatcttcaaaaagaacagtaaatttttagagaagtgacaaaacaaagtactttgagtctccagcggcagcaacttgtgggaaggcaaataaaggctagttagtaaagcttgttaatgtagattcctctggtgccatctccaggtccataagggtctaaagttgttttcattggttaccctttgttcttcttggtagaaaagggagatgagatatattatgtttttgtaaatttatgtcctgattttaggcaaatagagggagggcagagagctctcaggtatctgcttctttcttgccttcagctcaacaatgctcctgtcaaaaaggtgtattgggggtggcatattatgacctctcacagttacaatagtatagataatagatagtgtatatattgatagtctagattactgtgctttacttataagtacaatttagatcataaatcaaatagaaaaccagatggaagcattttaaaaattcatcttggagaaggttcaaaaggtatctgttgtccttgcacaaaagaaatctgtaccttcaaggtcctgggaacactagcaatagcacactgatttggcataagctgaccatgtgctaattgggaacaggactccttagagatcaccaagaaatcacctcattattcagccttggtcacataattaaatttgagtctaatgctctaatctttagatgattttgaattaaattcttatttattccttatgacaagcactccgttctgtcttcgtggatgagactcccagctgggaataaaaccaggttggaggttttgttacagtttatcatattatacctatgaatgattcatgtgccatctgttgaccataaatccagttaaggaattctaatatatgtactatttctacttcctagaataaagcaaaattggcatttacaacattcctgagcaataaaatgccagtaaaattataattgacgcttatggttctttgctattcctaagcattaatcaccttaaaacacagtatgtggtatctgtatttccatgactattagctacaaaatgttggcaacatgttaaacttcaattactttttataatatcttatattcacatgagcaatatttaatgactcacaaagacattctggaataaatacagatattcaccctggaattttctctttcagtgggaataattattaacaacactggtttcttctctgaggtagtaatttttggtagtttagttcttattcagagtgcactgacaatgtgattattattagtacctctgtctttcccagcatgcaattatttgcatattaatttaactttgtttttgggtgaaaatagcaccatataagcagagggatatgattttaaagtatcagtgacatgaaataattttaacgtggaactaaactttgttatgattctaaatttacttttaaaaataataaacattgctttttaagactacagattatgctgcacaaaataaggaaataaatgtagtctaaaaagtatcaaaccccaatcctatttctgttatttcgacattttgtatttgaatattcactctcagtattttttgacatagggacatgttctgattatgcttcggcagattaaaacggtaacacatgggaagctcacacagatggactgggaaatagaaacaggtgttgcactcacctgccatttgttttttttccccctttcaatttttttcttctaaaatgagagaatgggtccttctttccatagtggcagtgaagctagggtacattgacgggcttcttctttggaccaaaaaatagtccatgccctgcaagtcttgattttatctctcggtgcagctgatgagtaatgtgactctttatcatactgtctttgtgttttggaagtagaaataataaaatgcatgtgtagtaagactaatttgctaaataaatagagaatgtatatatgtgtgttcatattgatttttaaaagatctggagggaatattcatatatattagaaataattgggctaaatgccccaattaaaagacacagactggcaaattggataaagagtcaagacccatcagggtgctgtattcaggaaacctatctcatgtgcagagacacacatagtttcaaaataaagggatggaggaagatctaccaagcaaatggaaaacaaaaaaagacaggggctgtaatcctagtctctgataaaacagactttaaaccaacaaagatcaaaagagacaaagaaggccattacataatggtaaagggatcaattcaacaaaaagagctaactatcctaaatatatatgcacccaatacaggagcacccagattcataaagcaagtccttagagacctacaaagagacttagactcccacacaataataatgggagactttaacaccccactgtcaacattagacagatcaacgagacagaaagttaacaaagatatccaggaactgaactcagctctgcaccaagcggacctagtagacatctacagaactctccaccccaaaacaacagaatatacgttcttctcagcaccacaccacacttattccaaaattggccacatagttggaagtaaagctctcctcagcaaatgtaaaagaagagaaattataacaaactatctcagaccgcagtgcaatcaaactagaactcaggattaagaaactcattcaaaaccgcccaactacatggaaactgaacaacctgctcctgaataactactgggtacataacgaaatgaaggcagaaataaagatgttctttgaaaccaataagaacaaagacgcaacgtaccagaatctctgggacgcattcaaagcagtgtgtagagggaaatttatagcactaaatgcccacaagagaaagcaggaaagatctaaaatggacaccctaacatcacaattaaaagaactagagaagcaagagcaaacacattcaaagctagcagaaggcaagaaataactaagatcagagcagaactgaaggaaatagagacacaaaaaaccctataaaaaaatcaatgaatccaggagcttgtattttgaaaagatcaacaaaattgatagactgctagcaagactaataaagaagataaaagagaagaatcaaatagacgcaataaaaaatgataaaggggatatcaccaccgatcccatagaaatacaaactaccatcagagaatactataaacacctctatgcaaataaactagaaaatctagaagaaatggataaattcctggacacatacaccctcctaagactaaaccaggaggaagtcgaatctctgaatagaccaataacaggctctgaaattcaggcaataattaatagcttaccaaccaaaaaaagtccaggaccagatggattcacagccaaattctaccagaggtacaaggaggagctagtaccattccttctgaaactattccaatcaatagaaaaagagggaatcctccctaactcattttatgaggccagcatcatcccggtaccaaagcctggcagagacacaccaaaaaaagaattttagaccaatatccctgatgaacatcgatgctaaaatcctcaataaaatactggcaaaccaaatccagcagcacatcaagaaacttttccaccatgatcaagtgggcttcatccctgggatgcaaggctggttcaacatatgcaaatcaataaacataatccagcatataaacagaaccaatgataaaaaccatatgataatctcaatagatgcagaaaaggccttcgaaaaaattcaacaacccttcatgctaaaaactctcaataaattaggtatggatgggacgtatctcaataagagctatctatgacaaacccacagtcaatatcatactgaatgggcaaaaactagaagcattcccttagaaaactggcacaagacagggatgccctctcccaccattccaattcaacatagtgttggaagttctggccagggcaatcaggcaggagaaggaaataaagggtattcaattaggaaaaagaggaagtcaaattgtccctgtttgcagatgacatgattgtatgtctagaaaaccccatcgtctcagcccaaaatctccttaagctgataggcaacttcagcaaagtcttcaggataccaaatcagtgtgcaaaaatcacaagcattcttatacaccaataacagacaaacagagagccaaatcatgagtgaactcccattcacaattgcttcaaagagaataaaatacctaggaatccgatttacaagggacgtgaaggacctcttcaaggagaactacaaaccactgctcaaggaaataaaagaggatacaaacaaatggaagaacattccatgctcatgggtaggaagaatcaatatcgtgaaaatggccatactgcccaaggtaatttacagattcaatgccatccccatcaagctaccaatgactttcttcacagaattggaagaaaactactttaaagttcatatggaaccaaaaaagagcccgcattgccaagtcaatcctaagccaaaagaacaaagctggaggcatcacgctacctgacttcaaactatactacaaggctacagtaaccaaaacagcatggtactggtaccaaaacaaagatatagactaatggaacagaacagagccctcagaaataatgccacaaagctacaaccatctgatctttgacaaacctgagaaaaacaagcaatggggaaaggattccctatttaataaatggtgctgggaaaactggctagccatatgtagaaagctgaaactggatcccttccttacatcttatacaaaaattaattccagatggattaaagacttaaatgttagacctcaaaccatgaaaaccctagaagaaaacctagacaataccattcaggacataggcatgggcaaggacttcatgtctaaaacaccaaaagcaatggcaacaaaagccaaaattgacaaatgggttctaattaaactaaagagcttctgcacagcaaaagaaactaccatcagagtgaactggcaacctacagaatgggagaaaacttttgcaacctactcatctgacaaagggctaatattcagaatctacaatgaactcaaacaaatttaaaagaaaaaaaaaccccatcaacaagtgggtgaaggatatgaacagacacttctcaaaagaagacatttatgcagccaaaagacacatgagaaaatgctcatcatcactggccatcagagaaatgcaaatcaaaaccacaatgagagaccatctcacaccagttagaatggcgatcattaaagagtcaggaaacaacaggtgctggagaggatatggagaaataggaacacttttacactgttggtgggactctaacctagttcaaccattgtggaagtcagtgtggcgattcctcagggatctagaactagaaataccatttgacccagccatcccgttactgggtatatacccaaaggattataaatcatgcttctataaagacacatgcacacatatgtttattgcagcactattcacaatagcaaagacttggaaccaacccaaatgtccaacaatgatagagtggatttagaaaatatggcacatatacaccatggaatactatgcagccataaaaaaggatgagttccttgtcctttgtagggacatggatgaagctggaaaccatcattcttagcaaactatcacaaggacaaaaaaccaaacaccgcatgttctcactcataggtagaaattgaacaatgagaacacatggacacaggaaggggaacatcacacaccagggcccgttgtgggaggaggggagtggggagggataacattaggagatatacctaatgttaaatgacgagttaatgggtgcaggacaccaacatggacatgtatacatatgtaactaacctgcacgttgtgcacatgtaccctaaaactgaaagtattaaaaaaaaattattctgtgtgtttttttctcttttttactttatattctaaatttcctttaattataaaaggtttattttaaaaaaaaacggtgataataagtaagcaaaactgcccacttccctcctcacgttatccactaaggaatgcctccaaagaaaacactatagacgtgagagaggaagtgtgcattaagggggagtccatgctgaggactagaaggaaatgaggggggcaagtcttcaggccaggctcaggcttagtcagcacactcagagcagatctcttgggagaaaatggggtggattcacctgaatcagcttccagaaactgacaagaaattcacatgccccccagttgacgatggaattgttaccgcctttggacaaggatgcttttgttgatatgaccagtgtattctctgatgcattcccaacctgatgtttgttcagttcctgcagagccaggcaaaactcactccgactgcctttggcatccacctccacaggatggatgtactgtctctattaaaagtgcttggcatggtaactttgggttaaagacaattaggtggaaactagtcttgtgaaatggagatctccataaaacttgagagggtagaacaaacaaggagcaaatatagagagtcaaatccataaaccttgaggccatttaatttctagatcaacatttattcttctatcctatgtaccttctgccctcctcctttgtaatttcttcagacccaaccttccaggcccctcatgtaaaaatatttctctgcttttcctgagatggtcagtgctggtcaccaccttgcaatataagggtcagctttcccccgctttgggtttgtacaagaaatcattcatttatcaatgtctgtggagcccctattatatatgtctgaggtcctggttagggtaaatgtcatcacatatccatacaaataacatccatttatcaacaaaaaaaaagactttccaaccctcatctcaacaggacacctgatatacgaatttactgtgtagttagaactgccatctttagcccttctaatgtggttctagacccagacgtggtatcatgttgctactgatgagggctagtcttaactgatgcccttgaattgagactggggtgacatataatgcattcatagaaattagcaatggctatcctagtcctcaagagaaatttagataagctgtattttgtgcattgatatgtatcagactcctgtgacactggaagttttattttgcctggataaggttactgaacaagtagcatctcagtttgagacactaagattgccagtgggtgacgagcactgtggacatgagccatctgtgctgtggagtgtggctagtgtctcccatagcagtctctcttgtctgcctgtcattaggtgaccttgaggctgtgcaaagtgagttatgcagcctctccctgattaaatgcatcctgtctctctcacattgtaaaaataattgtggactttatgttccacccaggattataattcctcaatgccatatgtttgtgttgacataaacagtcttccccgaaatttggcacaagcctgaccatgtgctgattgggaacaagacttcttagagatcgccaagaaatcaattcattcttcagccttggtcacataactaaatttgagtttagtgccctaatatttagatgggtacctctgtgatcttgttaaagacatttgtttgcacggaaagtgctacacactttatctatgtgttttactggactttgttttttttttttttaaatgtcaccagaatatatcacttagatctccagtctcctttatgttctaagctgtagcattttttcactttcaacatgatatttgatgcaagattttcttattacctccacttttgaaaaatgatataacgtaagaggaaattgcataggaggtggagaagcccatctgtagaaatgctgatagcttcattgtacattagtgttgactcgtgaatgaaaaggaaaaactcagctctggaatgcctaagtcctaaagtttttcatacagtagagctctgtgaagcaccaacccagttttgtttgtttgttttttgttttgtttgtctgttttttgagatggagtcttgctgttgcttaggctggctttgaactcctggactcaagcaatcatcctgcctcagcctcctgaatagctgggatatatagacatgtgccactatgcttagctttcaaactatatttttaatgagtttgtccctcttaggatattcattgtttggtaattaaaactaagcagctggccaggcacggtggctcatgcctgtaatcccagcactttggaaggccaaggcgggcggatcacctgaggtcaggagtttgagaccagcctgaccaacatggagaaaccccgtctctactaaaagtacaaaatgagctgggcatggtggtgcatgcctgtaatcccagctacttgggagaatgaggcaggagaatcgcttgcacctgggaggaggaagttgcagtgagccaagatcgcaccattgcactccagcctgggcaacaagagtgaaactacatctcaaaaaccaaaacaaaacaaaaaaaaaaaaacaaaaaaaaactaagcagctgacttggcagttgtggtcaaaggaaccaccttttgtcatgcattcactgggagatgcaggcaacatttgatttcatggcatttaataggtgattttaaaatggcaattgattatattttcaaataaacacagccatcacataaatactttgtcacctttacacagcaccaacatgatgcttttgtaatgaaaaataaagccagtagggaaaagacttttacaagatctgtttaaatcattcagtgaatactagtccctatggttgatactgaagaagcaaaggtgagcacaggagctcacatgccaatggggaggcagaaattagtcaaagaatcacagaaatcagtgtcaaattaacagctgtaacacaggttatgaaggcaaaagatcataatgctgcctaggttgggttctccaaaagcaaagcctgagacaggagttcgggtacatatgacttattgtaagaatgctctcgggaagaggagtgtccgaatctgaggcaggggaagggtgtggtctcagatgaatggagcttccgcctgaccccatgggagctctggagcattaattgtacaacagacttgttccaccttaaggcaggtggctggcctttcatagttgttcccccatgcaaatcaggcattaaccagagttaacccaggatgggcatggcccttgggtagaggaactcccataaggccaaaggcagttttccagagaagggagacagcaacagagaaaatgaatgcaagtttaaggagctctgggtgtggcaccatcagcatccactacagatgctaagagaacatataatacaatgctctgctttcttcaaaatcctccagtggtctcctgtatcactcagagtcagacccaaatgcctgaaaatgtctgcaaagatcagggggatctggtgcctgctctgacctcatatcatagatgcctttgaatcaaaatgctcattgctctatatgatattcactgttgctttagttaccttgtcctggctggattttcagttaccttttctatttaaacagcaatgcatattttggacatatttcacatttgatcagtgtatgttgaggtacctacttttattttcttacatttttattcaaaatatctataagtgcctagagtagtgaaaaatcataaagacagaaagtaggatggtagttgccaggggctgggaggaagcaggaattggggagttattatttaatgggtatagagtttagttttacaagacgaagagaattatggagatggagatggtggtgatggttgcgtaacaatatgaatgtccttcatgcctcagaactatacatttaaaaacagttaaggtggtaaattttatgttgtatatattttaccacgattaaaataacataagtgtcatggaattttgtattaggttaaagtttgagatgtggcatatgacttttctggctccagagaaacctcttgcctttaccaaacataatcagaatcagtgtctgcatttgaaattggcccagagttaaagataaatgaaaagagattctttgaggccaatctggttttttaattttacacaaaaacattgccaaatatagtggacttccttatctgggttgtattcttccctgttacatctgcctttctttctgcatttaggtctgtctcttagatctctgctgtctgggctctttttacaattttttaaaatactagtacttcttttgttatttgatatctattaattatattcctccttgcattcttcacctttttgagttctattttagcattttggtttccattatacagcaaatatggggaggtcatcaaaatctggctctgtcaaaataatagctgccttctgcattgcctggtactgtggaagaccattactcccttttcatgttgttggggtcttgctgcagagactctcagctgtgattcttcctttgagatgttttgagtcattttcattgtcagcctggctgctggattggaaacactgccaagttcctgaagagacaattttatctgacaaatttcttccaattgcaggaacatatgttacgtataagacatacagctaagagccaatttaacattggaggttagcacatatcagcagatgtttgtggagggcccactatatgtcagtctctggggaggcctcaggcacataggaggaactcaggaaatatcaataggttaaataaaagtgaactgattggattggagaacacacacacacacaaaaaaacaaacatagttttaaagaactcaaagtcctaaaagaggaagtggacctgcaaacacatgactatagtaaactgtaatatgcctcaatttcctcaactataaattaaggacaaacctatcttattacatttccaagatcattcaatgaaacaatacatctaaagtgctgaacagaatggcagacagagcaaagttagagtcctacttattatcaagatacaccaaatgggaagaaagtaatctgctctgtagagagtagtaggtgggtaagtttatccaagtcaacttaatataattggtgacagagttgaacagggctttgtggatgtagccatcctttcacagtctgtgtcagcaaaagcctctgtatgtattggcagcaccatatacatgtatgtacgatgagaaattggaccgctatttataggtttgatcttctgatgttgcttgacattttcgttaatggaaaatgtcagttttccagttttcttgccaaaggaaattaccaaatgaaccacttacaagctactgttaaacattatttataaatgctcgatgaccttgattgtgataaataacaataattgctaatcattatgtttcagaagcctgaggcctgccaagcctcttgggaactacacaaaatattttcataacaaatctagtaatttcagcatcataaaatatctagtaggaaaagctaaccggtaaatattattattccttaaaaacattttctaggggaagaaatgccttttaaaaatctctctctggtcaatttgttgttgttattgcttaaatcatcatcctaattaccatgcctcatttctgctgaaaacagaattttgaaaacactttctgatttctaaggcaagactatatcgtggtacattgtcaaaaaatttctccaggattatttacccagtaatgtcaaactcatagataagaggatatgtcaaccgcattttccataaatttcagttgtgtagaatattacttttgacctatcatagaaagaaaagaatttattgtgatagtaggtgggtattaagtgtttaaccaaagattataattatttaaaatctaaaacaatcatagaaacttcttcggaaatctttttgaaatttacttttgatgaggcttaatccataaccaaatactgtggccaaatataaacttgaaatacaggtttctgatatttgaaaatgtcggcctggattacatttcggcctttctgtggcccggttcctttatccctgccagtgcctgtgcagtacatggagcactgagtaaaaccatcaagtcaggaaaaggggaaataccactgcagcagaggaaagcaaatctaaaacaacacaaaaggtaatagttgtttacttggtcaagctgtcttctttgcgtatcaggtatacattcatattatttgctgtataccataatttataaccctaaaacttgaataatatgagttactggttagaagcactctttataacaaattaggttttgatttttatgctcgacaattttgaccctgataatattggttactaaatcctctcttggcacactacatcaccatgatgcttgatctattctatttacttatttattcaacaaatagcctgccactggatcccaggggagggctgggggtacagcggtaagccacacagacaaagcctctgcccttgtgaaattgacattccagtggaggagacagttgacaaatgaacaaatgaagagatatacaaagtcactcattatagattacaagggccaggaagggaataaatagagctctaagaaaaataatagtagggacgcattctttataaaatacttgagaacattcaccttcatgttacttgattcctcaatataaacaccacatgataaatttaatctaaaattaggtgtcaggaaataataccccctgttattattaactagtgagcttccttttttcttttggaaactgaaaattaaataatttaccatattttccttttttgctctggctgccagaaagcttggaaaaaactttggtgcccagtgaaagcattaaattatctcttcttttagtatattggtgcagcagatgactgaaacatcagcctggcctctgcttcccaatctggggactgggtttataaaatggtgagtggttgtggggcaggccaggccaacttagacagactagggaaaagacttttcagtccaggacagagaggttgtaaggaaagtttattttattttattttattttattttattttattttatttattgttatactttaagttttagggtacatgtgcacattgtgcaggttagttacatatgtatacatgtgccatgctggtgcgctgcacccactaactcgtcatctagcattaggtatatctcccaatgctgtccctccgccctccccccatcccacaacagtccccagagtgtgatgttccccttcctgtgtccatgtgttctcattgttcaattcccacctatgagtgagaatatgcagtgtttggttttttgttcttgcgatagtttactgacaatgatgatttccaatttcatccatgtccctacaaaggacataaacgcatcattttttatggctgcatagtattccatggtgtatatgtcccacattttcttaatccagtctatcattgttggacatttgggttggttccaagtctttgctgttgtgaataatgcctcaataaacatatgtgtgcatgtgtctttatagcagcatgatttatagtcctttgggtatatacccagtaatgggattgctgggtcaaatggtatttccagttctagatccctgaggaatcgccacactgacttccacaatggttgaactagtttacagtcccaccaacagtgtgaaagtgttcctatttctccacatcctctccagcacctgttgtttcctgactttttaatgattgccattctaactggtgtgagatggtatctcattgtggttttgatttgcatttctctgatggccagtgatgatgagcattttttcatgtgttttttggctgcataaatgtcttcttttgagaagtgtctgttcatgtccttcacccactttttgatggggttttgtttttttcttgtaaatttgtttgagttcattgtagattctgggaaaatcaatgtacaaaaatcacaagcattcttatacaccaacaacagacaaacagagagccaaatcatgagtgaactcccattcacaattgcttcaaagagaataaaatacctaggaatccaacttacaagggacgtgaaggacctcttcaaggagaactacaaaccactgctcaaggaaataaaagaggatacaaacaaatggaagaacattccatgctcatgggtaggaagaatcaatatcgtgaaaatggccatactgcccaaggtaatttacagattcaatgccatccccatcaagctaccaatgcctttcttcacagaattggaaaaaactactttaaagttcatatggaaccaaaaaagagcccgcatcgccaagtcaatcctaagccaaaagaacaaagctggaggcatcacgctacctgacttcaaactatactacaaggctacagtaaccaaaacagcatggtactggtaccaaaacagagatatagatcaatggaacagaacagagccctcagaaataacgctgcatatctacaactatctgatctttgacaaacctgagaaaaacaagcaatggggaaaggattccctatttaataaatggtgctggaaaaactggctagccatatgtagaaagctgaaactggatcccttccttacaccttataccaaaatcaattcaagatggattaaagacttaaatgttagacctaaaaccataaaaaccctagaagaaaacctaggcattaccattcaggacataggcatgggcaagggtttcatgtctaaaacaccaaaagcaatggcaacaaaagccaaaattgacaaatgggatctaattaaactaaagagcttctgcacagcaaaagaaactaccatcagagtgaacaggccacctacaaaatgggagaaaattttcgcaaccgactcatctgacgtaaggaaagtttttaaacagaagtttctcagtgtgatgttcaatattactcacacctctatttctgcacaaattgatattactattacttgctagtgttaggtgggaattgggcttgaatttttggtggatatccaagcattaagggtgacctgaaactcgtcattagagtcagagcacatgtccccaaagggccagcctcattctggttacacttggtccctgctactttgatctctttttctcatttcttcttttcccagtttattgattttgttgtatttttacatttatatatgagaacattatcaaacatttctctctgtctctctctttctctctctcttcctccccactccctctctgtctctttctctccctctctctctccctctctctctctctctgtctctttctctcaacttccctaagagcataaggtgtgaaaggcaaacagacctgggtttaaagtcttgctctgacacctactagcagtatccttggaaggatattccacagtggatgctgcagcggtaccatgcccatttccctttgccagtccagtgcacccatatcccatggctctgagtgttgatccctgatggctcggagctgctcttatctctggagaactttccttgatagagaatataacccccgtgggtagggggtggagtggattcctgcagacatgacttgctaatgcaggagaacaaaggcatatcttcttttctcaaggtgggaccaactctgcaggacaaagcatgttccagagctcccagggggtcagaccaaagcagactgcagctgaggccatatctctgcttgtccccttcttctcttgtatcctgcttcctttgctccccttcttttgaggctactcttacaataaatcatgttaacaagattccctgtttcatattctgctctttattattattattttttaagttccggggtacaggtgcagaacatgtagctttgttacataggtatatgtgtgccatggtggtttgctgcacctatcaacccatcatctaggttttaagccctgcatgcattcgttatttgtcctaatgctctccctccctttgccctctaccccacgactggccccagtatgtgtcatttctccccctgtgtccatgtgttctcattattcagttcccacttgtgagcgagatcatgtggtgtttggttttctcttcctgtgttagtttgctgaggatgatggctttcagcttcatccatgtccctgcaaacgacgtgatgtcattcctttttatggcttcatagtattccatggtgtatatgtaccacactttctttatccagtttatcattgatgggcatttgggttggctctatgtctttgctatagtaaatagtgctgcaataaacatgtttgcctgtgtctttataatagaatgatttgtattcctttggttatatacccagtaatgagattgctgggtcaaatggtatgtctggttctagatccttgaggaattgccacactatctttggcaatggttgaactaatttacattcccaccaacggtgtaaaagcattcctatttatccacagccttgccagcatctattgtttcttgacttgttaataattgccattctgactggcatggttttgatttgcatttctttgatgatcagtgatgttggactttatttctcctttgcttatgaagcttagtttttctggatatgaaattatgggttgaaaatttttttctttaagaatgttcaatcatgctgctataaagacacatgcacacgtatgtttattgtggcactattcacaatagcaaagacttggaaccaagccaaatgtccaacaatgatagactggattaagaaaatgtggcacatatacaccatggaatactatgtggccataaaagatgatgagttcatgtcctttttagggacatggatgaaattggaaatcatcattctcagtaaactattgcaagaacaaaaaaccaaacaccgcatattctgactcataggtgggaattgaacaatgagaacacatggacacaggaaggggaacatcacactctggggactgttgtggggtgggggaagggggaaaggatagcattaggagatatacctaatgctaaatgacgagttaatgggtgcagcacaccagcatggcacatgtatacatatgtaactaacctgcacattgtgcacatgtaccctaaaacttaaagtataatgataaaaaaaaaaagattgttgaatattggcccccactctcttctggcttgtggtgtttctgttgagaggtctgctgatagtttgatgggcttccctttgtaggtgacctggtctttctctctggctacgcttaccactttttccttcattttgaccttggagaatctgatgattatttggggttggtcttctcatggaatatcttagtggtgttctctgtatttcctgaatttgaatgttgccctgtcttgctaggttggggaagttctcctggataatattctcaagtgtgttttccagctcggttccattctctctgtctctttcaggtactccaatcaattgtaggtttggtctttttgcatagtcccatatttctcggaggttttgctcattccttttcatttcttttttctctaatcttgtctgcatgccttatttcagcaagatggtcttcaaatgctgatatcctttcttctgcttggttgatttggctattgatacttgtgtatgcgtcatgaagttcttgtgctgtgtttttcagctctatcaggtcatttatgttcctgtctaaactggttattctatttagcagctcctgtagccctctatcaagggttttggcttctttgcattgggttagaacatgctcggttagctcagcggagtttgttattaccccccttctgaagcctatttctgtcaatttgtccatctcatcttccatccagttctgcatccttgctggagaggcattgtgatcatttggaggagaagaggcactctggccttttagattttcagcgtttttttcgttgattctttctcatcttcatgagtttgtctaatattgatctttgtggctgctgacctttgggtggggattttgtggggactttttattgttgatgctattgttgttgttgcattgttgttgctttctgtttgtttttcttgcagttatcaggtccctcttctgtagggctgctgtggtttgctgggggttcgcttcaggccctattcatctggttcattcccatgcctggagatgtcacacaaggagcctggaaaacagcaaagatgggtgcctgctccttcctctgggatctctgacctaactgatgccagtaggaacgctcttgtatagcatgtctgacaacccctgttggaagatctcacctagttaggtggcaaggggagcagaacgcatttaacaaagcactttgtcccttggtggattgggcgtgcttcactggggggaaacccacacatctgggctgcctgaattcttcagaactagcaggaggaaagaataagtctactggtctgcagagactgcagccacccctcccgctagggctcaggcccagggagatcagagttctgtccttgagtccctggctgaagttgttggagttcctgtagggaggccctgccttgatgggtcaaggtcaggcctgaagaggcactctgtccgcaatctgccacagccattgtgttggactgtgggggatacctcttgggaccaagctgtccagcctccccagctccagcaggggaaaagcctggcctggagctatagagatggctgctgcccttcacctgcccttagagcttagtttgttaggcagctatcagtcccagtgttggctgtcacccgtcccccaaggagtccaaacggcttagacagcaggcaactgcagctgtggtgctgatcaccctcccccaggagctcagcagccttaagcagattctagcttagtgcctgttgagaatctgtatggcttcattgttgggaccctagaccccagtggaatggactcatgagttggatcttccaaaccatgggttgcacagttccatggaaaaaggacattttccaggctgggtagtatgctcattcactgactcccttggctggggggagtggactcctctgccctgtgtagccaccacaccacactactcttccttcttctctgtggatcacagcagccacctagtcatttccgatgttggaatctggatacctcagttgctggtgcaggattcgcatgctgttatggttcttttcaaggggagcctctgattgccactgcttctagtcagccatcttgaccccacccctgttctgctctttgagtctgtgttttcttatctgaacaataaagatagctcactgctcatagaattattttgaggcttgagtgaaataatgtctattaggtatctggaaaagtttaaaaatcagacattcaagggctgatactaattgttgttacattaggccacagcccatgactaaagaagtgttgaaaaactgaaatcctattgaaagcttttcacagtgtcttgttattcattctgattgttctggtcatcgtggcccaagagaggatacattccctttgccaagtaaacatttttcagtttctaagtgcagggctgccctctagtggactctgaatgcatgttcattgaggataataggtagtttttgcaggcacatggcaaactgtatgaaaacatgtcctttgcaggaacatggatgaagctggaaaccatcattctcagcaaactgtcacaagatcagaaaaccaaacactgcatgttctcactcataagtgggagttgaacgaagaacacatggacacaggaaggggaacatcacacactggggcctgtcggggagtgtggggctacgggagggataacattaggagaaatacctaatgtaagtgacaggttgatgggtgcaacaaaccaccagggcacatgtatacctatgtaacaaaactgcacattctgtatgtgtaacccagaacttaaagtataataaaataaataaataaaatacttgtttagtcaaaaaaggaaaattggtctaagtgtctgcctcgataagcttctagtgtcctccagagacaaaacactgcaacctgttgtcatcagagcatctgttcctattcccttgaggcttgaggcttaaaaccagatggaaatgtagagagatctctactccaacttctcatttccagagaaaaattcagaattcatagaggtaaaatgagaactgaattctaatcctgccttggctgtgacttccaactcagaagtgtttttgtgtgatgtgctgatgtccatttggacatagattctttctctaggaatagttgccatttacttaattacaatcatttctaattattttactaccttcctacgacttttccctttgctcattttgctgtagccaccctgtcctcttattgtttatcttaacgcaacaggcaagcttctctctccataacctttgcacaggtgttccctcttcctgctatactctttcctgtaccaccttcaagtatttgctcaaatgtcaccttctcactctgaccaccctattcaatatttcagttccccaacatagcagcactccaggtgtccccttatcctgctctatagcttcttttttctgtagcccttatcactttctactgtgctgtataactttattcattatgtagtgtaatgaattcaagtgcccctggagcaaggatctttgtctcatttcttcactgatatagcctgtgttcctagaatagtgcatagtgcacactaagggctctataagtatatattagattaaataaccttccaaaataagcttgtcactcagtggaaaaaccacttcctccagtgtagaagtgcaactctctgaaggttgaggagagattgaacaaattttctctgctccatgaaagaccagaccactgctgccttaacattgcgtgccaccaagtattgacatcacaattaacccaagaaattggtcacaagtaggagtttgtcattagaactcctaatctgctatcccctacagtgcctccaggacccatttatcaagcctctcatctccataaagccaagtttctttcatccccggactctttccccatgcaatgtagtttagcttctattcttctgactctgcttccaccaccttgagcccccaaactctgccctctggagctcactgtcatcattagcaggtgcttcctgtctccagctcttctctgaaaatgaccatcattgttttgctccaaagtctgcctctcccccaagggcacagctaccttgcagctttttcaaatagtggctctttattctctttccaatttaactctggacttattccagaccagaactccaggtcctttaaagtgcttgccatctgaatgtactaccgaccatgatccttgttctagccatctttcagccttgtagccagtccctctcattcacagaacactttattacctagaccactgatgtggttttgcccactagtcctgtgaatttccactttggtgacacagcatcccttcagtgacctatccaacatcctagtctctcaactttctgcctcctacaaatcttcttgtttatggtccttttctagtctttgtcatccttaataatgcccagcctccaaattcttgaccttaggcactctagtctctgacctccacttctcatcttcttgtggctccattccaataatccttcatccctgtaatctagaaactttcactttttcattgtcagggaccccttcttgttctgtcttctttcttacttatcttggactctgtggtccatcaggatatttgtttctttgtgtctcagaccattttgtgctgatataacagaataccacagactggataatttataatgaacagatatttattggctcatgattctggagtatggccagtccaagattgaggggtcagcatctggtaagggcattcttgctgtgtcatcccatgacagaaaggcaaaagaaaggcaagaaagagaggcaaaagggagctgaacctgtccttttataaggaacccactcccacaataatgagcctgctcctgagataacagcattaatctatcctcgtggcctaatcacctcttagaggtctcactcttaatacagttacaatgatgattgagtttccagcacatactttttggggaatatatcaaaccatagcaatttgcattcatctttagtctttttgtcctttctgctccttcagccatactcacctgacaaaccccacccctggttaacctctggccaccctcagtgcctcccttgcacctaagcatctgagtatgtatggaggaaaaagtaccaccatgttgggtgattctactttaaatttttgactacaagagtcagtgggccctgaaccctgcctggcaatcctaaaccatgccttctctctcctcaatcatcatccttgtcacctcctcactctcagataattataccttttcttaattcactgagaaaagcattcggagacaaactgctttatctttgccctactgaacctacttctctgtcttcccccttcgaagcagataactagatgttacaatggatagtgatgaccactctgtgagtaaatgcagtaattctctgtgtttcagggtctgagagggagggataagactttaactgtgacctattccttcttaaccttcaaagactgtcaaccttctcattactctctttaccatgatttcagttaaacaataacatcactttcaatcatgtttccactgcttttcatttgcctgctaaatggatgataatgtaaagtatgaacacgtcttttcaaacaaaatggggtcccagaggcacagaacttataaatgtaaaaagaacttttagaggtggagccaagatggccaaataggaacagccccagtctacagcttccagcgtgagcgatgcagaagacaggtgatttctgcatttccaactgaggtactgggttcatctcactggggagtgtcggacagtgggtgcaggacagtgggtgcagcacacggagcatgagccgaagcagggcgaggcatcgcctcatccgggaagtgcaaggggtcagggaattcactttcctagtcaaagaaaggggtgacagatggcacctggaaaatcaggtcactcccaccctaatactgcgcttttcctatggtcttagcaaatggcacacctggagattatatcccgtgcctggctcggagggtcctatgcccacggagcctcgctcattgctagcacagcagtctgagatcaaactgcaaggcagcagcaaggctgggggaggggcgcctgccattgctgaggcttgagtaggtaaacaaagtggccgggaagctggaactgggtggagcccaccacagctcaaggaggcctgcctgcctctgtagactccacctctgggggcagggcatagccaaacaaaaggcaccagaaacctctgcagacttaaatgtccctgtccgacagctttgaagagaataatggttctcccagcatgcagctggagatctgagaatggacagactgcctcttcaagtgggtccctgacccccgagtagcctaactgggaggcaccccccagtaggggcagactgacacctcacacgactgggtactcctctcacacaaaacttccagaggaacaattaggcagcaacatttgctgttcaccaatatctgctgttctgcagcctctgctgctgatacccaggcaaacagggtctggagtggacctccagcaaactccaacagacctgcagctgagggtcctgactgttagaaggaaaactaaaaaacagaaaggacatccacaccaaaaccccatctgtaagtcaccatcatcaaagaccaaaggtagataaaaccacaaagatgggggaaaaaaacagcagaaaaactggaaactctaaatatcagagtgcctctcctcctccaaaggaacggagctcctcaccaacaacggaacaaagctgtaggagaatgactttgacaagttgagagaagaaggcttcagatgatcaaagtactccgagctaaaggaggaagttcaaacccatggcaaagacgttaaaaaccttgaaaaaaaattagatgaatggctaactagaataacaaatgcagagaagtccttaaaggacctgatggagctgaaaaccatggcacgataactacatgatgaatgcagaagcctcagtagccgattcgatcaactggaagaaagggtatcagtgatggaagatcaaatgaatgaaatgaagcaagaagagaactttagagaaaaaagaataaaagaaacaaacagagcctccaagaaatatgggactatgtgaaaagaccaaatctacgtctgattggtgtacttgaaagtgacggggagaatggaaccaagttggaaaacactctgcaggatattatacagaagaacttccccaatctagcaaggcaggccaacattcaaattcaggaaatacaatgaatgacgcaaagatactcctcgagaagagcaactccaagacacataattgtcagattcaccaaagttgaaatgaaggaaaaaatgttaagggcagccagagagaaaggtcgggttacccacaaagggaagcccatcagactaacagctgatctcttcgcagaaactctacaagccagaagagagtgggggccaatattcaacattcttaaaagaattttcaacccagaatttcctatccagccaaactaagcttcataagtgaaggagaaataaaatcctttacagacaagcaaatgctgagagattctgtcaccaccaggcctgccatacaagagctcctgaaggaagcactaaacatggaaaagaacaaccggtaccagccactgcaaaaacatgccaaattgtaaagaccatcgaggctaggaaggaactgcatcaactaaggagcaaaataaccagctaacatcataatgacaggatcaaattgacacctaacaatgttaaccttaaatgtaaatggactaaatcctccaattaaaagacacagactggcaaattggataaagagtcaagacccatctgtgtgctgtattcaggaaacccatctcacatgcagagacacacataggctcaaaataaagggatggaggaagatctaccaagcaaatggaaaacaaaaaaaggcaggggttgcaatcctagtctctgataaaacagactttaaaccaacaaagatcaaaggagacaaagaaggccattacaaaatggtaaagagatcaattcaacaaaaagagctaagtgtcctaaatatatatgcacccaatacaggagcacccagattcataaagcaagtccttagagacctacaaagagacttagactcccacacaataataatgggagactttaacaccccactgtcaacattagacagatcaacgagacagaaacttaacaaggatatccaggaactgaactcagctctgcaccaagtggacctaatagacatctacagaactctccacctcaaatcaatagaatatacattctttacagcaccacaccacacctattccaaaattgaccacagggttggaagtaaagcactcctcagcaaatgtaaaagaacagaaataataacaaactatctctcagaccacagtgcaatcaaactaggactcaggattaagaaactcactcaaaactgctcaactacatggaaactgaacaacctgctcctgaatgactactgggtacgtaacaaaatgaaggcagaaataaagatgttctttgaaaccaacaagaacaaagacacaacataccagaatctctgggacacattcaaagcagtgtgtagagggaaatttatagcactaaatgcccacaagagaaagcaggaaagatctaaaatggacaccctaacatcacaattaaaagaactagaaaggcaagagcaaacacattcaaaacctagcagaaggcaagaaataactaagatcagagcagaactgaaggaaatagagacacaaaaaacccttcaaaaaatcaatgaatctaggagctggttttttgagaagatcaacaaaattgatagacccctagcaagactaataaagaagaaaagagagaagaatcaaaaagatggaataaaaaatgataaaagggatatcaccaccgatcccacagaaatacaaactaccatcagagaatactataaacacctctatgcaaataaactagaaaatctagaagaaatggataaattcctcgacacatacaccctcccaagactaaaccaggaagaagttgaatctctgaataaaccaataacaggctctgtaattcaggcaataattaatagcttaccaaccaaaaaaagtccaggaccagacggattcacagccgaattctaccagaggtacaaggaggagctagtaccattccttctgaaactattccaatcaatagaaaaagagggaatcctccctaactcattttatgaggccagcatcatcctgataccaaagcctggcagagacacaacaaaaaaagagaattttagacaaatatccctaatgaacatcgatgcaaaaatccatgataaaatactggcaaacgaaatccagcagcacgtcaaaaagcttatccaccgtgatcaagtgggcttcatccctgcgatgcaagcctggttcaacatacgcaaatcaataaacataatccagcacataaacagaatcaatgacaaaaaccacataattatctcaataaatgcagaaaaggccttcaacaaaattcaacaaccttcatgctaaaaactctcagtaaattaggtattgatgggacgtatctcaaaataataagagctatctatgacaaacccacagccaatatcatactgaatgggcaaaaactggaagcattccctttgaaaactggcacaagacagggatgccctctctcaccactcctattcaacatagtgttggaagttctggccagagcaatcaggctgcagaaggaaataaagggtatgcaattaggaaaagaggaagtcaaattgtccgtttgcagatgacatgattgtatgtctaggaaacaccatcatctcagcccaaaatctccttaagctgataggcaacttcagcaaagtctcaggatacaaaatcaatctgcaaaaatcacaagcattcttatacaccaatagcagacaaacagccaaatcatgagtgaactctcattcgcaattgcttcaaagacaataaaatacctaggaatccaactaacaacggacgtgaaggacctcttcaaggagaactacaaaccactgctcaatgaaataaaggaggatacaaacaaatggaagaacattccatgctcacaggtaggaagaatcaatattgtgaaaatggccatactgcccaaggtaatttacagattcaatgccatccccatcaagctaccaatgactttcttcacagaattggaaaaactactttaaagttcatatggaaccaaaaaagagcccgcattgccaagtcaatcctaagccaaaagaacaaagctggaggcatcatgctacctgacttcaaactatactacaaggctacagtaaccaaaacagcatggtactggtaccaaaacagagatatagaccaatggaacacaacggagtcctcagaaataacgccgcatatctacaaccatctgatctttgacatacctgacaaaacaagcaatggggaaaggattccctctttaataaatggggctgggaaaactggctagccacatgtagaaagctgaaactggatcccttccttacaccttatacaaaaattaattcaagatggattaaagacttaaatgtaagacctaaaaaccataaaaaccctagaagaaaacctaggcaataccattcaggacataggcatgggcaaggacttcatgtctaaaacaccaaaagcaatggcaacaaaagccaaaattgacaaatgggttctaattaaactaaagagcttctgcacagcaaaagaaactaccatcagagtgaacaggccacctacagaatgggagaacatttttgcagtctactcatctgacaaagggctaatatccagaatctacaatgaactcaaacaaatttacaagaaataaacaaccccatcaacaagtgggtgaaggatatgaacagacacttctcaaaagaagacatttatgcagccaacagacacgtgaaaaaatgctcatcatcactggccatcagagaaatgcaaatcaaaaccacaatgagataccatctcacaccagttagaatggtgatcattaaaaagtcaggaaaaaataggtgctggagaggatgtggagaaataggaaaactttcacactgttggtgggactgtaaactagtttcaaccattgtggaagtcagtgtggctattcctcagggatctagaactagaaataccatttgacccagcaatcccattactgggtatatacctaaaggattataaaacatgctgctataaagacacatgcacacatatgtttattgcagcactattcacgatagcaaagacttggaaccaagccaaatgtccaacaatgatagactggattaagaaaatgtgggacatatacaccatggaatactatgcagccataaaaaatgatgagttcatgtcctttgtagggacatggatgaagctggaaaccatcattctcagcaaactatcgcaaggacaaaaaaccaaacactgcatgttctcactcataggtgggaattgaacaatgagaacacatggacacaggaaggagaacatcacacaccagggcctgttgtgggaggaggggaggggggagggataacaataggaaatatacctaatgttaaatgacgagttaatgggtgcagcacaccaacatggcacatgtatacctatgtaacaaacctgcacgttgtgcacatgtaccctaaaactttaataaaaaaaattacaataaattattgttaactttaaaaaaaaaagaacttttaaatgtagattaataaatgttataaatgaatgtatataccttgattatggcaatttgagctattgtcaaaatatcacgcacatgaagactgttctaagtgactccaagcaaattcctatcagcatttgcctccagcagcaccattaggaagagtgtagtggtcatgctgcaaacagcatctactctccccaggaaaggttcctccccatgtcatggccgatttgtgtcttaagttctaaagtcagagtgtcaagccaaaaacccacacagaatggctttgaaaatccttcgattactcataaataactgtacatctcttgaaatgcccagagctagccctggccttgtcatgggaagacatgccctatatctttacacagctgtgcctgggaggtacttgagggacttgatgatttgtgacttgctttcgtccttaattttttgtgagtcttaattttatgagatgaaagcagactacaagccaagaaaactgatgagactgacataaagcttcccctgtaacccatccccattcgctggtcattctgacagatggccctgggaagcccacagccaccaagactctagtattctgtgaggtttaatagatagaagttatacacacttgttcatttttcctaaaatgttcttagattagaaacatgctaggttaccttctcctttctcctaccctggatttgaatacctgggaaaacatgttttcttctgcatttcaatgataactctcatgaattctttgtattggtgtttcccaaagtgtgacagtggactgctgctggtggaccagatgaatgtgggtggtgcacagctgaacattttttgatattgatagttatatttttgttttaatgtatattagaaaaaatttaacaagcataactatcctaatgcttcatggatataaatgcttagaattagtcaaaatgatgatattcaagatatttaggtgaaatgaaaagaagagatattaaaattagtaataaagttgatatatacatttggcaaaaatggtgaaagtggttgcctgcagacttgcaaatgggaaagtgtgtgctcaataaacagagccatgagacagtttcttaaatggcaaaggatgtggaaacttttggagacagttctataaaacaagagacagctcagcatgctccatatggaaagatttatttctcaggccctcgagtttccctcactggtaagtacagctgctggtgatactgagacagggtagggattattttactgttatcatgcagttctgtctcataaagaaatggtaggaatcattcaagtctttcacctttcgagttagagaaccacataatagtaactgaattccatcagtcagtcagtcaacaatcacttcaaagcacctctgagtgttaggcactgggccaggtgctgggattagaggggtgagaaggccatacattgcaagggtgtaagcctggaagtgacttatattagcattcctgaaagatcattctggatgtccctgtgactagacaggcagcaaaactagaatggaccagggaagagctgattgcaataagagatgatggcagcttgaaccgggatagtgatagtggcaatggggaggaacaggcagattcaaaagatatttcaggatagattcaatagactctggtgactggttagacatcgtgggtgagagaaagagaggaatcaccagaatgctagatttctggtttcagaagccccatggaaggtgataccaggtcctcagaattcacacaacatattgctggggatcacagccttgcactctagaagtattgcagtttgtggctggcatgtcagttcctcctcaagggtgcaagttgtgccttatccttttggtgtgaggtcaggcatgcaaaaggcctttgatcaatgttgactaaaagactagttgagaacttaaggtgtatgaacacatggggaattaactcatgatgtagagcagtccctctgccttattttaaattttattttaaaacagtcatattgaggctgagcgtggtggctcatacctgtaaacctagcactttgggaagctgaggtgggtggatcacctgaggtcaggagttcgagaccagcctggccaacatggtgaaaccccatctctactaaaaatacaaaaattagctgggcatagtggcgtgtgcctgtaatcccagctccttgggaggctgaggcaggagaatcgcttgaacccaggaggcggaggttgtattgagctgagatcgcaccattgcactccagcctgggcaacaagagcaagactctgtctaaaaaaaaaaaaagaaaatattgagaccagactcctgtaactctgccactcccaagatctgctcataaacacagcatagccctccctttctgcctcagagacataaggaaaggcagagctgagatcagatgagcagcccgaggtatgtttaaggatggtagagggagaccaaagccagtaatcacacacagacacatacatgctattaaaataaatatgatacacatatatgtacatataggtatagatataaatagatatgtaggtattgctatatctatagttttagtatatgtatatatacactcacacaatctttatacaaatatataagtgtctatatatctctctaaagctttagatagacacatacaagtatgcatatatagacatatatagatatctatagctatatgtgtgtatctaaagctatatctatatgtatctagacatctataggtatatatacatgtataaatacatatgtagatatctatatatctatagatatagagacagatataaatacatatatagaatctatacatacatttgtagatatctatatatgtatttatgtctatttatatctgtatatctatatatatctagacatctatagatataaatacagatagatataaatacatatatagatatctataaatgtggatatgtagatacagagagccagcacttttggctggctctgtgtgggaatcggtggcctctctctgagtggccccctgtgaggtgtcttcaagggatttttagggagtggacatgctcaggtgagattggagctctagaaagaaaacagatttgtgaagaagaccccctttggggattcccagaaatgaagggacactgaagatctacttgtatgtgggttgagtcttgtgaaataggatttcactggttcagaacaacattagagctgaagaccagagctgggaaattggccagctccaggtattagaaatccaataggctggaaagggcatacctataatgacagctctggatgaagtgttgtagggtgagaagaaaaaaaatgatcagcttcccttaatgcaccttttctccattgcaatttttagagattctatacttctgtggctagctgtatatatattctttctcctcaagtctttcggcactctgaatatgaatgaagatgcttcaccaaccagttcagatccacattcatttagtattgggatgtttgtattcttgcttttgtttccgaaaagcttatactatcacctctggccacatagtataaatcgtactgttttcccaacacccaactaagactctaagaggtttatacctgaataatttgctcagggccaggtaagtcctacacagcagattcagcctgagcctatctgactgtcaagtttattaatttcctgctatgcccacctgccatctgtcttttctgacttttttactatgaaaaacttctagacaagttcagagagttgatagctctcctgggcccctgccccttgaaaactctaggtgtctatgaacatgtttcaatctagtggatttcagcacaggcatgtctgactgagttcctgaaccttccactgagcaccctgatgtcttctcttccaaagaactcttaaagcattacattttttaccttttacctgaggggcttacactagtccaaggaaccagagaaatattaaagagggtgcatttgatagaacttagagtcataagccagaaaccttgccagaaagaaatctgtgatgcccaggaagggtttccaccctctgctgtgatgctgagacaggacaaaagtggggctgtgctagggggacagtgatcaggtgtgggccattgagcccgggccataccatgtcaggcccactcaggtagtacatatcctgctccttcctaatttccactttgtatttttaattttatttttattttttatttccataggtttttagggaacaggtggtgtttggttacatgaattaggtttttagtggtgatttctgagattttggtgcacctgtcacccgagcagtatacactgtaccccatgtgtagtcttttatccctcaccccaactcccacctttccttctgagtccccaaagtccactgtattattattatgcctttgcatcctcatagcttagctcccacttataagtcagaagatgtaatatatggtttttcattcctgagttacttcacttagaataatggtctccaattccatccaggttgctgtgaatgccgtttccaagagatacatgtgcaggtgtgttacaagggtatattttgtgatgctgaggtttgggtttctattgatcccatcacccagttagtaaacatagtacctgatgagaagttcttcaacccttgccccctccctcctatcccccttttggagtccccagtgtcccatcttcatgtccatacttaatatttagctcccacttactagtgacaacatgccatatttggttttctgattctgccttaatttgcttagaataatggcctccagctgcatccaggttgctgcaaaggaagtgatttaattccttttttatggctgaatagtattctgtggtgtttatgtaccacatttacttactttatccaatccaccactgatgggcacctagattgattgctattctttgctattgcctaatttccacactttgtgtgtcttgtgttcacctgctcctgcatatcataggctcctgtcttactaactcactcctgtaactcatagtacctggcagagtgctgtgagaaagtcagttctaagtcagtatttgttaaatgtatgaaataacccatgtatatgtctcaggcatagatatgccatcaggcattatttctacaattaattaggtccattctctggctttattggccattatacttgtgtcacttgttccaaggtaaaagtgtgtgcacaaaattaataagccaaaacaatcatagttttcaaaataatacagatgaaagtattgaaacatggaaaatagatttcataggcagatgatttggaacaatgcagtttgatttcattggcaccaaatggaaatatttaataatagaagtattagctgtgttgcttctcatggataacagtcttccttttagcatgccagttgtattggaaccatgtcatgcccgtcttttgagtatcttgtctataatgtattttgcaacaccatatatataatatcatgtaatactttgcaaatctcctttgtaactgggtctataatgtggaaaatacattaaataaaatatgcaagatatataatgcatgcacacatatatataattagaaattgcaaaaagtctattaaggagaaaattcaggtgctttgagagtcacagggggatttaatttgacctgatagacaagggaaggcctttcatggagaaatggaggtggccgaatggaatttagctgagttaatattggtacaaggagcttccatgaggagggatcatgagggaaggtctcaaagaagagaagaatttggcattttcaaagaaaagaaagaaggtgcatatggttaaagaatcagatgaacttggaggcatccaggccatgtgagttcctattacacccagagaaaaactagggtctgtgaaagcatgctaagcaggtgggtgaccccatcaaatttcattcaggaaaggtccttcttgccgtagtttagagaaggaaaatagaaggagagagggaagtttagtacccagcttagaaggaggctgttgtggcagagcttgcagtaagccgagactgcgccactgtactccagcctgggtgacagagcaagactctgtctcaaaaaaaaaggaggctgctgtggtggtccccagggcagtgaggtagtgttgaattagaggagtgacagcaatgatggattccagatatgttatatttaggggctagaatatgtagacctggatggactatggcaggtcaggggcataatcaagaaaacgtcctgtttctggcttgagcagatgagtggtggagggaccattaaccgagcctcagatgcctatattctcacttcaggaatctgtgattgagcaccttctcttcctgggagttttcatgttaaatgttgattatgctgccctgtaattataaagactaatacttactccagaaaattctgtatttgcagtattcgtcttctagcatttgcacttactttgaccactgttaagacacaaagttgttgagctgaatggaaaactgctgtggatgtgttcccttaagcagctaaattaaatgggacatgttgttgtgagggcttattttttttaagaggctgggtcttgctctgttgccctggctggggtgcagtggcacaatcatgggaccatagtcttgagctgctgggctcgggcaatcctcccacctcagcctccagagcagttatgactacaggtgttcactaccatgcccagctaagtgatcattgcatgtgtgtgatggcctcagcaaatgctggggggaaatgtctttacttggagaaataactgatattggtttagtctttggagaagtaacttatattggtttagtcatcagtgtcacttgaagacagaggcagcctcatttttgtcagaattctgtacaggctaatgcatccagccatggagaaagccgtttcaaaattctgatcagttgtcagaggaccattcatgtcctaggacttggccatcatcattctcctgtgagctacagagcaggctgtcctctgactttgcattagtttaaatatatgttaaaaaaaaaaaaccacacatggagaatcctttctaaaacaggcgatccaatgaggaagttatgggaggaaagggaatagaaacgccaacatacgtgaatgcttctggccttagctcaggtgtcctctcctcatcagtgtgcacagtcttgattcaaactccctccattcctcacagacattgtgatgagacaagattgacttaacctccatgaacctcagtttcttcttttgcatatgctggcattgtgtgccgagtatctaatgtggctcctggcccagagcagactacagtgggttctccagagaaacaaaaccactaggatgtgtgtatgtgtgtgcaagattgactgattttaaggagttggcttagatgattatgaaaactggcatatcaaaatctgccgaatggtcacaaggcttgagagctagggaagagttgcacttcagtccaaaggtgttctgctggcagaattccctcttcttcagggaggtcagtctttttcttaagtcctttgattggatgaggctcatccacattatgcagggtgatctgccttaatcaaagtctataggtttaaatgttaatcttgtctgaaaaacaccttgacaagaacacccagacctttctacccacatatctgggtactgtggcctagccaaattaacatacaaaattaaccatcacacagattatctaaaaatgcctttgcagacacaactggctgtcttttgctgagttcagtggccctcccagttcctctggggaagaccctggggtagagacttcatgcttcatagcacttgactcccatggttttgtcttttcttggctctgaacttctctgcacttagaatattatatggtacaaggtagcatttccatatatgtttatttaataaaggaccacataaattatgtaggatccatttaaacaagcaaaggacagaaatttcaataagctatgtatttatttattcagtatgaatttaaagcaatggataaatttagatataagcttcaggaaagacgtttaacatattttaaaatgaagcctgttaaactaatgctatccatttttttccaaaatggtattttctgtattaaactttagggtatttctctggcttagccaggctgtaagtccctgctttgtctcagtttcctctccagggaaacaggagagtgtggtagaaggaagagagtatattgcagtcactctgtgattccagaatcaagagccagctcagacacaggggtacatgaactggaagacacagccgagggagaacagcacttcagcaatattggtaattatagcaagaccctgcaggactccttacatcacagtctccacatggccactcgacctcaggaagcctgatggttcctgaaccagaaaatatgcttattccaatcagcccccaagagtgatattgctgaaagaacacgaagtcaaaagaatttcaggttctctgcagatttgcctcttgtcttctcatttccttgtgcccagacaggacctaggtagccttagggatgcagacactgcgtgatgtttccagcaggtgcaccactgagtccgtctgctccctgtgtgcttcctatttccttgttcaaagcttctcctgcctgcccttgctccaggcctgaggttgaggtgacaggacttactgtcacagaagccaagacaaatggatgggcaggggaggaagagaaatagcaacacagagtgttccctgctggagtgagacttccagcaaggttggggttgtgacagcagcagggagaacagaactgtatgggccaaatgtggagactgccagaccctgccattgctggcgccctctcctaggcacggtcaccacagtggagggatgacaaactgctacttctttttttttttttttttgagacggagtctcactctgtcacccaggctggagtgcagtggtgtgatctcggctccctgcaagctccgcctcccgggttcaagcgattctcctacctcagcctcccgagtagctgggactccaggcacctgccaccacacctggctaattttttgtatttttagtggagacggggtttcactgtgttagccaggatggtcttgatctcctgacctcatgatccgcccgcctcggcctcggcctcccaaagtgctgggattacaggtatgagccaccacgcctggccccaactgctactttttaatgtggaggctcaggacttcctgagcagccctgctgaaaagcaatctgagatgggcttcaagggcatacatgtcttctggataaacagggctgcctcctggaatcagaaacccctcaccttactggggatgctatgtgttagatagaggcttcatttcccagtggttccattaaatggtcactctgatgctattactaatgcaatgataaaacagtgattttatcccgtgactgtgatgtataggttctgtgaatgcatactttatttccactgcctccagcaattctacaaagtaggcgttattggcctcatattgcagacatggcaactgaggtcagcgagttgaaataacttgccaggtctttctgttgccaaagtctgtgctctccatgcaacattttctcagtaaagatgattttcctttctcctttaaggaatgatgagcctagggagaaaatgctgtcctgggaactcagaagaaaggacagtgaatgagagggtcctaggcagatggccagccattcaagggcaagccaaggtgggagctgtatatgcaggcagaatatccagggtgcctgagggaatggagccagaaagaatgcagcgagagggaatgcaacagcactgcttgttctgaagcacaaagccagcagatttctgggaatttgctagacagcaaggccaaggagaaagcattgccaagacttgaggagttagggtcaccaggaactcacggaaagctggcctctgagagtggcagctgaggggacagcagagcttcctgtgcctcccagtgcctggaagggaggagaaagagcagaggagccctggccaccccagatattctagtaggagacagccatagaggtgccgggtagcagtaaccatttctaaaccctacaggcctgtgaaatgagagttctttatagacctacttgcttccacttgattccaagagcagaacaggacagcccatcatgaaccagtgaggcttggtggcttcagaagtccatgtaaagatagatgctttaaaacagggttggttttagtcacacctcatggcccacctcattccaggtgcatttagaatgtttctacatgctctactatgctttgcattggttcttcagccagtatggttgctctaagctgccatacctcccctgcccctactacacatttaagggacctaaggatgtcagaaatctcttaggatgcctggtcctggttctggttctggacttcttgtgccatcctgctttcctttcactgtcatcttgctctgaatcttgcctctctctgcctcctgatgccaactttatctcattcttgctgtacttgaccttgaccctgctcttctgtctcagagttagttttatctgcatatatgtgaataacccatttctcttttacataaaaaaaatcagcagtgggtttaggactagtggggtggctcccccatgtcattgagaacccaagttcctgcatttctgatctacacagcctctcaaagacaaatcatagatcaagatggcaactagagctcgaaccagcatggacagagggcaagatgggggagaaaaggcagaatgacaaaatggtgaccctccttgctgaatgagctccctctaagcatcctatgccccacacatcacagccacttttatgtcataggccaggacctagtcacatggccacacctagctgcaagtggtgctgggaaacacagtcttcattctggaaagcaatacctagaaatcaagattctgtcattaaagaagaagggaggaagggtacttcccttccctctttctattccttctttccttcagtgacctaggctcaccgttaatcatggtttgggcgtttcttctgggttcagtatctcatactgccaagtatgaatgaaaactaatacacatctaaccttaacttagtaccaacatcatagccattctttgagcttctctgtcttcttctgcacactgttgctcaccactgtttgcccaaatccattgcattgatctagacacctgccttgttgtgattaagctcacacaaagcactacagcagctgaaggcaaacacagtttctgtcctgaatcctttctctcttttttttggtttaatgaaccaatttgacagatagatttagaataggaaagtaaagttcctggggcatataaaaagtaaacaatctctacttcaactttggaaattctttcaggcaataaaataataagtaaatacacaaaatgaaaaagctcaaaagctacagcctcaaggtaccctagttcagtgatttgcaatctaagtagaggaatccatttaaaaaaatctcaggctgatttccaatatgtaaaagatataaaatggtgttttagttccataaatttacttatacatcataatatatacttacttataaacactaccaattaaataaaatgaagctatattaataagtttaactatttgaaacccggatttacagatgtagtcttacaacaatgttaatacccagtttatttctatgtgcatttttttgtttgatttcataatatcatggaaatctggatatagacagataagtagttctttttacggtttatctcacagcttcagtcatgttcttcaatcaagtgtagatgacaagggcagctttcttctgaatccacctagtacagagtggtaaatgaccctggcagctccagataaccgactggtggcttcaaaatattaaaattcaatacatgatgtgtttaaatgtgcatgttgttttttatttcaacattataaatagttaagtatattaaaatggaattaaacccaacagttacagaacccctggaatactgaagtccatggagacatctccaagtgtaatagcttaggtttttgtctcaccaaagttgcctgtggtcgttaattttatgtgaacttgaccgggccccagggtgcccaagttaaatatgatttctgaatgtgcctgtgagggagttcctaagtcagattagcatttgaataggtggacttagtgaagcagatcattctccccgcttgtggatgggcatcatccaatccactgagggcctggatagagcaagaggtagaggaaggaagaatttgccaccttttaccctgcctcatagagtaagctagaacatctcatctcatcttttcctgcccttggattgggatttatgccattggcttccctggttctcaggccttaggactggaactgaattaccccactgacttccctggggttccagcttgcagacagcagatcatgggagttctcggcccccataattgcatgcgtctacatatatacacacacattctctctctcccctattggttcagtttctctggaaaaccacatcacacctgcattccactcctcttccttcactgccctgccagctcccctcaaggagtgtctggtctgcacttactgagggaggaattacactccctttttgcatttcttgccgacactgttgctatttgctgcaagctgcatttctatttttcagcctgtacagcttctctctggttaccccatgtccccctcctcacacctttctctattgtgtctttagtgagggaggtctgggtgagacaagcaggacatggggttaacagagcgaatcacgtttttgcacttccattattactctcgtgtcaatcctggagaagtaagaaccttaacagtaccttgcttctgtgatgtgcaggagaagcaagtgtgcagaatggtctctgctggaagaaggaaaccttttattcccgtggaaggaaagagatcatggaagtgtcttacaaagtgcagcacccagattttaggagcccaagctgtgcacatgctgtgctggttcagaagagaaggagtcttattcctgtctgaaactttcccctgagatcagaacatgtgtcttcatccagcagcaacatactggaaagagggaacctctgttgttttctgtggcatctcaccaactatgggaagtggtctgctgtggaaaagagaaattgggacttcaggatggggcttggattccagcccaggcttaaccactcattagctttgtgagcctgagttagtttcataacctctctgtgccttggtttcctgatacgtaaaatggagggatgatggctgcctgcctctaccacacatcatcactgtgcaactaaatggaatcagcatctgcaaaagttctttgtgcctgtggaggttgcacattgtcattttaggcagctcaggcatatctgagagccagtgagcagcttattaatttaaaacataaaggatgcttaatttctcacttctgttctcatcctgtctggttcatattctaaacacagctcctgttgtattgggtcccagtgccagcggcactaaaatctattgatgtaccataagcattaaatttattcataagcataactccattttcataaggaggaggaaacatctctcttagggcattttgtatacttgatgtttaggaggatatttataaggaggcatttttttgggtttgctttcctgtgaaactgtgatgatttaagattcttatttaattaaatgtgtattttgccatttctacccatataaacaaaattatgagtgatttgtaaacatttccagaattcccaagatcaaaatcttaaaaggctcctttggtataatttatttgaattttttccctgtgctaaataaatcttaagaaataataaggagaaataataagcaaaatgtgaaacagtttacacaatttacaaaataatggttttaagtttctttgactcccatctttcatattattttcctgcagacatccagacattcagcagaacatcccctgggatcttgggatgagaacaattacccccattagcattctgaggatgtcatggagcagtgggaagaacctgggccctgtacctgggacacttggacccacaccagagtccactactccctggacagtcatccctccactgtgcctcagtttcctcacatgtacaatgaggacaccaagccttacactcttcctgtacttcctattcctgccaccattgtggtctatggtagtttctatctctctggaaaggtcttacatgtcgagtcattttataatgaggctcaaaggctggtgacctgggaaacttgtcccagttacatacattttgttggatccatgtacatgttttgaatcaggaaaatttacataaaaatttaattgggagcttttattgagaaactagaggatttgcaatgctggccttacgttacagtttttgtctgggcttgagttacctctggcacttcattgggtcagaaggtctgggctctcctgctccccaacataccctggtctttcacactcatctcacctgtccagaccgtgtgcccaggggagtttggtgatcttttagcaaagtccattctatttgcttttcctagtggggcaaggcagttagtggaggtgtctctaagaatgagagatgacctcaacttttagtggatctgttttattaagcacaagttaagaagatgcctaccttccaaagttgcattttgttcttgctggttcctcatagaacagtgctgtgaggaatctcagagttctaattggcttatgtgattacatctggaagtaattaggttgggtctaaaaaatatggctgcaaggtgagtgagagttcagttatgaatttgttcaggtttgttgcaggcccctgtcctccacctgagagctccagggagcaagggccaagtggagagccagtcagagtactgcaaagacaagtgagagaagctttgatcagggttgagacatgaccctgagtcacacttcaggctcacctttcacagaggctacagtaacattccaagaacatctccctcacaatcatggattctgggaccagcagggtcatagcagggcaatgccagaggaggggagctctagggggccctgcattcccctctgcaagggagccagattctgcacaagggttgggtgccacaggctggcccagtggcatggcctggtaagctccttagccaggacagccaggcaggttgtcatcatctgctgttcctccctcagccctcagtgtgtatctgcagcagggacttctgtgcatgcttgcacttggcaattgatcttattttgtactctgtgtcttttaaagacattattatgataatactgttgataaaactgaacaacacctataacctaacatcatatctattttgaaatttagtaaataagaaagtttatctcacaaaccactcctaactgcagtccagtttctataacattccccacttcactgaaaccactcttcctagtggttttagtaactctagtgaacacattttggtcctcatattgcttgacctcttttggcattgggcaaaggtggccatgccctccttgaagaattcttgccacatcccccacaccctcctgatttcctcctactctgtctaccggcctcacaggtaagcaggtggcttggtcctagactcccttcttccttctgtcctcttctccttggataattgtgtccactcccatctctatgctggtgactactgcatttttatcttctgcccagcttctcctctgagcctccgacctgtgtttcctcttggctattccacatttctgctttgatattttagtaatggctgttggtgcctcatccagaaccccttcactgccaggtatgcctatcccccagttctgtgagtgtggggcagctgcgagcccttagcagccctttcaaccagtcgtcctccaccaaacaggatctgcctccttcaagccttttcccaatttggaggcaagatctctgccaatgaccagctgatgtaggatacaaaaagcccagccctcttacttcaggtgggataactctgtgctgtaatccatgctccagagttccccatggggtcagactgaagccgactgcagaccagaccacagccaagactgcagccttgctcagcgggttgtcctggcccagccctgtttttctcactgctccccacctgagggaattcctttcaacacagtctccatctcaggctctgcttattgaatctgatctaagtcagaggtcattgtcacagcttgaaattactgtatctcaaacttaatgtctcccaacccctcagtgtcttattaacgtacacaaagcatacgtgcagtcagttaaagtttgtgcggattacaagtcacagattgccatatatcatggctcagtcaggtttcctgtaaagagctggccagagttgctgggcagggccaggtgttaccttcttctccaggtgaggacatggaaattctgagaggatacatacaaagatcacactctaatgggttcttgaactccacatgcaattcccctcattgacataattacagagatctgatttctgtcttttggatttctggaatttctgacctctgtctttttgaatttactatttaaagccacttaacaaaatattggatacctatacatggaatataacattttaaaatttgaagagaactttaagcaaagccaaatgcaagtctcctgcactcccacttccttgcacatccaggaatgaagcaaacattactaatcaaacaaggcacctttcccagtgtatctagatgtgccctcagaattcttcttaatacagttctccaaatgaccactacaaaacgatgagtgtatgtttagatacaatgctggatagagatagaaactggaactctccataacccttgatcaggttcaatccctttactgaacgcatgagcagactgagttctcattaggtagggcttgctcaggatgaggcagcctgttagtagacaagtcagttctcaaacccaacccagctgacccctgattctgtattcttttgaacatctaattactcatatttgtatctctgtttgttttgcttgaatacctagcaccaacagaagtttttctgaaaaagatacataagggaactttgaacaatttcctaaattcatttaatcaggtagatttcctggaaaagagctgagagtctaaaataaataaagaaataatttacttctttttttttttttttttttttgtctgaaggtgagcagtattagacaaggaactgacttactccggaaattccagttgtacctaagatgtctaataaggccagactgtgagtttttggagaaagaatcaatttggttttcagtttagcaggttaaatgtatatttttaatgtgaaggctttccctcttttcactatttagcctaatgagtaatcagctttgtcttttgttaatttgtgactgggtgttactgtgcattttcattgtgaacaggcagaaatgaactaatttctcatgcaaaatgagagaattgagacctctatgaactttaaactagaagttttctcgtttccttatgaatgtatcaatcatagttcagcaagatgtacatgaattagtgttgcctgtccctcttttggaggcacctccttatttggctgccacattactgcattatcttggtctctgtctcaacactctgacagatttcttggtttcatcagtgcttttgtattcttttgctccctaactattggtaattttcactgcttatcttcaatatcttctctttgctcttttaccatcagaaattgactcacagtttcagctcccacttttacaaggatgatgccatgatataaatcgagtgcttgtctctctctctccagagctctatccagtctgctttcctgtctcccgctaaacatgttcactttgctttcagtgagtgagactaaatgcatggtttgctaccccagtcttcattctgactttcttcttcctctccacagtgtgttccccttatcatatgggttatgcagaccaaagacatgagtggtcttttggtccctcatttcctgtccctcatttcctgtatcccaggcttcacatcctctcaaatgtttcgtcaccatgtcactcatgcccacatcacccttcctgcttccactgccacctccctggtccagactttgccagcattggcccttgtccccttcctctcacagcttctacctttcccataggcccagtaattatagcaatccagggactccaaaaagaggttacttccataggcaatgcttctaacattatggacaatcaaatcaataaactagtcacaaaaaataagcatgagaaaaatactggaaagaaatgatcccaaataataatacacctcacctatctaacagcccataccagaaaccccacttccatccccagcttctcactacaatgagctccaacattctatgcagcagactacttaaaaacctctttttcattacttcctcttcagttcccttacctggtcttccctgatgctctcagcttttgtaaccatcattgttaccaaaagttttaactaatgtctctcctctgatcctgctagcaaccttctaatccattctcttgtgtcagaggtttctctttttaaagtagattgatagtttcattgcccatcattgccaatgaatttgtcttcttgtcccatttactttaaaaaatgttcattctttggggtggtgtgcaaggccccttaggaccaaccacaaacttaacctgctccccagcctttcctcactatttctgactccaactactgaaccaaccactcataccttctcaaacacaccacgttcagttatgtatctgtacctttgtacaaggtgtcttctctccctacaatatcctgctccattctcctgctagtgaactcctgcacatccttcctggcctagcacaagcagcgatgcttctgtaaactgcaccccacctccctgattgcccacctctgctgcctccttacatgcctattgacatgcctgtctcttgtacctcggactttgttctgtggctatgtttttaccattgtctactcccttaggctgtgaactgtgatttattttatgtccccagcacctggcagagagccaggcataaaataggagcttaaagtcttggatgaatgaatacatgaaagaatgaatgaatgttccaggaataagggaaacaattcaatcccccccccgcttttttttgttagacaacacataaaatgtgttttttttttaagtgtgaattaccattagcacaataccattaccattagcattgcaagtgattcaaattaatgagagatactctactttggaaagaaaactttttgggcattcaaatggacttagtgaacaaaattaatatctctgcaagatgataaggatatatgttttgaactgacatcttttaggattattttaaagttccttctgtatttgaatctacatttttaaaaataatttcagcttttattttagattcatgggatacaagcactggattgttacatgggtatattgcatgatgctgagatttgtgatacagataatccccatcactcagatagtgagcatagtacccatagatagtttttcagcccaaaactcctctctcttccacatctagtactccccagtgtctgttattcctgtctttatgctcaggtgtgctcaatgtttacctcccacttacaagtgacaacatgtggtatttggttttctgttcttgcattaagaattaatatgtgtttaataccaatttattcttaccaattattacttctagatgtgtgatagagtcaacaaatagttgcagctgtttaagttacttgattgtatttatttctagaaatagaattcatacatcattacttacacctttcgagttttgtgccttggtgttttctttggtccaacgccctggctgtttgacaaatcttaccagacagtgcttaaatttcgagtgaagatgaacattaaagacaggaacagacaagtgaccaacctgtgtgaagtagcacgtgttattttgggcctggtaactgtctatggactgaggagggctttactaggaaatcataaggttttccttgagctcaaacgtatgggtacagaatatcagttgcaaagatggtatatgcacccaggaagaactgtacgtgtagcaaatggcagactttatatgtaaggcatataatcacttttcttggcccccctgatttttctaatttataattttgatatttgtatcttgtattctcaaaactgttggcagtgtacctctccaacaccattgtagccaacacgttgatatcaagtgctaacatgaacaagcttcagttctggaagctgtgcaagtgaagggattccaccaggcccctggatgctcatcattccaatatggggtgtagccatgtatgagcatactctagaaagcaagcagagtaaagcatggaagcccctcttctctacctccacagatcttgtagggattaattctgccaaatgcctcacacatgctagcattccataaagataattcccattcctttttataaaagcatgactaaggcaaggaagcctttacccccctttgctctggtaagggagatgtcacagaaatgtaatattttaagatgcttttaaaaaacattctgtaggattttttgatagtttttgtacacaaatttaggaaaggtggttcactatacagtaataagggaatttccagttaggaggatcagctgtagatagacatcagaggggtagctggcttagcagctagagggcatcaccagtgagacttggcatctctccacaaactgacatttacctttacaaatattctcttctagatggattaatcaaatattaatagaattaaagtaggagttcacatacaatgcatgatgcattaaatgtcagaaaatgtgtgatgatctgagctgtagagatcctctgagcctgtgttcatcttagatgagtgacagaatgaagtctggaacatttctatcttgtttacaacaaccaagagcgtgatgacagtttcatttctcttgggagatagtttttttgctcaaggtcaaatctacatcagtgtgcccaacaacaggaagaaaattctctaggacaaaaatatctatttctgtgggcaccatgtgatacaggttttgaccaactctggaggagtgcttgtactcagccaaaggcttgaactttggaaatttatttgtatatattattagtatgtgaaggaggaatgaaacagctttaaattctgacatattgtacttatcttttattcagaaataagaatcctatcccttagtggcactgaagatgtgaaaaccacttgtcatcatatatgtctgaatattattttagctttcctatggtgcttagtttcaggtagattaaaagcagacacaaagcggaaagttttgccttatgcaagatccaaatttatagatgcaaaggaagaattgatcaaatgttcagttgttttgcctacatgttttttacagtgttagaagcctaaacaattaattgttaggaagttttaattttcatttgtccactgctcatgctttatcataatctcttgcccattggttgaacttgtatttgaggagaaaggacatgcacacccagccacatgattcaggccaatcctcctgtactagggacgaaggtggccattcctgtcctcctctttaaggagttcattgtcctatcaaaggcacataaggaaagtattaaaattcagtgtggtatgggctataatcgagttaagtacaaagcagtagctatgcatggcagaactagagacttggtagagaagatgacatttgaaatgtgagtcttcaaggaaaaagataaatttgtcagtaaggcagggagggaatggcacagcatgtggaggaaaggacacaggcatgcacagggatggagcactctttacagctcaagggatcagcacaaaggagtcatcatcaaatggctctgagtattcatggaggcattgtttttgacatttgttttgaggcagatctctctgctctggtcattgaaggcagcttggaatgctcgtgtgcaatgcaggtcggggatgtggagcgttcaagctaagccaatggcagagcaggagcagggaaggtgccattaagggtattttaatgcagaatgggtaggatttaatgcaagattaaagcctgaagtaaaagagagggaaaagtagagaatgactcttaggattccagagggatctttggatagaagttatgctctttaggaaaaaatacaggagtggaaataatacatgtattattagatattttgagtattttagacgttttgagtttgattccacataagatcgtgacctggaaaagagactggcagttacagatcctaggcaaaaattccaggcagtgacaattcctatgagaaaatgtgagactgaagacatgagaaccactggcacattaacagtagtttatgacacacatatggattacactcctcgatgggggaatatagaacaaggaaggaagtggtctaaggaaaaaactcttggaaagaaagaatgaaacatgaattaatctgaagagaaagccaggtggctttgagggagtcactggtgtcaggagaacagaatggtcacaagtgcagatgtcaaggaggccatgtggaatgtggactttaaaaaaatctggatttgacaatacgtgacttcagctctctgatgtgtcagtcagggttccatcaagaaaacagaaaccatctaaatatttcatacagagagtttttgatttgggaaactgcttacaagagtattagaagagttggaaaagcaacaggaaaaacataatgttacccagagatcagtaaccatgcaggctgccccagacttagggttggaagaggaggaaagagtgtttaagtaggatcccacaagcctgcactcactcgatgacatcactgctgctgctgccactcttactactgatgggacccccactgcaagaaggaaccaagccacattcacccacagtctcctgcctctgctggaatgtaaagccgaaaaatgacgtctcccttccacctccagtctcacacaaatgccttccattggcagagcctaaccaacaacagcaggcagaagaatctaggaaaggtggtttccaagcttccagccccctgtgctacacagaggagactatggaaatgggagtggaagaaagaggcttggtcccaacagttaatatctcagagaaggaactaaggcaactgtttttatatcctagatactgttctttctcctttttcaaaatgataatatgtagtgtgtgcccattttcacaggatgtaacagggtgtcatgggtttatcagtgattcatggattttgtgacttttttgatgattaataaagatttagggcacagttttctctaagattaatgtggcctatgtgagactaaacacaaagaagaaatgggctacacataagaaagtgggtggtggaggaagtagggtactcgctcttgtcaaggacatgtggaacctgactttatggaaaaggaagcttcctctacttgtatatgaaacattctctgtcagccacctttattctcatccctcacatctccacttttcttgggctactgctcaaatgaagtcattcatagctcttaaatgaaggatcctggtctgtcgtatgcactgtggctgatttgagaaggtgggaaataagattgacctttccacttaacagagttgtgaagatagtgattgtcaaatggtgttttgtggaggaggctgccctgagctaccatgagattagggaagcagacatagctggagatgattgggtggtgggaggtgcaggaggcgggatggtgctggagggcaggtgcagagagagatgggacagtcagcaacttcaggtagggatatctacttcacgtgtttccactggatctgatgagcctacagacttggaattgtgtctcctctgtaggctagatgctttttgtgggttttttttttttttacatgtccctggccaaagtctaggtttatgatgaagcactggtatgctgtggtataatacgagtgtacagtgtgatgatcccagctttctcgcagctgttctctcattgctcttttcaagaaaatacttgtaatgctcttaagataccctcactggttattagagagctttccacctgctcaaggtcaggagtggatgtgcctgatttcactctctggctattggccaaatattccagatgatccaatggagagatgggagccttttctgagcacctgctgtggagcagaatcttagctggtttgaactgaaataattccagacatttatggggcagcttttactttttggtgcctgctgcacaactctggtacattttcttatttatttctgcaacaagcatttcaggatgctgctgatatcccttctttgccaaaaaaagaaaccaaggtttagaagactgagtggctcatagctgtgaagaacagagctggagccctcagtctctcccaacatccatgttgactgagctactcgctgaacctgaggctagtgaggttcctgtagccttatcagacagcactcatgtgggatgagtggggcatggcgagtgctccaactgtccaggttctggattaaaatggtcccctccatttataactggtaaccacaaagcgtattgttgtgtgtcattaacatttggagggaatgtttaaatttgattttctttactcataaatctgtggtatcaagggctctgttagccttgacagatttttttttttataacaccgtcaggggcagcaaaatgattctgtctgaaagtacctaatgggagagtgatattacccatgacaaactaaacgcaaagtatacttttaaattatcatgaacactgttaatattgttatactctaaggtgggtttaccctttggagcccagctcttaaaagcatttgtaacattgctgtaagaagtattccatgaggtattgggggaacccgcccccaatatttcaatgtaggttctttctattttccctaagtgtcggctggtctgagaaataaagagaaagagtgcaaagagagaaattttacagctgggccacggagggtgtcatcacatattggtaggtccacgatgcctacctgagctgcaaaaccagcaagttttattaaggatttcaaaaggggagggggtgtacgaacagggagtaggtcacaaagatcacatgcttcaaagggcaaaagggagaacaaagatcacatgcttctgaggaaacagagcaagaacaaagcaaagatcacaaggcaaagagcaaaattagaattactgatgagggtctatgttcagctgtgcacgtattgtcttgataaacaccctaaacaacagaaaacaggattcgagagcagagaaccagtctgacctcaaatttaccagggtgtggtttttccccaccctagtaaacctgacggtaatgcaggagaccagagcgtatttcagtccttatctcagccgcataagatagacactcccagagtggccgtttatagacctccccccaggaatgcaattcttttcctagggtcttaatattatattccttgctaggaaaagaatttagtgatatctctcctacttgcacgtctgtttgtaggctctctgcaagaagaaaaatatggctctattttgtccgaccccgcaggcagtcagaccgtatggttgtctcccttgttccctaaaatcgctgttattctgttctttttcaaggtgcactgatttcatattgttcaaacacatgttttacaatcagatttcatgttgttcaaacacacatgttttacaatcaatttgtacacttaacccaatcatcacagggtcctgaggtgacatacatcctcagcttacaaaggtaacaggattaagaaattaaagtaagacaggcataagaaattataagagtattattagagaagtgataaatgtccatgaaatcttcacaatttatgtttcctctgccatggctccagccagtccctccattcagggtccccaacttactgcaacaatgagggatctgcttcctcacttcacattcactgttcagtctgcaacagtctggctcctgcctagcttccaccactgaaattgcctttctcagagttactgctgacccccatgcagccaaatccagtggatatatcactgtcctcacagcaaatagccatccactctccccttcttgaaacatcctccttgttcctcctcagtccttctgtctggcttcccctcttcagcctttttccctgagcttaaatgtttggggttttcttggcttgttcttaggccctcttttccccctggctgccccatccctctagggtggctcatccattcccctatgtgtaaagacgtttatgatgatgacttccaagctcacttagctggcccagcccttcctctgagctgctaaaacccacatccaggtgtcctcttggcattgctcttcagatgcctcacagatttcactaaaacttgctcctgcccaccctagtcttctctctttccatgaacagcttcactccccacgtagttacacaagccagaatctggtttgccctctctcctggccctcaacaggtgcaacagagatcagcccacttccctgcactctccaatgactcctgcccagcccaaacctcagtcactctcaccaagatgactgcagtgctccccatgcttcacacatgcaaggtcctctaagagtgggctttactgacagtggctgatagttccctgctcacatcctccataacttcccccttgcacttgtgctcctcctgtctccccccaatactaagctctttttctttgctacttgttctgtctgggatgctgtgtcttccattggactagctccttctcatcttcatgttttaactgaaatgccacttccccagagaagccctctcttgccaccaatctaaagtaggtcctgatgttatcttcagtctgagtatcctacttattcttatgagaatacctcataatttatagttactttgttttgtttaattatttatcatctgaattcctaccttaatgcacattttatgaagagaggggctatgtctttttttaaaaaaaatccttagcacctgtaataataggtgcctaataagtgtgaattgagagaatgattgacattctaagcaaagcccatggctatcaaggggtggcaagatgggcagggtcaagaggacacctggatgggggtttctgcagctcagaggaggggcgggaccagctaagtgagtttggaagtcaatttcacaaacatcttcacttacaggaatggatgagtcaccctagggggtcagggcaggaagcgggaaaaagagggccaagctcacagctatagatcaaaattaccctctctttggtaactgagttgaaggatagcaaacaagtgatgtacatgccatcacttcctgctacgcccatggcagacactgctacctcatcatgacacccaactccattgagcctgtgtgtgtcctctcaacacggaatgctttaccctctaacaacctgtcagagctggcgtggtgatagaccaagagaccatgaaatgttaataggcttttaagatgcctgttgtaagaccagaaggagactacaccagatgtaagaagatactgctaaagatcagactaagcatgttcaacatctttagggaaatgcaaataaaagccacagtgagctaacacttcacaccccctgttacccagtgctcaagcaacaaataagtcttgagcattattgcccagacgctattgcagaaaccttcttgacatatagccaaatatgttcaaatgttatagatacttggatcactgaatttctttctaatccaatggaaagactagtatttgcttttgtagctttgcacatttaaaacctctagcaaccctgtgaagtagaaattataagtgccactcagaaaaacagaggccccaaaaggttggggaactttttggtaagtgatgagcccagctatgaacactaacttctgatgttaaacccatcactctttcccatgtagctgaccatttgaagtcctggtctttcccaagatatttcaaagcaggtagcctgtcttgcatcattcttggttgatctgtaattaaccattataagtcatactatacaattctgcccaatgacttcttccatgagatactacagggcaatataatctaataagtgagagatggtctgaagaatggcaacccattcctccactgagcctgaaaaacacctcatttgcttggaataaatgctagagggcttggtacagttattactagataccagtgagctttaaaatgccattggaatttgcagtcctgtgtatcagcaaacaaaactcataaagctcaagttatcttatggatagagttcacagagctttatgatccccaaataattttctttttggatgttttatcctatttaatttagtatctctgagatatcgatataagccagtcaatttgaggctgttgttatactgttgagagatgtcagagctgtcaatgacttagcacatcttctgcctttaatctaagggactgaataacatcttccttccttggaaatatcacctctgttctgtctccctgttaacattttattcagccaagtgtatgtatatattttaccccatagaattattagctggtctgacatagttttcacttacaattctggattcagcctccctttattatacaataatcaggcaacaaataagtaccgggcacttctatgcagagcagtgagccctgctcatgtgttagaagatatgtaagccagctaaaggtgcccaagagctaaagctgcaaagattctggattgtcatgaacagatgtttatgatatattgttaagtaaaaaaagaagttgtaaaaacatacatagatttctaaatccagtagcagggtaagatgagctggtgagatgctttcttttactaaaaccaaacaaaaatactaataaaatgtagggtttaatataagaaagggaaaatatttgcaaattatgtatctgataagggacttgtatctagaatatataaaaaacccttacaacacaccagtaaaggacaaataatctaatatagaaatgggccacctggtcctggtggctcatgcctgtaatcccagtgctttgggaagctgaggtaggaagattacttgaagctaggaatttgagaccagcctgggcagcaaagcaagaccccgtctctacaaaaaaattatttaaaaaattagccaggtgtaacatgcctgtagtcccagctacttgggaggctgaggtgggaggatcacttgagcccaggagtccaaggctgcagtgagctatgatgccaccactgcattccagcatggatgacagagcaaaaccctgtctctacaagaaagaaaagaaaggaaagaaagagagagaaagaaagggagagagggagaggggaggggaggaagggaaggaagagaaagaagggaaagaaaggaaagaaagaaggaaatgggccaaaaatttgaataaacttttctccaaggagatgtacaaatggccaataaacacatgaaaagatgttcaacctcatcagtcattagggaagtgcaagtcaaaagcatgagataccacctcacaccccctaagatggctgtaattttttaaaatgcagacaattacaagtattggggaggatgtggagaaattcgaaccctcacatcttgctggtgggaatgtaaaatagtacagccatttagaaaacagtctggcagtttctcaaaaagttaaaaaaagtgttactatgtgacctaccaattctactcctataattaaaaatacacgtccacacaaaaacatgtacatgaatgtttatatcagcactcatcataataaccaaaaattagaaacaatgtaaatgtttatggtgaatgaatggataaataaaatggtatatccataaattgaatattatttagcagtaaaaaggaatgaaatgttgatgcatgctacaacatggataaacgttgaacacattatgcaaagtgaaagaagccagacacagaaggccacatatgatattacttcatttatataaaatgttcagaataggcaaactcatagaaacagaaagtagattagtggtttgcagaggctgagggcaggggagaatgcttcatgaatactgaatttctttttgatgcgatgaaaatgttacggagtaagacagtagtggtggttgcacaactttttgaatatactaaaaaccgctgaattgtatatacttaagaggagtgaatttactatgtgaattatatcttaattttttcaaagtctggggaggggagtaagaaaggaaaattcctagagggtatatcagtctatttggccgctataacaaaatatcatagactgggtggctaataaacaaaagaaatgtatttctcacagttttggagactgggaggtccaagataaagatgtcagctgatttggtgtctgtccgcttcctggttcatagataatgtcttctctctgtgtcctcacatcgtggaagggcaaggcggccctggagtcccatatataatggtactagtcccattcacgaggattttactcttaacacctaatcacctcctaaaaacatcacactgggggttagttttcaacctaagaattttcacaatcattcagaccacagcagggtaaaagtgaaagaaggaatttaaaaccagagtggtctgtctaatccagtgggaaacagggctctaggttctgatggctagaggctgcaatgctaatttctgaatggggcaggagatgtggccttgagcctttgcaagacaaggcagctgaaaatgagatgcctgcttagagtttggtcttgaagggctgtactcttagtgaaagagaacccagaaaaattttgcctactggcttagcggatctacaaaaaaagtttctttacctggaccattgggtgagagaaatgaagtctcccataagaaatcaaaacctctattcagagattcaacttcttcctggtttagtcttgggagggtgtatgtgtcgaggaatttatccatttcttctagattttctagtttatttgcgtagaggtgtttatagtattctctgatggtagtttgtatttctgtgggattggtggtgatatcccctttatcattttttattgcgtctatttgattcttctctcttttcttctttattagtcttgctagccgtctatcaattttgttgatcctttcaaaaaaccagctcctggattcattaattttttgaagggttttttgtgtctctatttccttcagttctgctctgattttagttatttcatgccttctgctagcttttgaatgtgtttgctcttgcttttctagttcttttaattgtgatgttagggtgtccattttggatctttcctgctttctcttgtgggcatttagtgctataaatttccctctacacactgctttgaatgtgtcccagagattctggtatgttgtgtctttgttctcgttggtttcaaagagcatctttatttctgtcttcatttcgttatgtacccagtagtcattcaggagcaggttgttcagtttccatgtagtagtcattcaggagcaggttgttcagtttccatgtagttgagcggttttgagtgagtttcttaatcctgagttctagtttgattgcactgtggtctgagagacagtttgttatactttctgttcttttacatttgctgaggagagctttacttccaactatgtggtcaatttttgaataggtgtggtgtggtgctgaaaaaaatgtatattctgttgatttggggtggagagttctgtagatgtctattaggtccacttggtgcaggctctgaaattgtggcaataatcaatagcttaccaaccaaaaagagtccaggacaaaatggattcacagccgaattctaccagaggtacaaggaggaactggtaccattccttctgaaactattccaatcagtagaaaaagagggaatcctccctaactcattttatgaggccagcatcatcctgataccaaacccgggcagagacacaaccaaaaaagaattttagaccaatatccttgatgaaaattgatgcaaaaatcctcaataaaatactggcaaactgaatccagcagcacatcaaaaagcttatccaccatgatcaagtaggcttcattcctgtgatgcaaggctggttcaatatatgcaaatcaataaatgtaatccagcatataaacagaaccaaagacaaaaaccacaggattatctcaatagatgcagaaaaggcctttgaaaaaattcaacaactcttcatgctgaaaactctcaataaattagatattgatgggacgtatctcaaaataataagagctatctatgacaaacccacagccaatatcatactgaatgggcaaaaactggaagcattccctctgaaaactggcataagacagggatgccctctctcaccactcctattcaacatagtgttggaagttctggccagggcaattagccaggagaaggaaataaagggtattcaattaggaaaagaggaagtcaaattgtccctgtttgcagacgacatgattgtatatctagaaaaccccattgtctcagcccaaaatctccttaagctgataagcaacttcagcaaagtgtcaggatacaaaatcaatgtacaaaaatcacaagcattcttatacaccaataacagacaaacagagacccaaatcatgagtgaactcccgttcacagttgtttcaaagagaataaaatacctaggaatccaactaacaacggacgtgaaggacctcttcaaggagaactacaaaccactgctcaatgaaataaaagaggatacaaagaaatggaagagcattccatgctcatgggtaggaagaatcaacatcataaaaatggccatactgcccaaggtaatttatagattcaatgccatccctatcaagctaccaatgactttcttcacagaattggaagaaaactactttaaagttcatatggaaccaaaaaagaggcggcattgccaagtcaatcctaagccaaaagaacaaagctggaggcatcacgctacctgacttcaaactatactacaaggctacagtaaccaaaacagcatggtactggtatcaaaacagagacatagatcaatggaacacaacagagccctcagaaataatgccacatatctacaactatctgatctttgacaaacctgagaaaaacaagcaatggggaaaggattccctatttaataaatggtgctgggaaaactggctagccatatgtagaaagctgaaactggatcctttccttacaccttatacaaaaattaattcaagatggattacagacttaaacgttagacctaaaaccataaaaaccctagaagaaaacctaggcattactattcaggacataggcatgggcaaggacttcatgtctaaaacaccaaaagcaatggcaacaaaagccaaaattgacaaatgggatctaatgaaactaaagagcttctgcacagcaaaagaaactaccatcagagtgaacaggccacctacaaaatgggagaaaatttttgcaacctactcatctgacaaagggctaatatccagaattttcagtgaactcaaacaaatttacaagaaaaaaacaaacaaccccatcaacaagtgggcgaaggatatgaacagacacttctcaaaagaagacatttatgcagccaaaagacacatgaaaaaatgctcatcatcactggccatcagagaaatgcaaatcaaaaccacaatgagataccatctcacaccagttagaatggcaatcattaaaaagtctggaaacaacaggtgctggagaggatgtggagaaataggaacacttttacactgttggtgggactgtaaactagttcaaccattgtggaagtgggtgtggtgattcctcagggatctagaactagaaataccatttgacccagccatcccattactgggtatatacccagaggattataaatcatgctgctataaagacacatgcacacgtatgtttgttgtggcactattcacaatagcaaagacttggaaccaacccaaatgtccaacaatgatagagtggattaagaaaatgtggcacatatacaccatggaatactatgcagccataaaaaaggatgagttcatgtcctttgtagggacatggatgaaattggaaatcatcattctcagtaaactatcgcacagacaaaaaaccaaacaccgcatgttctcactcataggtgggaattgaacaatgagaacacatggacacaggaaggggaacattacactctggggactgttatggggtggggggaggggggagggatagcattaggagatatacctaatgctaaatgacaagttaatgggtgcagcacaccagcatggcacatgtatacatatgtaacaaacctgcacattgtgcacatgtaccctaaaacttaaagtataataataaaattttaaaaattaaaaaaaagaaaaagaaatcaaaaccgcaaaaccccaagcctccaccacaacaaggtattgaaaactaaaattgtataagtcacgtagtaatggattccccaagatgagaaacagatgtgaagctgttctagaattgaggacttcttggtgatgactcatgaatgatttgcactgaaaaggtgcactgacataaaaagcagtcttgactggagattatcttaatcaaaatgacaaaccatgaaagcaaaggacctacctggaacaagagttaatagatgcaaccaatagacggatttgtgccgcctctaagaactgaatataagaatcaggaagggggcgtaaaagaagtatatttacaattatttttagaaaaaagtataggaaccaaggaatgaatggcaccaaggagaaaaggacaggcagacttaaatggaaacaaatcattagaacttctggaaatataaaaatcagtaaaatttctattaaaatccaggaagaggttataaaagaagtatatttaaaataatttttaaaagaaggtataggaaccaagaaatgaatggcacatgagtggaacaggcatatttaagtggaaacaaatcattagaacttctggaaatatgaaactcaatacaatttcaaaaggattaaatagtagagaaaatgcagatgaacaaagaattattaaaatggaaactagaactgaagtacttacccagaatgtatctcagaaatacaaagagatgaaacaaagagattaggagacatggaagaacagaaaagctttgagatataattggaattctaggaggagaaaatagagcaggagacaacattcaaaaatgtctagagaattctttagaattaatgaagttttaaaaatgacgaagagatccaagcaaaatgaatgcaaacaaatccacacttagttacttcatagtgaaactgaagaacactacagaaaatttaaaaattcttaaaactaaccagtgagagaagttagagtcttctacaaaggaagaattacactgacagacttcccattgcaacaactgataccaaaaaaaaaaaaaaaaaaaaaactttattcaaaatgagctgtcaacttggaattctgcagccttctaaactgtcattgaaatgtaagggttaaatagaggctgctagaatttaccttgatgaaagaattaccagaagaagtgaagcaataaagaaaattaacagaaggaaaatcagatgcaagaagcaataatgggcaacaaaattgttaaatgtgtataaatctctacaaaaatcaatttaaaatagcaagagttctgctattgatgattgctgagtaagcttctgttggaccaacactcctgcaaataaaaaatacgctttctgaaggaagtatatattgccttagaacaccccatttgcaaccagatgcacgagatgctggagaagcattgatacttagatgaaggaaatgacactagttgagtttcctatctttaggactttcattctcagggcaggccctagtcttcttcatgtggggtggctaaaacttcaatcaaacaatattaagcataatttttgcaattacaaaccaacattaaatcaatagccatgtagaacaccagaggaaattaaagtttgtattgttgatgacgagacatctgttaactttatacattagtccaaatatgcatgttaatatattaaagctaaccactaaaagaaatgaaacataaaatgcctaatcataatgaaaaaacacagagagcaaagaaaaccaatcaatctgatagaaagtaggaagaaacagaaaaggcatggtagatagaaaataaaacacagcatagtagaaaaaagtccaaatctattagtaatttcaatataaatgtatgtcttgctctcagtgaatctgcatttttgcataagataaaataatcatggagtacagaaagcagtcagctacacatttgtctcaggtgagccaagggatgacttttaattctgtcctttgtcccgtacctgtgaagataagatgttaatttacactgtcagggtaaaattgaatggaagtaaagggacttccttgtgagcaaattgcaagggagatatatagccttttatcttgtagctgtctatttaggaatagagggaggcaggtttgcatggcctagttcccagcttgtcttttccctttggcttagtgggtttggggtctggggactttatgttccttttacaacacatattgccccagatggtctccctcacaaatttctcacaaggaaattccctgtgagccactaaatctttcaggatacatatccccctataaactagtcctaaaactgagttctgttgactctcatctgacaatgtcaattaccagcttattgtcacaggtatgggacaatgacaagaccagaaatcatcctcctgcctaccctgagatggatgcagagctgacttttccctctgcaccctcttttcacatgtgaaatgtagatttgtgaatgctaatcagagcctcacaagaatgtaaccatttacatcattgcctaccccccttcctgttttctctctggctcacactttctcctttaaatactgaagttcccaaaccctctttggaaaaagcttaggtcacagatgctcccatgacttgtgtttttcctggaagtgtcctcaaccttggctaaataaacctctatccattgagacctgcctcaatcactttttggttagcatcttgttatcagtcggtagagaataaacattcttttcaaacacatatggggctttacacaaattggctaactatgaagctataatgaaagtctcaatgaataccaaggaatttatttgagacgctctgatcaaaatgttaaaaaaaaaagttaataacaaaagccacatatttggaaatttttaaacctgagaattataaaatatgtaagaataaatgacaataaaaaaatttcttatttaaaacctgcaaggtacaacaaaaatgatgtgttgagagagttttatagccttaaatgcatagattaggaaagagtaaatgttaaaagtgagtttactttaaaaaattttacttgttaaaaattagagaaaagaataaactcaaaccagtagaaagaagaaataataaagataagactggactttattgcaatggaggactaataaaccatgtagacaaccgtcaacctaactaaaagctagttatttttaaaattaatgaaataagtaaacctctgaacttactgaacaagggacaaataaacaatattctgaaagaaaagagggacataatgacagaggtagcagagatcttataatcatgagagaaatttgtgaaccactttatatcaacacacttgaaaacctaaacaaaaatagatcattttttaggtttcataattaaaatagtataaataatactatccttttaatttaaaaatatggggacaggggaaggagagagagggaacaaaggggcaggggagagaaagaaaggtaattctcatggtcttccttcttgcttacctgtgtcctgattcatttactcccatgccttgtgattcagacaaggtgactcctacatatgcagccattttttaccagttaggtcgcagctttggataattttcctctaaccagccatgaagggccctggaacaagagaagagaggggacatatgggaatctggataggcagagatggaacagcaacatgtccagtgacagggccaatgaaggaatcccaaaggtggtggctgagggctttaactgcagcatgcccacatgaaatggttttctgttcggcctggagctgggttcctcttccattaccttccactacccttaaaccattggtaataaacgtccatcacccaccacaccttagagtctgttgcttcaatgaactgaaaagaagggatttgtccatgcttgaggaaagttggggtggagaaagtctacctagtcacatagaccatgcctcaaacaatctattcaataaaaggttaacattaatgttgaaaacaatcttcatcagtgaataaatactttatcatgccttaaaaagtcttgtctaacttttaaaaagtcagaataggaggaagagatagcttgcaaaggaattggaaaagggctgagaaaacaagagtaacacgaggaagggaagagaatatttcaagaatgtaagaataatcaggtaagacaaggcctagaaagtccctttggatcttgcaacatgaagatcagtgggggatctcaagcagatattttgttttctttaagaaaaagaacaaaaggcccattggagtagatccaggagtgagtggaaataaagaacatatattgaccaccagggatggttctttcaggaattttaactagaagaggttacgactataagagagtggtaattagatgagaatatagtgttgaggaaagtttgtacttactgttttcccttttttttttttaggtagaaactatattagtttcctgaggctgctgtaacaaattatcacaaataggtggcttaaaacaataagaatgtattgtctccctcttctgtaggtcagaagtctacaatcaaggcgctggaagggccacactccctcccaagtctcttgggggagaatctgcccatgcctccttcctagcttttggtggctgctggcaaaccttggtgttacttggattgtagccacagcactccaatctctgcctttgtcttcacattgccttctctgtgtgtctcttaaaggacagttgtcattggatttagagctcactcatataatgcaggataactacatctcaaaattcttaatttataagaccccttttccaaataaggtaatagttacagattccagtgatttagggcatggacatatcatttaagagagccaaccttcttttgagaagtgtctgttcatttatgcagccaaaaaacacatgaagaaatgctcatcatcactggccatcagagaaatgcaaatcaaaaccactatgagatatcatctcacaccagttagaatggcaatcattaaaaagtcaggaaacaacaggtgctggagaggatgtggagaaataggaacacttttacactgttggtgggactgtaaactagttcaaccattgtggaagtcagtgtggcgattcctcagggatctagaactagaaataccatttgacccagccatcccattactgggtatatacccaaatgagtataaatcatgctgctataaagacacatgcacacgtatgtttattgcggcactattcacaatagcaaagacttggaaccaacccaaatgtccaacaatgatagactggattaagaaaatgtggcacatatacaacatggaatactatgcagccataaaaaatgatgagttcatatcctttgtagggacatggatgaaattggaaaccatcattctcagtaaactatcgcaagaacaaaaaaccaaacaccgcatattctcactcataggtgggaagtgaacaatgagatcacatggacacaggaaggggggaatatcacactctggggactgtggtggggtcgggggaggggggagggatagcattgggagatatacctaatgctagatgacacattagtgggtgcagcgcaccagcatggcacatgtatacatatgtaactaacctgcacaatgtgcacatgtaccctaaaacttagagtataataaaaaaaaaaaagaaaaaaaaaaagaaaatattaccagcagaaaaaaaaaaaaaaaaaaaatcaaagcaatggcttgcaactctgagtaaaacaggaatccctgcatccatattgataaacaagtgaataaataaatggtgagaaaggatgtttttctttgtatgtagaatgtcaaccaataaatgtagaaggcattatggagttaggaaatcatgttggtcaatcatgacagtaataactgggacaagactaatcaactgatactatataactggtgaatgaggaacaaaatactcatatagtctcaaagtatctccccacaaattacttgtaaattacaaagaggaaatcgtaaatttaaaatgaaatctggcagacaccaacctaagcggtgaacagagttaacaacattaatgggaccaactgacattatatgctgattacgacgcactgacgacacactgcttctgtgatattcccacccagaatgtaaaaccctcacctagtcatgcggaaccatcacacaaatccaaactgaggaacattcgacaaaatagcctgtattcttcaaaaatgtcatggtaatgaaagacaaaagaaagttgaggaatctgcagtattgagagacacacgtttacaaatgtaacacgatcctgcacaaggtaaaagaatggctacaaaggacattattgggataaatggcaaaatttaaatatgaatcatgggttagataacagtattaaatcactgttaaacttcctgattttgataataatacttaaaaaaatactgaataatgcttaaagtaattctcttcttctcttagaagagaatgtcctgttcttagggaaatgcatactgttttgggcataatggggtatctgtgcaaattattctcaaatgattaagaaaatgcaacatgaaatatagataaggcaaatgggataaaatgtaaacactcagtaaatctggataaaagatatataggagttctttgtgatattcctgcaacttttctgtaaatctgaaattgtattcaaaattttaaagttaccaataaaacaaaacaaacaacccctgaccaagaatccaacaacaagggatgaatcaaaattatggtacagtcaccctatggatgccttcaaattacacagctttacagatcaactttgtgaagatatataacaatatagtaaaatgcttataacatgtacaatgttgaatgataaaagcaggatacaaaatactttatgtgtatattataacaactatgtaaaagcaagcatataataaagactggaaggataaaaaaaaaaaaaaaaaaaaagagagccaaccttcaacccactacaggggctaattgactatgtatataaactgatggggtggtctaggccttctcaagcaagacataaagtccaatgtccatgaaagaaaagcctgacagatttaactgcagaaaaattaagcatttctaaatgagaataaacaccataaacataaaaagacaagggcagaacgggagaatatatttgccacatccatcttaaatatatctagttttaactgcataatcacaactgggtataaaaaatagtaatagtagtaaagagtagtaaatagtcatagtaaaaataaaaatagtagtaaagataaaaagtaaaaaaagtaataaagtaaaatagtagtaaaacaatagtagtagtaaatagtagtaaaatactatcaagtattatcatagtagaatgctgtagtaaaatttagtatagacgctccttgatttacagtgggattgcgtcctagtaaacccatcataagttgaaactgtcataagttgaaaatgcacttaataaacctaacctactgaacatcacagcttagcccagccaacttaaacatgcccagaacacttacattagcctgcagctgggcaaagtcatctgacaacatagtaaaacatagtccaccatagaatatctccctcatgacctcatggctgactgggagctgtggctcactgctgctatgctcagcatcatgatagagtattgtatcactttctggtgctttttaatgaatccatgtagtttctgcatcatcaaaaagttgaaaaatcataagttgaaccattataagtgggggactgtgtttttctattataatgatagtgtgcaacagtaggaaaatagtaaaagtagtagtctagtaatatagtactaaaatagtaaaaattatagtctagtaatatagtatagtaatagtaaaatagtagtaaaaataataatttttctactgttctttggggacccccattttcgtagcaggaaaaacaactcaaacctgctgattcagggtaattttttttctttttttttccccaggttactcaacctgttggcagtgtatttttcttctcactgagcacagagagaagtgtatgcaccgttatgttttgcattagtgtggctggctgtgtgcccagtgaccaggagctttttaaaagaacagaattgttcttttatccaactatgaatcaccagtgcctcgatctgcccatcacccatagaatccttattaactcatatagatttgaaagcttttaaaaatccttgagtacttcagtttccagggatgttaaataaagccaggactgcatttatcatattcccagctgggctgtgtgaggattaatgttttatcataagtgatctcctgctcctttaaaaaggcattaattaagttaaaggttttatttttcaaggatatgcttattagttttttaataacttgtatctcaatgtagtctctgaaatggaagtgataatgttttcatgctttctcatagaaaatctgacatacaggagtacacaaaactaatctacgattaatgttcttctctggacataatgttgagcagttgatctttctgagttctcttgttctccaggaaggtcctacatggtagcttggcctaagggagggacagggtgcatgctttggggagacaccccctgacctgatgttgtgtttctctcctcctcccatttcccctaccttggtttcccagtgagctgaagcagaagctggatgaggaaggcagcaagtgcagcatcctctcgaagcaccagcagtttgtggagcactgctgcatgcgctgctgctcgcccttcaccttcctcgtcaacaccaagcgccagtgtggagattgcaaattcaatgtctgcaagagctgctgctcctaccagaagcacgaaaaggcctgggtctgctgcgtctgccagcaagcgaggtgagtggctggtgcattcccagggtctacactgttgatttagagagattcacctgccacttccttcagtcaggtagaaccagctatgattggtagatcaacacagagtattgaccaaagtaaatagcttgctgaagagagatgcatggataaggaaacctgttgatctttatagggaggatgagagagggccccccaggagcacctgggtgtgaatagaaagggctttcttgggattgaagatgcagctcctacatatgttattcatctttttggaatttctcatctggtctcatcctttcgttcgttcattgcataagcatgtgttggattcttaggaattatgctgggtgcaggaaacatgatggtgaattaggccaattatgagtgactcagaggcatagcggatggtgtgatacgtaagtgctgggccttcatatgtggagatacatgccctgactagtttgtctattggctatgagggcactgagcaaggagagactggccctagggcttggagaaagcttcatagaggacaagaaataaaagcaagattgtgaaagacaaaaaagagtcaatgctgtgaaaggggagatgaagacaactttgcgagggaaataacaagcatggcatttcacattctccctcagcgaccagcagagcacttctttgatctgttgagtatttggaaactgatgagtatgataaaccagtgtttggtatttgtctgtgctgatcctagcatctgtagtgtgcattgtgattcgtatttgctgcatgcttccaaaatgcctgttaatgagtgaagcagagatgagcaggtcctgggagcacacactcagaagcccctgcctcccacaccttttccttctttcctcctttctcctctccctgccctgtttactcgcttgtatcctttaatgcatcaagacctagaattttcccatagagctagttaatggggacagctgccaagtttccttggggtctccaaggaatcaggctctgggctacaaaatatatatattcatattcattccagagacacaaactgaaacaaaaagtggtatgttaagcacccagtatccaaggctgggtgctacgcaggtcctgtgcctgacttggtcagagcaaggagcccatctgggtctccacatggcagcttgaaagggggaggaaaagccctgcaacaacaaagggaaggaggaaactgggattatagatgagcgtgcatctgggagtgatcaacagagagaggttcatccatgccttctatttctcagtcaaggtggggtaagccaaattcatcatgtaacacgtttaaggattacgtgacttgaatattgtggcactgagaacaagacagttggatgttggaagaaataagagtagatctaaataggcattacaggagtttgggatgcacacattcaagccaagttcctgtaacaaattatgaatctgttttctttcaatcttcccacagattgggagtttcgtggggcttgggacaggtcagagggtaactgagttaaggatattggacagtgaagaatgtaaagacagaatctggatagtaaggaaaaacagaaaggggctatggatggatggggagaaaatgaaggggtcagtcagccagaagtagtatctggtaaagtcaaagaactgtcacagtgggagtacttgatagagaaaattggaaaaaatgaaaattctatatagagaaaaagatgaatttgtgatttctaaagtagatcagttgagtggtgaccatgggaagaggagacaatgtctagaagaagaagttaagggaccaaaataccagtgcccatatgattggaaaaaatcaggatagtggccacagtatggaggtgaagaattgagccaggtgacaagtttttctgaaatgagaagaaggaactagaaggtcaggatgtgagagacataaggagttggagaagatgagatgactgcatgttatgattctgcacctaccaagttgggcaagtcccatgtagcatttgactcaaacatctgccatggctgcatgcgctacactgacgtttgttaccaactggtggtaaacaccgccaggacagggacactgtcttcttcatttgtagcaccagagcctgacacatagaaagcacatgaatctttgtgacccaaatagaacaggacgatgtttatagcagccagatgcatagtacagaatgagcctttaggaattttagaggaaaggactcagagactgttagatgtcctaaaggggtttcatggaaaaggagggcatcctagatggaactcagttggagaggaggaatcaggagacactctcagacaatgtgtggcatgagcaaacaaagcagagtcacccaaggtgtgtggagggtctgaagcagaccgctattgaagcgggatgatggcaagtgattgggtcagtttgtgtgaagaattggcgtttgatctttaagggatggcgaaatcactggaatgtcaaaccctagccgttattaaagtatactatactgtgcttcagcatattcccccacaaataaaaggaagtatcagtacctacatgatttcatttctttcaatatttacctagtcctcttctccccgagtaagaaaagtcaccaaatttactaaacagttagtagcaatagagtgcagtcacagcctgtcaaccccacatttaccatgagttgtatgcaggcatctattattagttacaattaaatgacacattgcattaatcaaataccagtagtgctgagtagttgatgcaccacctcagaatcccatcacctataaatggaagaaccttgcctcgcaaaagcaagatcttctgatgccaaccatttgctatttctcttgtacaatgttgtctcaataatttgtcagatattggaaaaataagttgtaaaaaaggcagcaatggctgccaagactatattttaaattttcatttcatatttctagcaacttaatgaggaggcaggaggcttaggtagtcccatttcacttaatcttgcatcatgttcgtgttaatattgcatgacagctcctgagtctcagaagctgagcattagaaaataaagaaccattcatagaaggatacctggaaagacatgcaacagccagtgtacccttgttccatttttattttaagaaagtggagggttactgaggagtcttccacattcaatgtgtctagctcaaacagaacacacccacacttgtttaatcaaagctggcagaaaggggatgctgaggagaaattggaaatgttgctgctttaatcttgtattatgtcttgagattattattggctgaaacccaaagggatggagaaattttgttcattccctatttttctgtattgctcaattcaatcacaggaacctgtctaggaaagaaatccatgaaatatgtggcatatttttgcatcctgaaatgtctctaaggccctgtttgacagagaagtatgtctttcaaagtaccacggatgtatggcctgtgagcggacagtcttttatgttgtacctggatcacattcttgttttttgaaggatgccttagaagagttaattttatttatatatcaacaaactgtgtaacccatcaacattacacaagtgctagagccaaattcatcatgtaacacatttaaggattacgtgacttgaatattgtggcagtatggacactcagggctgcttgtccactttgtccagtagctcctctgcccttcattcaatctgaaactcccttcttggttagaactgatttactttagacactactctttggaacattcttctagaattttcatcttcaagcaagtgggtttttaaaacattgtatgtcagattctatgaagagcacattttgtgtttgtatatgaaatctcaatagttgatagtaggtctatgaggttacacagatgaccacttttgtgaggccactttcagacccatattcactccccactacccatgagatgcattcctttccttatttaaatgaaaccatttttgctacattggtttaatttctagctatttatccagtggctacaatatgcatatgtttttgagatactgtgggctatgaataattataataataaaaattcttgtccacaaaaaaggagtaggaattaaaggtagacattcatcctacaatatgaatagcctcagaagtaataactgtatcaaatacctggggctgtctattgtacagctgtaaatgagagagtcggattagaaacatggcattcatcaggagaggacccagacagtgtcaagtctctaagaaaaacgtggtaacctataactttaactttcttcttttcatctcagtgaaaaacaatccatatttttttctgtttgattatttagttcagtaaaagcattttgagaattttaaagttgtaattgtaatcatttggttctttgttagtaattttgcttcatatattttgcattaaaatgtatttctgttatcagtgttcatctaaaatttttagctttgggagattaaaaaattaaatgtattatagaatgaatgatgaattacttattttggaagttctatagaaaatgggatactactgaatcatccctttgtcattttttcattatatatagatttatcttcttgacaatttattgtatgcattcattcaaacattatgaataaagacatatagtacttgtatttaaggtcttcttcaggaagcaaaacttttcagagtgagcccagaccatacatatcagtcataatcattttgggcctaattggtttgggaacaacattcctactttccttggaaacaaattagctttctagctctttgcttcattataaaaattgttcactctaatttttgtcattttgtacgtcataggcatatctcattttattgtactttactgtgcttcacagatattacattttttacaaattgaaggtttgtggcaaccctgcattgagcaagtctgtcgaggccactttttccgatagcataggctcacttcatgtctctatgtcacgttttggtaattctcacaatacttcagacttttccattatatatcaaactttctcattattattgttatggtcatctgtaatcagtgatctttgatgttactattataattgtttgggggcacaacaaaccacacccatataagacaggacaaacttaatctatcagtattgtgtgtgttctgactgctccactgactggtggttctcgcatctctctccctctccccaggcctccttattccctgagacacaacaatattaaattcagtcaactaatggccctataatggcctctaagtgttcaaaaaaaaaaagggaaaagttacacatctctcactttaaatcaaagttagaaatgattagtgaggaaggcatattgagaaccaagataggccaaaagctaagtttcttgagccagacaattagccaggttgtgaatgcaaaggaaaagctcttgaaggaagttaaaagtgctactccagtgaacacatgaatgataaaatggaatagccttattgctgatggggagaaagtttgtgaggtctggatagaaggtcaaacctgccacaacattcccttaagccaaagccatattcagagcaaggccctattcttcttctattctgtgaagactgagagaggtgaggaagctgcagtggaaaagtttgaagctagcagaggttggttcatgaggtttaaggaaagaagccatctctataacataaaagtgcaaggtgaagcagcaagtgctgatggaggagctgcaggttatccagaagatctagctaagatcattgatgaaggtggctactctaaacaatagatttcatcaatgttgacaaaacagccttttactggaagaagaggccatctacaactttcataactaaaaagaagtcaatacctggcttcaaagaacaggctgtcttgttaggggctgatgtagctggtgacttccagtcgaagccagtgctcattttagcactccaaatatcctaggtcccttaaaaggtatgctaaatttactctgcctgtgctctataaataaaacaacaaagcctgaatgatagtgcatatgtttacagcatggtttactgaatattttaagcccacttttgagacctactgctcagaaaaaaaaaaagattcctttcaaaatattattgctcattggcaatgcatctgatcacctgggagctctgatgaaaatatacaaggagatgaacgttgttttcatgcctgctaacataatatccactctacagcccaagatcaagcagtaattttgacttttaagtcttatttcagaaatacatttcataacactataacagccacagatgattcttctgatagatcttggcaaagtaaattgaaaacaaaccttttggaaaggattcaccattctagatgtcataaagagcatttgtgatttgtgagaagaggtaaaaatattaacaggcgtttggaaaaagttgattccagcccacactgatgactttgagggattcagaacttcagtggaggaagtaactgcagatgtgatagaaatagcaagagaactagaattagaagtggagcctgacagtgtactgaattgctgcaatctcatgagaaaacttggacaggtgaagagttgcctgttacgaatgagcaaagaaaatggttttttgaaatggaatctactcctggtgaagatactatgaacattgttgaaatgacaaaaaaatgatttagaatagttcataaacttagttgataaagcagtagccagggtttgagaggattgacttcaactttgaaaaatgtttactgtaagtaaaatgctatcaaatagcatcacgtgctacagagaactctttcatgaaaggaagatcattcaacatggcagacttcataattgtcttattttaagaaactgccaaagccaccccaaacctcagcatccaccaccctgatcagttagcaaccatcgacatcaagaccctcaaccaacaaacagattacaacttactgaaggcccagattatttttagtgtttctttagcaataatgtattttaattagctgtgtacatttttggggcacaatgctgttgcacagttaaaagactacagaatgttgtaaacataaattttatgtgcacaacatttaatagactacagtatagtctatctaacttttatatgcactgggaaacaaaaaatttgtgtgactcacttttttgtgatattcgctttattgtggtggtctggaactgaacccacaatatgcccaaggtgtgcctacattacctttaacacagaacaatttggaaaattgttttcagtgaatgggagaaaaattattcttggaactgaaatcaaaacacagctcattaagcttgtggcatttgctttggtttttctaagaaaacttaaggcttcttttctttttccttggaattgagtattatttacttctatctagtcacttattacttggtattcacacagcccacatacctcataaattgcatcttgtccttttggaataaactccacagtatgttttatttatttatttatttttattgatatatcttagttgtatgtattttgagggtatgtgtgacattttgatacctgtatataatgtgtcgtgatcaaatcagggtaactggaatatccatcacctgaaacatttatcttttctttgtgttgaaaatgttacaattcttttcttccagctattttgaaatatacaataaattgttgttaactgtaatttccctactatactattgaatactataactttttccttccatttaactgtatttttgtaccctttaaccaacttctcttcatcccttcctcctcacttcctttcccagcccctggtaaccaccgaaattctactctctacctccatgaggtccacttttttagcgcccacatatgaatgagaacatgtaatatttgtctttctgtgcctggattatttcacttaatataatgacctccagtttcatccatgttgctgccggtgacagggttttattccacagtatgctttagagatactccaatgtatttgtaatatcctttgaaaaatacattaaacaattatcaccgtgggctaagaatatgcacaagttaacaaatatatggggaaatattgaacctcattagaaatcaagggaatagaggtttatgcttcaagtagttttttaaattaaattagtggcactcttttccattgctggggaagtataaatgggcacaacattttaccatcatgtatcaagagcctttagcatatccaagcactctttttcccagtaatttcatgtttgaaaacctacaactgatgatgtaagataattttttaaatgctgtacaaaaatgagttatactgaattatttgtaatataaagaatattcataatctaaatgctcaacaataaaatggtagaagtaagttaggacacattcaacgtgacacaatatgataaatcctttaaaataatgtacatgttttgttagtatgggtaaactcttatattaaaatgttagattgaaaactgcaatgcaaaatgtacatataatcactatgtaataaggaaaacatagaaaaatagaaaaggaaatatacaatcaatgatattaggagtaatcattctttaggagctaggcttgtggattattttcttcttacctctattttccatttagtttccaagttttccacattttgcatgcatgcttttataaccaggaataaataaacataaagaaatgtaggacttgctcccttctctcttccccattccaaaatcctctcctttatcagcctagtgttgcccttccccccatccctgccccactttaagccacagggctgataccacctggcttcccagggataatggagccactgaaggggacatgtattttgaagtcccaattaatgggcaatttaggttaagatactgccctgtctaaatcagatctctgcagagactgtaaccacagagctcaatctgaatcattgtcaaagtgaccctaagtgaccatgaggtggataggaattctttaaaatttaaattgccaccagtgaaagctaaacatattttccattcactagttctttaatatcaatagattaaagaacaaataaatgtatcaagaggacttgctatgggtatgggattgaatttgtcttttcagatgagttgtttcatttaatccttacaagaactctgtgaagggcaagtgataaaccacgtgtagggccagggaagtctgaaacttggaatgattatgtggttgtctcaaggtcaccttgttagtcccaagttcaggagtctccttacaatatcctcaggaaaacagcctgagcctctgggtcccctgccttcaactgctcaacaggcttccttactcaaccaggccctgcaccctagtttaagtctttagaggaatagccagcctgtgctccctcacctcaaaagaatggtggtgatttctgcttcctcttgaaggcacttgtgtctacaaggcacttaactgcacacttggatttcctgagcagctgtagtagtgagaacagacctgaacaggggagtaaccatcagggaacacagccccaacacagcatagtggcctcacagcccatgggtatagcattggcactcccgctaactgttttgtcactctggctgccttaagttcatcttacctgaggcctttcagctctaacatttatcctatctggaccacagaggatgagttggtggtatccactgaatgattgaatccttagaagtctgtgttcttagtgaaagtatataccatgaccttgcacatgaggtgcatgaattaaatctttaagttattttggaaactcattggcctcccaattcatcttttaataggatttaaaagaggaagaaaaatgaagctttaccttggtatacaaagtttgacaggctttttattaaatctgtaatgtccacaatatctgagcatttaggatacatttatagcctgatcaccataggtttttattaacatgagtttgtttgcataagggactatgatggttaattttatgtgtcaacttggctaggtcatatcacctaggtattgagtcaaatactagtctggatgttgcagtgaaaatattttttagataaattaatttaaatcaatagactttgagtaaagcaaattgcccttcacaatgtgggtgagccttatccaatccactaaaggccttaagagaaaaaagactgaccttcccaaagatgagggaattcttccagcagtctgccttcaaactcaagctgcaacatccactcttccctgggtctccagcctgccatccaccctacaaagtgtggacttgctggcctccacaatctcataagcctattccttaaaataaatgtctctctctggcactttagctagatgttagctagaatgaagggggagtggatgccttggcaaccgtcatcgtctgccgcaaggcatattttcaaattactggagattttagcaactgaaaaaacatcacactggctaatagcatagttcttattaactcactatagattcatggaccaaggaacactactgagagggccacattttttggccttggagcaattagggtaataagaaatcatgggttcttaagctctgttttcttttaacagtcaccagcctagcagatgtcatcactgactctgcttatttacatggtagggaaaaaatgacaaatatttaactgctttacactctggtatttaggtttgtacccagtcttgaggcctttaggcatttccttagcaccacctttttatcatataatcaatcaagtacatacccaccaatcacaccagtgtttgatatatcttagtggcattacaatgaaaactacttctgaaaatataataagctgcagtattagatatgctacaaatgtgctttaaggtttttgggaaaaaataaaatgggaaagtttatcttttgttcaagtgccagtataaaaaggctatcaaatagaaaacaaactgccatcataggtaatgctcctcatttagcccctaattgataacacctttaaattaggggagaaaaatcaatagaaaatgctctttaaaattgaggcaacagttgaacagcttgtcatgagttgaggcgggagaaaagccaaaaacataaaaagcacctgtgactcagatgtttgatgacttctggaggaagaatatgcccacctctctggtttgcttctcatcactcagccataccataccaaggacatgaacaggccttacaacagataatccccattgtaatcatttttcatctgtccatagcactttactgttttcatatgttttggttgaggagttacatccaggccaaacaaaccttgttacaatgtcttttactaaggaacatagctcctctactctggccagtcttggaccaggatctagacagcaagggtaagctgagagccccacaatagattccaattttaacacgagctggaggttttctttaactagataatacagaaataagagaattaatcgaaaatgactaaatccatgccatgaactaaaccatatatgattattagcattcacataaacatcattgtaattcaacaaatattaattagtgtacagaggggttttgatgttaacatctaattcttccccactaaggaagtggtaaaagcttagccagcacgtgtgacaggcatccctggctctttagcgagcttgtgtggttctttgaagatcatcagcttgctttgggaaccatgcctgggcattctttccgttccttgggatgtaattaaatatgaagctagttagggcaaggggatacttcccttgccaccaccacacatatcttgtgattcaattgcctcctagcagtgtttattctacagcttccaacttcactatcagttttcctgattgagaacatgggagaacttatcaggttggttttcagctaagtacttgctgattttagacctttggcctcaagctggaggcctgcatcccacttcttgacaaccctaagcacagcaagtatactcttagagtctcttctcagagtctttcccataccacagtttctcgaggcttatggttttcttttctggataaacatggctgtttcccagctgctgtaggggcaagctttaattagagagaattttatttaacaaccactatgtgctaggcactgctctaagagcattataaatattaactctttaaatatgcataattataccacgaggtaggtactattatttctccattatatttatagagaaacttaagcacaaataagctaaataacttaggttaattaatagattagatttcactaaggagctttagtttaatagatggaattggattaacttaaaaatccatagcgcattataaaatgaagcaggttgggtaccttcccgaagttgtcagtctgtggtatgtgttggaattacagactctggaattaaatacttgaattgaaatccaccattcactatgcaaagggtaggggtagcagtgcccatcccttggagttgttgtgaggattaaatcaaggaaatttgcttcagtacctgacatttatgtgtttagtgaatatcagttacttttattaattactgctgttattgatgtgatagtaacagtgttgccggcttctctaggagccctaaagaagagccctttagcatctatggactatgctggaatgaaactcaacacccccaccaccttccacaccttctcttctttcctcccttcaccttcatgcttggttccctatctactagattctggtaagctccagattcacaaaaagagcctcaattaagattttggagaagcctaaacagtcctatgtcaaaagctgccaagagccagggtgttcttcacattttccctcagcctgactcatcaaagccggcttgttactgggattgcattttggaactaaggcagctggtatttcaaaggggctgaagttaaaaagaagaaatgaaaaatatctcttttctaacacatcagagcccttgaatgaattagaacagcaattagaagctaacgttaatctagacaacctccgtatgtcataaaataggagaatgatgctgacctgtaagaacaggcaccatatgccttggtaactcccagcaagtcctgctcagaggccccagtggcttctcacagaccacccctgtcccagaactcatactttctctgtcttagtggtgcacacatggaatgatggagcctaaaatatgttatcaaaaaggtaatgatcttctgcactagaaacttgtgttttgggaaggccagaattttcctctgctagcaacatcttccagaggaagggatggggctttgctttcttttggggttcttttccatcctatatccatgcattaagttcatgtgctctgcatcagacagattaatgggtttgaatgctggattagccacttatttgctgggtgatggtggacaagttatttaacccttctgagtttggaagtaacagtactttcctcaaaagattattgtagaggaaaagagggatacagcacaaaaatcacttagcaatgacttagctgcaatgactcagagctattactatgatgttttcattttgaagttgctgcatgggtatttactttataaaatatttagcaccatatcattgtttatgattatgaaaccattttctcaatgtgtagtacttcttttttagcacgcaaacaatttaatttctataattaattcccataatttttttcccagcattgacctaaggcagttaaagataccaccacttgggaattggtgaatgaggagacttaggtaccttctgaaagacttcataggatcatacagtgaatgtttgaggatattaagactcaagtcatcatctaataaacttaagtgtgtattactttaagttttgaagtccctagaaactaaaaaatatgtgtagaagactatagcttcaagacaaacatcaattgaaaactatttgtactgtatctcaataggcatttcatttttttctgctcaaaagttttaatcatcaagctaagttaatattatatagctaacattttttaacttgactacatgaatgtcttctttaatgtgcaatttttaaaagtttgctatgcaattataaagttataccaagagaattaagaatgagattacaaatacttatggctccttcactcagattatgaactaaaacattatctatcctaaggaagcccctgagtcctcttttttaattgcatttttcccttcccccagagataatcaccattttgaacatggtacttgggttgtattcactaatggtggtttcatactttcaatatgtctatacggattctttttttctcttttttaaattatactttaagttctgggatacatgtgcagaacgtgcaggtttgttacataggtatatatgtgccatggtggtttgctgcacccatcaacccgtcatctacattaggtatttctcctaaggctatccctcccctagccccccaccccccaacaggccccggtgtgtgatgttcccctccctgtgtccatgtgttctcattgttcagctcccacttatgagtgagaacatgtagtgtttggttttctgttctgttttagtttgctgagaataatgatttccagtttcatccatgtccctgcaaaggacatgaactcatccttttttgtggctgcatagtattctgtggtgtatatgtgccacattttctttatccagtctattattgataggtatttggcctggttccaagtctttgctattgtgaatagtgctgcaataaacttacgtttgcatgtgtctttatagtagaatgatttctaatcctttgggtatatacccagtaatgggattgctgggtcaaatggtatttctggttctagatccttgaggaattgccacactgtcttccacaatagttgaactaatttacactcccaccaacagtgtaaaagcgttcctgtttctccacatcctctccagcatctgttgtttcctgactttttaatgatcaccattctaactggcatgagatggtatcttgttgtggttttgatttgcatttctctgatgaccattgatgatgagctttttttcatatgtttgttggccgtataaatgtctttctttgtttctttgattggtgatctgtcttttcaaagacactttgtctttgagttcttgagcccttgccttattgagttcatgtttctattaggttttccatagtgcgaaatcctcaagaggaattttcttttgttttttcttggattttcttaacttccagactgggttcttcatctcctttttagatactggtctaagccaggtgttttgtggttgccccgtgaagggccagatcaacattccatccaaaattagtttccatgttgagatgacaactccaaacccactaagaggatatgaaaaagttcattattcacatgatgggactttgtgaggcaaactggaaggctcatgccagtccagataacaagcaaggcagagagaatgggttgggcccttacagtgactagggagtggaatgggataaggctttctgcatgtggtgtgggacttgagtgtgtgggctttcttaccaccttgcccagatataggacaaaagcaagagaaagaagagagatagggcttcaaagctgtcaactgccaaacatcaaaaattgagtctttttaaaaaaaaaaattttacaaggtgtcattaattttgtccctcaggggtgacccctgctttgggaaactctgtgctctgatcattttgcctgagaactgtgagttcttcttggatggtttcagagaggacagcaaggcagtgatgcctttactctatcatttttaaccagaaacctttgtctaaatgcctctttataaatgatattgatgaaccaagagagttctgccacttttagtttgtggactatgttttgcttgaactcagattttttttttcttatttcaaaggaaaaacactgacaaaaaaggcagcatatattctgttggtggttattttgcgaataaggctgacatgtgtatggttatacttgaatattttagagggccatggttacatcttggaaaacattatggatttgggtattagattttctttttttttctttttttgagagagagagagagagagagattcgctcttgctacccaggctggagtgcaatggcgctatctcagctcactgcaacctccacctcctgggttcaagcaataatcttgcctcagcctccctagtagctgggattacaggcgcccaccactacacccagctaattttgtgtgtttttagtagagacggggtttcattatgttggccaggctggtctcgaactcctgatatcaggcgatccacctgcctcggcctcccaaagtgctgggattacaggcatgaggcaccacgcccgacctagatatttttatattaaagaagcaaaataaaaatgtataggttttcataattgaattggatgtgctttcattataattcaacaggatatgcatattgatgttgttattgacatatttgattaaaaacttcattatattatgcatttctaaaagccctactttttgatggaaagaacaattttgtgttcatttttaacttttattttaggttcaagagtacatgtgaaggtttgttatacaggtaaacttctgtcacaggggtttgttgtacagattatttcattacccagttattaagcccagtacccaatagttatctttctgctcctctcccttctcctaccctccaccctccagtagaccccagtgtctgtttttcccttcctcgtgttcatgagttctcatcatttagcttccacctataagtgagaacatgtggtatttggttttctgttcctttgttagtttgctaaggctaatagcctccatctccactcatgttcccataaaagacatggtcttgttcttttttacggctgcatcatattccatggtgtatatgtgccacattttccttatccagtctgtcattgatgggcatttaagttgattgcatgtctttgctattgtgaatagtgctgcagtgaacatacatgtgtatgtgtctttatggtagaatgatttatactcctttgggtatgtacccagtaatgggattgctgggttgaatggtagttctgtttttagttctttgaggaattgccatactgctttccacgatgactgaactaatttacactcccaccaacagtgtataagtgttcccatttctctgcaacctcacaagcatctgttgggttgttttttgtttgtttgtttaactttttataatagccattctgactggtgtcagatggtatctcattgtggttttgatttgcatttctctaatgatcagtgatattggattttttcagatgcttgttgaccacatgtatgtcttcttttgagaagtgtctgttcatgaactttgcccactttgtaatggggatatttatttttctcttgtaaatttgtttaattccttatagatgctggatattagacttttttctgatgcgtagtttgtaaaaattttctcccattctgtagattgactctttactctgatagtttcttttgctgtgcagaagctcttaagttgaattagatcccatttgtcaatttttgcttttgttgcaatttcttttggtgtatttgtcatgaaatgtttgcctgttcctgtgtccaggatggtattgcctaggttgtcttccagggtttttatagttttggatttcacatttaactctttaatctatcttgagctgattttcatatatagcgcaaggaaggggttcagcttcaatcttctgcacatggctagccagttatcccagcaccatttattgattaggaagtcctttccccgttgcttgtttttgtcagctttgttgaagatcagatggtcataggtgtgcagccttagttctgaaagccctacttattattaaaatgagaaagacaacattaaaagatattaaaagattagtataaatattgtatcaaatatatttcattttaaataaaacataaattctagaatatgtgtaatgtgtaggaggacccatacaaaatccatgggcacccaaattttgactaataatcagataaggttaactctggattctattaaattgattataaaatgactgtgctttacattttaacgtttctgaaatcaggatgggtcttcaaaaatatacttgccaggcaccgtggaaaaaataaattgtaaatataattgcctgttcatttgttgacttggccttgtgtgaaaaatatctattattgaaatgatcacttcactgagttatttgtgctggtagcatcgtgtgccatttttcattaccttaccttggataattagctcttgagatgtctttatacaccaagatgtagcaagtcaaagaaagttactgtgtgcctgaaaaatcccaagttacacagggctgtttagtggaaaagctgtacaactgccaaatctcttgactagattaaagaatttgaaggaaaaaaagatttaggagatgttggtgtgaagcttatgtaccatgagagacaatccacctgtccaaatttcagtataaatctaattttgaggaaacatcaaacaaatacatatatataaactggcttaaatttttcaaaatgttgatgtcacaaaagacaaaggctgagaaaatgtttggattaaagaagactaaggagacatgacagctaaatgaactgcctgatccttgatcaactcctaaggtaggggaatatagctacaaaggacattgggacagttggaaatatttgtttatggatagtaggggaatagtattgtagtaatttaaaatttccctgaattgatcattttccatgtttatgtaagagagtgtccttgttcttggaaatacacactgacatatccagtagtaaagcaacatatttattacttatttcttctatgaatgcttactgagtttgacctatacaaaaggtctatgctaaagtactatcaactgcttactgcccatcaacaattttctggagaatggtttgttcaaattttcacttgcatctttgtatataattttggaagtagaaattgttggtctgtgttttacttgtaatattcttttcctcttttcttcttgaagcatatttgcatagcttacatgacagttatgttgggggaacaaaccaggtgggaattttgatctccttgaaatttcttttataaggaaaaacaactggttcactctttcagcaagttcccaggcctacattaatagtcaaggttaaagagatgaattgatcactattcatgcttatggaagcttttgtggaaaaaggtctgtgcatgggtggttgtggaggagtaaagagtgctctgccggagattgcaaaattctcagggagcccagtggctagagcaacaacatgacaagtgtcccaggggaagggatgcatgcgctggacttccatgagaagagtgtacagcaggtgagaacaggagggaagggcaggctatataaagtaaagagcaagaaggggcagacttgaaagcctgggccaagtttaggcaagactaacttctgagggctgaatctaggctgcaagcagagagtagatgggagaagagtaatcttgattaggtgtcaacattctccaccttattatatgtagtcccgtcaggtggacagtaccccccttttacagttgtggaaactgagctcaccgagacagtaatttacccaaggtaattttccaagtaagggcaggagcaggatccaaacccagattttggactctagggtgtgccttctcaacaggattatattcctctaagggggcaaaaagtggcctttggagggagaaaaaaaaaccttgctctctttatctataaagcagagacatatatacagatgatgctatatgagaaaatggatgattaaaatacaagttgttgtctaaggtgttttcagcagttcatatccccactctgttgtgcttaaggtagacagtataactgtggtattaaaattttatccagggggtaattagggggaaaatgtctgaaaaggcaacaatgtaaaacaaaggttatgaaacactgctctatagcaagacaggcaaggacagtgtcctgaagccacggaggtcctgggatgcctgggtgaagttgacgtttctgtcccttgagctgatgatctgttctcctgacttcattagcaggggctcctacagccccatgaaggtaggtgttggtcttgcttataaaaagtgataaaatgagcttgtgttgagttgagaagaaaatcctcatcctgggacttaattcctcaccctgttaaaagcgatgggaaaccatagtgtgtgtgtcaaaggagcatctttctaggaggggaacactggataactgtgacctttggttaaatgatatttcgagagtaataacccacaaacttccacgttccctacagatgagtaaccttaaccctgcgtactcatttcttagggtttccataataaagtaccacaaactgggtgggttaaaaaacagttctgaagtctggaaatctgaaatcaaggtgcaggcagggccatgctctctctgaagtctgtaagaggaatcatcctttgatccttcccagcttctggtggtttgacaacctttggtgctcctttgcttggagccatgtaactctagcctctgccttcgttatcacatagtattctccctgtgtgtctctgtcttcctacggcctttgaccatcttcttataatgacacccatattggactggggtccaccctactccagtatgacctcacattaactaagtgcatcttcaatgaccctatttccaaataaggtcacatttctagctactcagtgttaggacttcaacttacctcttctggggagggaagaagcataattcaacccacaacatgctgtgggattttctgtgtttttttaatacttgccactcatcagtggtatttggtggatgttgatatcagtcttgcagcttgcacccctcaaaactggagcttcaggatgttagtctggaattggcattggtgtgactttagaaagagatataaacaatgacaaatacacaggaagatgttacataggcatgtgacatgggcatcagtgagaaggtgacagttttaaaacaagaggtagatgctttaatcttagaaagcatttaattaatcttccattttatgtcgttacacccagaagaggcatgtggctctgttgtcccccatctcaatgcatggatgaacctcattctaccatgtcctgaagggcaggatctggtcttctttatctttgtacccaacacagctcgagcacaatgcctggcacactgtagatgcttagcaaatgtggagttgaagtctcagagcctggactatgtttctcagtccaccaactgttttaggtggggccaatactggagaaatggatgagtgatgccttagctgtactgatagctcagatctgctcctgccatgaactctaggaaaaataggccttgctgtgacgaagaaggaccccacaccttctgcacagcctcctggaggccataatggaagaagagttggatttagggtttcagtgttgctcgtcatttcagagaaatagaggtgggaggaggagaaggagacctctctgatgagcccaggaagtcctttgctgtgcaccaccctccccacaccaacttgcaactttttactgcccttgtatcaggtgaatatggaagattctgtcttgggagttctgatatgcacagactgcaaactttctggggtccattaagaccatcctgatatgttaaggggaacctctcctcaaattgcacttctgggggacaaagcaatcttgagatctgaagaaaactttttttttcctttatttatgtggcatccccactcctgttcagagggtgttggcaatgtttttgcttaaggtagaattaaggttgtagatgagtactggtttcaacactttaataacaattttagtctatgacttaaaactcctgacacaaatgaaaagctgtgattcccttaaggttgtacctctagtttgaatgtatgtcagattactgactcatatatcctggttgaatttttttttattaatgaattgaaatcctaaaatttactcaatggactcttactacagagaaggttctgtattccaagtaatttacagttaatatagtctgctcacttggataaggctgcaggttatgttataggagcaaatgaatgattaaaatataagttgtctagggtgttttcagcagttcacattcctgctcccttgtgtttagcacaatcttaccaactgtccctctatactacaacatgaatgaaaatatgtgaatgagtgacatatttgtggatatatgtttaaatttaaaagctggtatttcttcatgtagaaggcaacttttatgtcctttttgcttttctgtcctttttgcttttctatagtttccaaagcttttactatcaatatttattacatatagaatcaagaaaacaatgactgttattcataaacctataatgacttttcagaaaaaatttcctataactaggccataaataagcatttgctattgattgtcagagattattaaagttgagaatagtaaataatgattctaactctaggcttcccagaagagaactagactcacatctgcaatttagaaattatgtgaactaagcaagcattcaggaagaaatgcatcacttacctacccatgggtggatttgagcaaaggctgtgtgcagttgtaaagcaagaatgaggtctgggtgggagaaagactcagtggttttcaggggctcaatctaattgtctagagggcattcataaatatcttttctgagagtattttgattatcacaatgactggggttactactgacctctggtgcagtggggccaggcatcctgcagtatgtgggccagtcgcaggccaagaagatctgttccctccaaaataccaggagggttctgttgagtggcaacagtagactctactgagtgggttttctgtgagcacagaggagggtgaggatctcctgagtcaagctaggtattgtactcagaatgaaggataggccttatttctacccagaaagacctagttagcttttccactggtgtagaaggagctagtccacaagaaagttaacttctgtttctggtacgcacgagataccctgaaatgaggtctaagagatggtaacattttcaatgctaacagttataaggtgcttatcagatgccaggcattgtgaataatcacccatgatcctatcaccttgatagagttattgtcatctctacgtgttatcatccatataacctcatattttaaatggtaatgtcttctttttactaccattttacataaatacatcaactcctatccatatttctatacaatagccatagttattgagatgcatatttaatagtctatcatgatattgtatcaatgtattaacccattttcatgattttgaacattgggcgtttcttctctcatttttatttcgcagctatagacagtgctcccatgaatgcctttgtacagatatcctttgcttctggttattttcctaagaaaaactctacaagtagcagtcttggttcaaagaatgtatatatttttggctcttcttaaatagtactatgttgctttctcacaaaattacatgaacttattctgccaccagcaataaatatcactttcagcacaaacacaccaatgtcaagttctctcatttaaaaaattctaactacttttctgggagtaaaacaatgttttgctctaggtgagttaaatatttccaggactttggatgtttttctctggcttccttaaaatatcttattagcctcttgagatggttgaggatatagtgtcagatttgtgaagctggaaccagagttacactaaggatgtattgtatatagttttcttccagcaaaaattatttagccctgaaagccaaacagcaattctatacaaaatactgtattcattaatctttttatcaacttacggagatatgaaatggaatcaaacacatacaaatcaaggatactacattcaagttatgcacaagaaaagggaacagaactccccagtctcagccctcttgggctacattgattgactgagccagagaggtaaacaagaggaaaaggtacatcatccctggcttcagttctaacccgtttccccatttgtcatttatattttagcatgttgtctttacatgttcccatggagagcactgttcaggcttgtattgacagttgcagggcggaacattcatatccactgcacgccatcagaaagcctgtgaattcatcatgcttttgtggacactgggcttgaaaacactgctctgcgtcaccagctacaaaacccaggcacagccccatcttcacccactcccttattgtattaagacacaaaacacatctaagaaacaaagcctggcttgccctgtgtttctaaataagtagtagtatggtcctgtgtttctaaataaatgagtagattggtagctggtacccatgggacaaaaggattgtagtctcagaagtgggttcagtaacactactcctttgggagagaaacatgtcaccacatgttttggggatgcacctgcacatctcttctccccccatatcctggcagtggttgtacagaagctacgcaccaccacctactttttatctttactgtcattgtatttactatgactcttcaggtacttttcatgtgcttatttcatctaaaacaaaaattcacaacagattctaatccaacctacctcaaggccaaatttcgcaagatacttttttttttttttgctttttaaagtgtgatataatatacataacatagaactgaatattttaaccattattaaatgtacagctcagtggcattaagtacattcatgttgttgtgcaaccatcactatccatctccagaaatttttcatcattccaaactgaagctctatgcccgttaaatagtaactccctattcctttcctcccccagctcctggcaactatcactttactttctgtctctgaatttgactactttaggtacctcatataggtggaatcatacagtagtttgccttttgtgtcttacaacagtggtcctcgacctttttggcaccagggacgggttttatggaagacagttttcccacttacggtgtgcggagagggatggtttcagaatgaaactcccatatgcagttcacaaccagttcgtgctcctaggagaatctaatgctgccactgagcttttgtggagccagtccatggcctggaggttggggacccctgtcttaccaaatacattttaaacatttaaattttaccccagcttatgcttaaagtggttcgcagtatctttccaagagacctttactaacatgaaaagatacatagacataaatttttaaataggagaagaaaaatataaactaagtataattcaaaaatgcaccctgctgtgaatgacacaatttcagacattggaccacacatttatatctgggtcccttaatgcccaaaacagaacataatacttgatcaattacataattcttatagagaacatactgacttccaagcaaagcaagtatttcagggcactttaattctgaaagatttttctccctttcattctttgcagggaaacattaatgtgggggactgtatccttgataatggcctcatagtatttcacaggactgctccttaaaaagcgtaactccacaagagctctaaaaaaggcctgagagtgaggccaaggaagcatggcttatattgacattgttcatttatacagtcatttaacaatagttcaccaagtcacctgtgagcatggattacaaaggcaaatgaggtataattcttaccctcagtgagattacaaatcatagcctagtgcttttgattaagggtcctcaacccccagactgataccggtctgcaagctgttaggaaccagcctggttcctaacaaatcagcgatggcattagattctcataggagcacaaaccctattgtgaattgtgtgtgcgagggatctagggtacacgctcctcatgagaatctaatgcctgatcccaaaaccatccacccccttaccaccctggtccatggaaaagttgccttccataaaaccagtccctggtaccagaaaggctggggactgctgcttttgatgatcaggctagattcaggagcaagaaatctaggctccatgtcctttaacatccttacatatcattttctgcagtccagcttctgagagatgttgggcatctaaaaagtgtcttcccccagcaagggcattctatgtggtggattattgtgagctccatataccttaaagcacaaaccaacagactgatggctccccatgcctgggtgagacctcccacatggagtgagtcacacaagatgtcaggcaaagccaaagcaagatgcatttgccttttgacataagaatctgtggtagggaagaaagcacaggaagaagagagtcattttgatgtcctcaactgcagtaggagccatctccctgacttgttctgacctgacttgttccctaccgtaatctcctggatgcagaagtccctcaggcccatcgggtaaactaagaatcttgctggagttggggtcagaatgtgagccatcagagagatggctggatcaggggattcagacaattatatggggtgcactggttggtggttgggacggatggcaggtcaggaatgaaaacaggcgagctgaaaatgggagatgaggaaatgcagtctatcctgatggctcttctcaggagtttgaccatagagaatggggtaaaagctgggacagttgtggggtcaaggagaggctgacagtttatttactatgtgtgattttagaacatgtgtgacgattcagtagaaagggagcaattgatgattggggcacaagggtcaactctaggtgtgaggcttttaggaatctaaggagctgggactcactcagagcaggagtgagggcctggcttctgatggaagggaatgttcccagtattttcagaggtttgcgagcaggatgcagatgctggggaggttggggtggagagatgaggtactcccacttggtgcctcattttctcacagagggtagtttggaagtttgagaagacaggacatataaaagagttgtctcaggaaacaaggattttattggtcatgtattggttatttgctttggggtgtggcatggtgatatcatttcttgcctttcacagggcacagcacctgcagggtcacgagggagctggccggttctctggttgggacacctaaatctgaacctaggagtagaaatgagggccagactctctgctagacaaacacaaaggaatctctggtcagaatggcatgccattcaaagtctgtggtgcttgtttaatgggaaaccccccagtttggttgtgtgatttttctgcagtttattcagtggctcaggggccggatgcagaaagtaggctgtagggcttgcctggggcaagcatcaagataggtgcttagtgcactaagttttaacctttattactgtattatatgcattttatttttttattttttatttattttttggagacagagtctcgctctctcacccaggctggagtgcagtggcatgatcttggcttactgcaacctctacctcccgagttcaagcaattctcatgtttcagcctcctgagtagctgggaatataggcgcacaccaccacacccagctaattttttgtattttagtagagacggtttcacaatgctgcccaggctggtctcgaactgctgacctcaggcaatccaaccacattggcctcctaaagtgctatgattacaggcatgagccaccgcgcccagcctgcattttaaaaagtaagtttttgctaaatactgttttactacatctatatatttttatgtgtaatatttttattgtcactcaattcaaaatatattcaaatttcttttgtgatttcttctttaacttgtgggttatttagcagtgtgtttttaaactttccaagcatgtggagatgtcttggttatatttatattattgatttctaacttaattgaatagatatcagagaactcttctgtattatttcaatcctgtgaaatgttttgagacttgctttgtggtccagtatactgctagttctcgtaaacatggtgtgttcttttttaaaaaaaaatgtatattgtgcagttgttggatatagagacataaatagagatacagatatccatccatccataggcaaggtttattaatgatattacattctcctatattctttatgatcttttaatctatgtgttgcatcatttttgaaaaaggtatattaaaaatattcatattttgagttccagggctgggacctgctttctcatttggcattttgatagaacgtacaagagaaattagaactttttactgagaaaattctgactggttacaaattgaaggagaagctaaaattatcctgactctcacaactacatgagttggtaggttttaaaaactgagattgaacctaatgttaccagaagtatgagggttctgtgttcctgtcttcttggaggaaaggattccaccaagagaccaattagtaaagtaagcaaaaggtttattaaggaaataagagtacactccaagagaagagtgggagagtgggctggcctggctgggagcagccccaagagttctgcactgcgggtttttattatgtcggactcttcctgcctctgtttcaagtctctgactttgcttatctggtttcccaattctgtcttaagtctccacctttgtccccacctagttcctgccgaagtttgtaggattctgccttactctctgttgatgcgcatgctgcggggctcagtgatcaatacgaatcctacctaatgacggtgttgctcattaccaccatccctggaaggttctttagcagtcaaatctgtatttattgcctctgcgtatctcttagaaatttcccttttgcccttcttattagcatgtagctatattctgacaagttaattacagagtaagtgattactgggcatcttaagggacgtttcagaacattcctttctgcataggtagtttcccacctctctgctcatatctagcagcatgttttggttggtctctgaggcgtgaggttttccagagctttcgcccccaggggctccccctactgcttatgtctagctatctgcctactctaacactaaggacctttcaattctactctctacctgtatagatctgaggtccaaagaagagcatgacaatcactgtagttgatagaaatctggaattagaacccaatactctttccattcttgtactcctttagcaactagtagtttagtctgtagcacattttaagactgaaatatttctgcttgaatatttagaaactttttttttttttttgagatggagtcttgctctgtcacccaggttggagtgcagtggcgcgatctcggctcactgcaagctccacctcccgggttcacaccattctcctgcctcagcctcccaagtaggtgggactacaggtgcccacaaccacacctggctaattttttgtgtttttagtagagacagggtttcaccgtgttagccaagatggtttcgatctcctgacctcaagatctgcccaccttggcctcccaaagtgctgggattacaggcatgacagaaactcctacctatgcattcttatgtcaaagaaaaactcacaaaggaatttgcaaaatttttaagaaatagagaaaatttaaatggtacatattaaaattaaaatatagagcacacctaaatctgtcctctgaggaaattttatagtattaaatttatgttactaatataaaagaagaacgaaaagtgaactaagcctctaacttagtaacttcaaaaagtaacagtaaaataaacccaaggaaagcagaaaaaatgaaatcataaaagatgaaagcagaaattaattaatttaagcagaaaagctcaagagaatgagaagaccagaccacagactgggagaaaatacttacaaaacatacatctgataaaggagctatccaaaatatacaaagaactcttaaaactcaaccataagaaaacaacctaatttaaaagagcaaagaccttaacaaacaccttaccaaagaagatacgtagatgtcaaataagcatatgaaaagatatttcacatcatatgttatcaggaaaactgcaaattaagactcttttccattgcatatgatacaaattcaaagagctagtttcctcaaaattataaaagttaatacaaaacaaagatactaaaatagaaaaaggacatgtgaaataagtaggttacaggcaaggaaatcacaagaaaagatattttataactgaagtaatacaacaaaaatgaaaaatcatttttcatctataaaattaacaaaacatttaagtttaatgacatccagtattgatacatgtatatgggaaaacaggcaatctatcacacaattactgggaagataagtggtgcaaacttttagaggacagtttacacatactttccaattctaaatattcattaaacttgaccaacttacaaaagagtggcaaagatacaaataagtacagtagtacttattaaagcattgtttctaatgcctaagaaaaactggaaactatataaatgttcattaatcaaggactagttttaaaaattaagacatccattccatgaagtactgaagtagatccacctgtcctgatgggagaagggcgagagcatggctttggagccaaacctcctgggtgcaaatcccaactttgccatttactagctgtgtaatatgaggcaagttattcagcctctctgtgcctcaatcctcttgagtaaaatgtgtgcagtagtacccatctcagagggctattgttagatttaaataacttaatagaatgcttagaacagtgccaccacagaataatctttcagtaaatattaattattatacattattattaaatggcacaaatgcaggacataggccagtgtgtagtatggtctcttctgtagaagaaagggggtggagtaaatgagggaatgaggagacagggagggtgggggaaaagcatagaaatacttaaatgtggaggggaagagacttgtcatcttcattttacagttttgtctgtattccttgaattgcctaactgtattgtcaggaaagctaatctgtgatgacaaagaaaccccaaaggctgggcatgctcacgcctgtaatcccagcaatctgggaagccaaggcaggtgggtcacttgagcccaggagttcgagaccagcctggccaacgtggtaaaacctcatctctaaaaaaataaaataaaatacaaaaattagctaggcatagtggtgcatgcctgtagtcccagatacttgggaggctgaggtggaagaatcacttgagtctgggaggttgaagtgcaatgagctgtgattgcactattgctttccagtgttgctctggacaccagagcaagaccctgtctcaaaaaataaaaataagaaactcccaaaatgtagtgatttaaagaacagaaaagtaattatctttctcagggaagtccaaggagagtgttccaggttggccagtatgtatatgttccatacagtcactcaaggccccacagctctgccatcccctaggggcaatagtttttacatttgactgcatattagaatccttggcagagctttggaaaaaaatcacattgcccaaccacaaaccatatcaattaagtcagaatcactgggccagggcacaggcactaatatttactccagaagattcttgtgcagccaggtgccttagggctttatcatctaattgttgatgcccaggccatctatggtttaagcctctgagaaggggaggagagcatggaggaggaccaccttctgtacaaagggcctggcccaaaacaggcacacatcatatgtgctcccattccattgttaagagcataatcaccctctcatgcttagctcaaagggggactggcagccacatggctaaaattctgtttctagaaaaaaggggtagaagggattttggtggtcagctggcaggctctgtgacataaaccacgtgaaagtattaccttaccctcccacgcaaaaaattacaacaccagagattatggcctttttcttcataattttctgtatttcagaactctaatgctattttttaagttagaaaaaggaaacatagttaaccctttttcattgcatatgacagcttaccatgtactattgtgtccagaattggtgggttcttggtctcactgacttcaagaatgaagccgtggacccttgcggtgagtgttacagctcttaaggtggcgcgtctggagtttgttccttctgatgttcgggtgtgttcggagtttctttccttctggcgggttcgtggtctcgctggcttcaggagtgaagctgcagaccttcgcggtgagtgttacagctcataaaacagcgtggacccaaagagtgagcagtagcaagatttattgcaaagagcgaaagaacaaagcttccacagtgtggaaggggacctgagccagttgccactgctggctcgggcagcctgcttttattctcttatctggccccacccacatcctgctgattggtagagcctagtggtctgttttgacagggcactggttggtgcatttacgatccctgagctagacacaaaggttctccacatccccaccagattagctagatactgtgtgtggacacaaaggttctccaaggccccaccagattagctagatactgtgtgtggacacaaaggttctccaaggccccaccagagtagctagatacagagtgtcaattggtgcattcacaaaccctgagctagacacagggtgctgtttggtgtgtttacaaaccttgagctagatacagagtgccaactggtgtatttacaatccttgagctagacataaaggttctccaaggccccaccacagtagctagatacagagtgtggattggtgcattcacaaaccctgagctagacaaagggtgttgattggtgtatttacaatccctgagctagacataaaggttctccacgtctccaccagactcaggagcccagctggcttcacccagtggatcccgcaccggggctgcaggtggggctgcaggtggagctgcctgccagtcccgcgccctgcgccctgcgcccgcactcctcagcccttcggtggttgatgggactgggcgccgtggagcagggggtggcgctcgttggggagggtcggccacacaggagcccatggagagggtgggaggctcaggcatggcgggctgcaggtcccgagccctgccccgcgggaaggcagctaaggcccgatgagaaatctagcgcagcgccggtgggctggcactgctgggggacccagtacaccctccgcagccgctggcccgggtgctaagcccctcattgcccagggccggcagggccagctggctgctccgagtgcggcccgccaagcccacgcccacccggaactccagctggcccgaaagcgctgtgtgcagccccggttcgcattcgcacctctctccctccacacctccctgcgagccggctctggccttggccagcccagaaagaggctcccacagtgcagcggtgggctgaagggctcctcaagtgccgccaaagtgggagcccaggcagaggaggcacctagagcaagcgagggctgtgaggactgccagcacgctgtcacctctcactattgtatgactttctcatttcagttagaggataaaaccatgagccctttggaattgtgattttggtaccacattttaaaatgcagtttagaaatttgagtgtacctatcccaaacactgctgaattcaagactctcttcctcccaaagtttatatatggacgagcctcctgcaggctcctcaactgctggtaagagagactagtggtctcctctcctttcctcacccccaagcctcccagattagcacttgtaaaatcacttcttatgctgcagcaggcaggttgttctgccaagaattggcttgtgctctggagaaaagagccctattttaagagatgccacagactgcccgttctgctgaaggagacaggggagtgctgggacttccacctgtcaaaacatgatttggagttcttttggaaagtggaatatgctcagagaccacaaaaccgactccctccagaccctcttccttctccagtttcacttcatttccacatcatttggagctccttaatcctggaggtgaggccaagtaacgtgatggatgttagaaggggaaaggactagatttcctaatttagcagtgaaaaccccagaaagaggaaagagaagctagaaaaatatgctcccttgttgtcagtagagatgaagggattttaaatgtggtacttagaagttgactgttcgaagatcacacgatttaccatttaagccttcttagacacttgagagtaaaagggagcacccttcattacactggactgatagccataccaaggctatcctgggcaactgggctatgtggtatcttaatagttaggtggcccctttcactaacagacaagccatctttggtctatatttctaactttttagtgtctagtgggcctgtgacctacacagttgttacgctgaattagggaagtgcagcttcatcagggacagttgccgttaaatccactggactaaagagtcctgttggcagctcacacctctgtcagagacagcccagaccttaaccttaaagtaggtacattcagctttcagagcacacatgagtgctaaaacaatcaggacttttcctcgttgtacacaagaaagcaatgaatgtcgaagttccatgcattccctaggtgcattctttttgtgtgattcttgaacattccattccaagagcctttgcaaaaaccaacacaggatctgaaaatgcatgtatgctggctaaactgtgctataaactcataccagttagccaagttcagaaggctggggccaagggagctggaagtatagcattgttcacagcattgcatgagagaagatatttccattgcaatacaaaataactttgactatctgtgaagcatatgtgattccttttaaaaaattaattctaattatatacagatttttcaaggttttctaagaaactaattttaccatattaaaacaattgtatttcttccttccttatacatttcttttctttctcttgttttattgccctggctaaaatctccagtgaaagctgaataacatgttagtcatcactaacaaccttggaaaggtcctgatattaagggaaatactgttaccatttcactagtgtgtgtgagattggctgtagggagttttaaaagctcctttccagaatcaagaagttcttttttatttctacattgccaagagattttaacatgagtggatagttttccttctcccttaacttggtgaattatattaattagttttctaaaaattaaactaacttgcattcctggcacaaacccagcttggttgtgtattgtgtttttatactctgcttatatttattaatatttttgtacctatgttcacaggtgagattgacctataattttcaaatctgttgctcttcttggtcaggttttagtttttggtattaatgttacactatccccataaattgagtaaggcgctatgccttcttttcctgttttctaaaaaaagaaaaaaagtgtatataaaattagattagttgttccttaatttataatattttattttgagttggtttctagtaaggaacaggttctaggaatttgtttatctaactttccaattaatttgcaaacttatttataatatcatcttattctctaagtgtgtatgcatctgtctgcatctctagtatcatacctgttagtatttataccttctttttttcttttttaagatgggagttatctttttctcttttcaaaaaaccaatttctgacttgctagattctctctactgaataattgttttctatcctaacttctttttttttttttttttttttttgcttccatctactttctttgggctttttctactcttctttgtctaatttctgatgatggatacctagcttatttattttcagtctttcttcttttctcactaaattcttctttatatatcatagtaactagatgtagtctttttatcattcaattcttttctagtttgattttttcttcgacctatgtgttatctaaaaacacatttttaaattaacaaaatatgaggtttttctaattgtctttttgctattgatttcaaactttattgcattgtcctcagagactgtggcctgtatgataccacttctctgaaatgtatttagacttacctgcccatgttatggtcaactttcctaagtatttcacaggtgcctgaggagaatatatattcatgaatttttgagtacagtgtcttatgtatgatctttagatcaagcttgatattgtgctgctcaaatcttctatattcttcctcaatttttgactgcttgttatatcaattactgaaaaaggcatttcaaaatctaccctaacaataatttgtctctttccttttgcaattgtctgtttatgctttatgcattttgaggtcaagttattaggtacatacaagttcagaattgctatatatttctttttcactttggctctctgcactgcattttggataatttgtttacatctgtccttcgttttactaattctgtcaagttgtgtttaatctgctatatagcctatcctatgtggtttttgccattacttttaatgacaacctaacaatgtgatgttatgacatatgtatacaatgtaaaataattaaatgaaactaattaatatattcattacctcacataccactttttgtggtgagaacatttggaatttattctcttagcaattttgaaatacaacgtatattattagctatagtcaacatgttgtgtagtagatctcaaaaatgtattccctctgtctaactgaaactatgtaccctttgaccaacatctccccatgcccccatcccagcctctgctaaccaccattctactctctgctattatgagttctactgttttatattccacgtatgagcaagatcatgtactatttgtctttctgtgctgacttctttcacttagcatgatgtcctccagggtcatccatgttgttgcaaatgacaaaattcccttcttttttaaggctgaatagcattcattatgtgtatataccacattttctttatctactaaatggccattatcaaaaagacaaaagataacaagtgttgtcaaggatgtggaggaaagagaacccttgtacactgttgttgagaatgtaatttagtatagccattatgtaaaattatatggaggtttctcaaaaaaactaaaaatagaactaccatgtgatcagcaattccacttctggatctatgtccaaggaatttgaaatcagtgtatcaaagagataaatgcactctcatgttcatcacagcattactcacaagagccaagatatggaatcagcctggcatttatgaacctcaccattgcgggagctggtggctgaaatcagtgctccctgccagtctgagaagtctacattcaattgatcacattcaaaatttcatacacctgtctttttcatgtaaagtttttcattaatggcttaatttatatttaattacccaaaataatgaactccaagattatttattttctgggccagaaatcaacaaatcatctctctagcatttagtgttctgtgtgcttttcctgtgatcattaggcatagaactcaggaactttataattctcattagggcctagttaccagattatttaaagcataaatcttattgctaattacaatggctgaggaaaaacaaaaacagaaactaactttttcaccgtcctgatatggctcctttaaatgggcctcctaatcatgaaggaaatggcatgtgtaatggatacatttttcatctcgatgctcatgaaggcaactgcatttcttttgcagataaatttcgggaaatggtcccataactccttctgtaataagacacttaataagataaaatcaggtgaaaatcaaggcttctacccgtaaaataggccagaataatattggatcattcgagtggggagccaaatttaaagaagctgagcattatcttacatttaacggacatttgagtttagccaagattagaaaacaaaatctcttgctagctcatgagggagctcacaggaatttagtcattcattcaacacctatttaatgagtggctgctgtgcactgtattccagaattagggagtcagatatgaacaaaacaggcataattctatgtctgtggggctcatggcctagagaaggaacaaacagattattgtgtgattccagtcagggaatgctgaaagtctaatgctgtgagtgggtcttcattcagacagtagggatgacagatgtggcattatagttcctcttgaaggattggggagctggttagacaaaggtagatttgtcagtgttggaggccagaagggaagaagcacagtcctggagggcccaatgtggctaagattgctttcttccttattcttccttcttcctttttccccttctcttcatcttaatttccatcttcagtaatagtaaagcatagtataggtggtaaggggcaaagggaagaagaatactgaattatcagagaagagtctctgccttttggactccctagataccagacctggtacacaacatagaaaagcaaatacatccagatctatgccaagacaaataataattaaacttctaaaggctaaagaaaaaaattgaaagcacatagaaacaatgcattacttacagggaaagatcaatgagggtgacagcagagttctccatctcaaaccatggaggccagaaggaagtggcacaatattttttaagtgctgaaagaaaagcatggtcaactgtgaattccttatctggggaaacattccttcaggaaggaaaggaatatcaagacattctcggccgggcgcggtggctcacgcctgtaatcccaacactttgtgaggccaaggtgggcggattatgaggtcaggagatcaagaccatcctggctaacacagtgaaaccccgtctctacgaaaaatacaaaaaattagccgggtgtggtggcaggcgtctgtagtcccagctactcaggaggctgaggcaggagaatggcgtgaacccgggaggcggaacttgcagggagccgagatcacaccactgcactccaacctgggcaacagatcgagactccatctcaaaaaaaaaaaaaaaaaaaaaaaaaaaagacattctcagaagaaggaaaactaaaagtttgtcattggcataaatattatatatatattatatatgtaaaatgtagaaatatataatatataaaatatataatacacatctatgtattatatatcgatatataatacacatctatgtattatatatcgatagataatacacatctatgtattatatatcgatagataatacacatctatgtattatatatcgatagataatacacatctatgtattatctatcggtagataatacacatctatgtattatctatcggtagataatacacatctatgtattatctatcggtagataatacacatctatgtattatctatcggtagataatacacatctatgtattatatatcgatagataatacacatctatgtattatctatcgatagataatacacatctatgtattatctatcgatagataatacacatctatgtattatatatcgataatacacatctatgtattacatatcgatagataatatctatgtattacatatcgatagataatatgtatctatgtattacatgtcgatagataatatgtatctatgtgttacatgtcgatagataatatatatgtgttacatgtcgatagataatatatatctatgtgttacatgtcgatagataatatatatctatgtgttacatgtcgatagataatatatatctatgtgttacatgtcgatagataatatatatctatgtgttacatgtcgatagataatatatatctatgtgttacatgtcgatagataatatatatctatgtgttacatatcgataatatatatctgtgttatatatcgatagataatatatatctatgtgttatatatcgatagatatatatctatgtgttatatatccacagataatatgtgtctatgtgttatatatccacagataatatgtgtctatgtgttatatatccacagataatatgtgtctatgtgttatatatccacagataatatgtgtctatgtgttatatatccacagataatatgtgtctatgtgttatatatccacagataatatgtgtctatgtattatatataattcacacacacacacatacatatatttcgttttctttttttgagatggagcctcactctgtcacccaggctggagtgcagtggcgcgatcttggcccactgcaacctccatctccccggtcaagtgattctcctcctcagcctcccaagtagctgggattacaggcacccaccaccgtgcccagctaatttttgtatttttagtagagacggggtttcatcatgttggcaaggctgatctcgaactcctgactcaggtgatctgcctgcctcagcctcccaaagtgctgggattacaggcatgaaccactacacccagccagcagatatatttttaaagagtggctaaagaacttcctcagggaggaaatggtaaaagaaggcatcctggagcagagcagccccagcaagggagtacttaggaattagtgggtaaggaaagaatcgaaaaagcttatagtgtcctcaagaaggaagaagaaaggaaggaaggaagcagcagcaatggaagagtaaaaatatgggtacataaaatagactatctctctcctcatgagttttataaatcatatttggtaaccgaaacaaaaattataaccccatctgacattcaagacaatcatatggaaaagtgggaaaggcaaaggaacctaaatgaaaataaggttttcatacttcactcaaagtggaaaaatgtacacacagtactgtgataagggacagatatgtgttataataccaagagcaaccactacagaaagtatataaagaaatacagtaaaaaaaaccctatgaataaattaggatgggatcccaaaaaatgtttcacccacaggaaggcaaggaaaagagaaacaaaggaatgagaactagaagaaacagtagcagaagaaactgctaaagaattttcaaaatctaggaaaattcttacaaacttttggaaagttctgcatcttcccagcagagccccagtccagactccatgacaataacttctcacggtctgaaaggtcctctcaaaccagggtgttccaaaactacccagaagcaatggatgtgattctgtaagtaacctcagttactcttggcagccacctgaaaacatacttaatgaacttgcttttccctctgtagaggcttcctttggagggatgggaagactgtggtagaggggttttcgcacttcgggcaggctcctccaacacaggaggggccgtaactcagcctaggagtccaggtgagagccaccagggcagaccttgctgctcttcgccaggtttcaggacatgcggtgtgagctggctttcctggctgcttagacacctgcctcctgcctcacactcaggacctctggtgttgcagaaagaataccaaccctatcagcaggcattccaggcttaaatcctagctcagccccttactttctgtcctccagttccactatgcatcagagataatgctggttcagggagatgctgggaggaataaacaaggtaacccagtacctacttcaggggacctctaatgaatggtgggtgctcccaatttccagaactgggttcagagaagaggttttgacagccatggccccccacattccagcaggtagtacatagcagcaagcggttctcggggtgggcactgcggctgcttggcattcagagctctggggtaggaacaagggaagccagcgccatgccctatgaccaggacaatgctgggggtgattggggaattcataatatgccagaaggcattatcagttagctcctctcatgccactgctacgtgggcgaacatattaccacagcaactgttgctggacatgaacaaagatatgattgtacccttggagagaggtcccaagaagaagtgaggcaagcaacccagtgtggctatcatgaggaagtggtgtggctgagttagtgtggattctgacaccagccccatctgcccttggacaaagctccaaaaccacactttctcctcagtcagatgagtgtaacagtcccagcctcacagtgctgtggatgaaattcagtgagaggcacatgcaaggggctcagccctgcccctggccaggagtaagcactgatacatgttacctattattattgctgctgttgttattgttatcactgggaagtgagatggctaagtagatcaacagaacaaagaatacaaactgaaatgtctgcttcaagaagggagtgtgttatgagagaccaggctttagttctattacagagggcatttatctagtgtgaatgtaataggttaagaagccaaagcaagagggctagtctgtgatcagtggcatggtagccaatgtttaactagttctccaggggaaaagaaagctttgatttgtagtgtttgccgatttccactatgtaaatactactaccttgtacattgttaagctgccaacatgtcatcactgaatacagagctgggaaaaaatgcacacagagagctctctggatccagaacgagtctgcttcagcataccactgactgggtggagtggggtggagtagggtgtttccaagaaacaacaggaagattcagattgaagactgcactagggattatcactttttctgtgaccagctggcaggtaggggtgccactgctggggcacaaagatgcctgtgcctcactacaccattgtcttgtgtttgtaagtggggacagacaggagaccctatgctataaaaaggagagggagcaagacccagtcaccaggaaggaggctggcagaagtgccaggctctgtgcagaaaaaggtgggcagccatgaagaacaagacccaggccaagggctggttgacctgggagccaataagcagtgatgctgtgggaagacagcaggggtccccaaggcttttggcacctgctttgattggcagcaagtaggggtaggaggggaggggggacagatgttggaactcatcagtctttactagtctccaaacctcagaatttttttctcagttgttcagatggttgtggttcttgggaacctgcactccttattttagtcagaactggctcagaacctagagcaggactggagctaagaacataagctgaaggatcagtcaatacaactatgagggacagagttgtggatctctccattactgggaaaccaggaattgttaccctaatatatcctgaatgttaatcagcttttattcattcatccagctgatattggcccagtgcctgctctgtgccaggtaccatgcttgagttaaagacacagacctgaatagatgaggttcctacccttcaggacctcagagtctagtatgggagacagaaaaccatcagccccaaccctacagagctagtgctggtgctgggaggtcacccagcaggcagtgcagaggcccttaggtatgtgagccaggaaaccagagcccatctctgtggctggagcctgtggctgggaagaagtgcagggcccagcccccagagggctttctcagccctggtagggagtaggattatcttgagaacagaggacagccattaggtatttttggcagaggctggcatgctcagattcatgtttttaagacaatggctctggctgctggctggaggcaggaagtcaggaaggaggccactgtagtgatccatggcaggggatgaggacttggccttggtggtaaccagaggaatggtaagacacagagagagagagatctaggcatgcagagggtgtgggggagggaggagtcaggagtgattgcagcttgggcacctgcgtagatgctggtgtcattcccagggaggcggccccagaaagtagcagcttacagggcggatgatgcatggatgtgagggcctgggatccctctggtgtacagcacacctaggactccagttttactgctatatgacaggagacactaggtgacaggagaaagggttggatggggaaagtaggtatctgactgccaacttaatccaaaactggactcttagttattaagaagtattcagtctttccttactaagcacttaagtttaagaagcatttttgcttgcattgtgttattttaaactttcaactatccatgaggtgtgtggagccattatttcaattttgtacctgaagaaattgatgcatacagaggctgttagaacatcatcctttttcatttacaacccttgaagccatctttaagcttggcggctttccatgcaggttcttccaggcatgagactggagagtagtaacatagcagtggaactggagtcctagataggctgtgcctaaatgctagaagtgtttattggatttgactgagactcaaaaaaattaactcaagtaatagccaaaaacaaacaaaggcaaaaaggagacatgagactttctagaatggttttctgaggtttacagaaatattatcataaagcttttatatgtttgttccaagggaagggcctctctctgttggatgttgctggcttattatattttaatggccttggcaatggatcgttcatgcagaattgcatttgcttccttaaaaaccattttctatagatttctattttcttctccaaaattacgtagagggtctttaggccaaggtaaatgtggataatgcaaaagcctgtgagtctgtttcagtgggaaaaggtcaagcaaagtcacaccctacactgcatatacctctactaataatataaaagtgcttctctcaattcttttatttatgaccttgggaaagtctctcttatgagttattgtatctagtgtggtgttactggatgctgaaaaacacttcatgaatacttcttgcattcaaaatttcatcaagaataatcaacatgttcagttttatttctgttcattttttcttgcatggtgagctttgagaccttgtacaaaatccctgatctttctgggcctcatctgtgaagattatgatgatcacggagccctgtgacacattcctcagagatccaggtgctggctggtgaggagctggacaggtgctctgtgctgaaattcaccaaagttgtgaagggtatgattgtgttcaggcattccatgcccttggaattggagagcattaggactccctaagacagttggggaaaagaggaaaggaaggggcagtgggggagtttgtctttgcatatgacaagtgaccatctggtgtggggtgtgaggctcaagtccttgaaaaaaccctcgttccttgttggccagctagatttttacctatcatcatttctgctgaaggatggctactagcctctaagagcaagtcagctggaagcattacagcatagggttcagttttaagaaaggaaaccctaactcagatgaacagcttcattcacttttaactgattgtctaacaaacctcctggcttatgcgtttctctgtccagggctatttcagaatatctttcagaaataaaagggtagtaaatgctgacattttatgcggcatgtgtttctgtgccttcctttcctcaacagtagtgtcctacttctacttggtgtatgtttcctgaatgggtatcgaggacatacagtgttgagttgtactgtagtttggtgggctgtggaaccttaagtaggctgtctcctccaacatgcaggtggaacagagggggatcttcaagaagcagaggatgccgtttctttctttcagtcatggtttcttgggtgtggacttcaggaggtccatatgtgtgcttccaggcaagcgagcacatgtggcacctaccataggaagacagcagccctcagcaggaagcagccctctgcgcatcaaagagctgagccagcctaaggccccttctgtgttcaccactcctttgtggctctggagccttcatttgagccttgatcaggcccactcacctgttctgctgggattatccccagctgagccactgaaggggtcaactattaactgagagggtagagtagaagagggtctggctatgagagtgagacccacattttgggtttcctggccagatgcttcaccttagtaaaacctttccttctagtactagccactgacctgttatgctgggattatccccagctgagccactgaaggggtcaactattaactgagagggtagagtagaagagggtctggctatgagggtgagaccaacattttgggtttcctggccagatgcttcaccttagtaaaacctttccttctagtactagccacttttttaaaattaaagaatatggatttctctagtaaatagtaaatttaatggtcatgtggcaaatcacaaacaccccagacctcttcctgttgtctaattgaaatactaagcacacacttttgcagacacttgctgagtatattcttagctgacttgtgttgtatctgaaatactagacaggaatggtttaatgagtattcccatcatggcaacagggcattttgcttgtcacttctaattctcacatctaataatgcatttgatctacaaattagactgcaggattcttgtccaagcagcatcaggggccgggtgggttgagggagaattcaaacaagataaatgctctttctcaattatctcttcctcttcccagaacctcccagaaggagcatttctgtactaaaattgcccaaagaagtcttcattttctactccctggtaatggtgccaagtattgaatttgcatggaaagagatgatattgcaaagagacacattagaatacatttcacaagctataaattgcttgtcagaagctctgtaagccttgaaatggactctgtcctgaaatgtctcttgtgcagtgtgtgtttaccttctttttccccaacctgccagtctgtgctcattctgaagacacagagcccctcacactggatgactgtgaaaggaggtacatctggagctccaagtcagcccttgagcttttgaagctgccactaaatcttgattcagagaccctgcctagagtttttgctgcttgttcatcatcagcaccctaaagcccccaagatgtcttcctggctgttttgcatgcttcctgggctccctcccttttccctgatgacagcaattgccaggaagggctgggaaagatactcacccacactgtaagggatagctatgcctccccaaaaccctctcccaggtgaactttgtcttcaccaggcaagttcttaagctgatggaggggcattcaggaaaaatccagggctttactctgggaagcttttggcagtgcttgggaccgtctaggatccctcttttaacatgtggctcaggttggtcacccagaaccctgtgaagggaaggtgaaggttcttaaagtcatggtacatttcctgggtgctaagtatgtcatatacattagttcaacaaatccccagaaagtcaacaaagtaggtattggcccttatttacatagtaggagatgagatgagagaagttcattagctgctccaagtcacccagcaaataaggcactgagcttggatttgaaacagtttatttggctctgaaatccaaaatatttccaccatctcattcagattacctaggaacttgaggttaccaccaccagcttctagaagctagtctgtcttctgtgttcccgtcgcaggagtttagtctgctagtgggcttcatgttccaggaggtccaagtcctttggtacatcacagatttgtacttagtagtgactccctcccagaatctcccagggagctgaagcctaggcctggtacctctggccctgttgtgctgaacccctccctgttaacctcaaggaagcaccaggttcaagaggccaaagaagagacccacagccagcaaacaagcatagggttttattaggggacttacatacagaagagagagcccagtagtgatgggctagacaggagaaccaacttatgtacagaagcagttcagtgtcatcgggctagacaagatatccaccttatgtacagtccagtgacccagtggctgcaggctttttgcagaaaaaccacaacttcatgcaaacagcgtgaaatttatatagcatttttacttaacactctccccttaataaccaccacctggcaatcttccttcaacccaaaacccaagacctcaatcctctctatggcctgtgttccacaggaccgaacaggggctcagatgttcctcatagacaaggaatgcatctccaggatgatcatgcccagattctctagttggaacatacattcagttccaactatgcagaccagctatgcagggtcattctaagggtatgcttaagttattgctatcaggtatgtttaccccgtgaggggatcctgggaccaagtctaccattcccagctagcagctcctgctctcacactgggatagcagtgcactttacctgggctcattcttgtctcaacatttttcaaacagaagtgagaggcaccaagctggtcatagtttacttctctcccagtgtctgttctcagactagctacaccaccattgcaattggatgcaaaaccagcaatagcaatttgctttaaactcctaactatccagaggcaatcatctatgctttcctctgctcttaagataaagacagaactccataacatccaatgaaggcctgcagggttggcccaccagcttttccacctgtatatttcccctcacccctctctcttcataatgggggacactctgtctttcctactttcctgttacctcctaccacaaggcctttgcacgtgctatttcctctgcctggaaagtttccccttccctcccccttcacatgtcccaattttattctgctgttcagacctcccctccatgccacaactccatcatcacagactgctatccagtgagtttatgtccatctggtgatgtttaccccactggatttagctccctctgtttctgctcatcttgttttccacagtttgtggtacatgataggtgctcaagaaataagtcttaatagctgattatttaatttttatcacaaccctatgaaacaagactgttaccatttcccttttgcaagtgaataaatggagactaagaggctgagctggaactcagagcttggtctgtctgtctctaaagctggtgtttattacaccatggcacctccacgccctaactcctcagtcttgcctttggccttccatcttggcttctggagtaatgctgtccacctcccctgctttgcagcacaaggacatctgttgctagtttggatttttgttcagacatctgcctgccctagtgcccaggggtccctaagggataggaatctcatgtttagtcacctccttctctggtacctgtggctattcctgcccaggacattgtagattctcagtaggtgtttgggaatcccattcccctctgtttcagccaggcctctatggattaccagtgacagaaaactcaacctcgcttaaagaaacaggaatatatattagcttgtgtaattgaagacattcaagagtagactggattcaggtatgactggattcagagttcaaactataccttcagggctcagttcttttgctgttgctttctgctgatgagctgcagtttcagacttcttacaatagcaagatgatggctttgccagagctctggcccctctgtgtctcagccactcagcctcagaaaccacctccctccccaacactgaacaaaggtcctcagcatggctaacacgagtctgatgtgaggtcacttgtctcctcctcacctaattgctgtggctggggagacaccctgattcaagcaagacccattcttaaagctgggagtgaggtcagccccacccgagagcaagagttgggggtgaggggaggcagggggacacttttaccaggaaaaggattaatggatgccaggccttgaaagccagctttccactacaatctcctttcaagatttttcaagctgaccttatacctcctctgactctgacttcccattcctcaagtcccttcagggaagactgtcaggcctggggctataaacaggtcatggcatccttctttgagcagagagggtgagtccgcttctagcttctgccttcacaggttttgctgctctgagaacccccagctaatgtgtgactggcacatccagcttagtgtcatacttccagacacccagagcccacgagcctggccctgaaaagaggggcaggaccccaggagagggtcctgatcctctgccttcacactctgagaagccagctttgttttaaaggtagtcatggggggagaatttcccgaagcccctaacgatgctctccagggagctcagagaggtttctgagaaatgcgtgggcaggggctgtgtatactactccagcctctacacagccacccccaatgcagagacaccacaggcagacatgcagtcacacacatctgcacactcactaacactgccatctctctgcctccctcgattctgcccttcctccctctttccctttccctctttccctcacagtatgctgtcacacacatctttcctacatactccacagaccctcttctatcctcctcttttctccctctgccctctcccacttgtccttccctccttctccttctcctaccacctcagcaccttccctctccccatccttttttctcacacacacacatccccatttctctcacatacacatacatgatatacccaatctctctcactctcatgcacacttccccctcacactccataccataacactccaccatcccccctcccccagactccagcacccacacccccaaccctgagccttctgaccatgtctgtgactgctgtcccttcaaaggttggccttcataggttttctcgggccattctacctctagatatacccgagatggcagtcaaatcctaaaccggtgttccatcctcaaagagcagtctcacgctctcacagagtgcctcaggtgagagggctgtagtcaaaaaaggggtgacctgggcatggtcacacagtcactgtgacagcggtggggatgaaacccggctctctggacctgtagggcagtattttctcatgtctctcttctcatttgaagtgcatctcacacatcctgaatcctcattgtgtaataagggaggtgctgtgaggataaagtcaaatttagcatatggcaaagggagcctcataaatcaatgcaggaacctgtgtgtacaggtaattttgagttcatgagtttgactccccgcaaccacagcaaaatgaccaaagaagtaaaagatcacttttaatgggtctgtttcagctctggatacaggaatggccgtctcaggccagaattcctgcatgatctcactaggaggactctgtggtgggatatctggaccagccccaggggagctgctatgagagcagcctaagcaagtagggtctagcctggcagattccacagggcctgcatctcagagcagcagggctgagagcgtggatcacaatgtggcattgggcaaaggcatcggcatctttgaaataatgaaaactttcttcaccaggcaaaataacaactgtaagaaaaatctgggcactctgagatgtagcttggcaaagcttgtgctgcttggcaaagcccctggtttactgtttgggtgaagcaaaacgctccgcccatcgtcctaactcctcaccttctgcatcagcttgcctggctatcagcagccctgccaacaactcagtaaaaggctcctctgttgccatggaggcttttgacttcttcagtgaagcctagaccttgactcactgcctttgcaaataaaaccaaccacgaccaaaagaagaaaagcttatgggaataggaaactaattacttttctgtataatagctaaaattattgagagctgactcctgtacggttctaagcactcacctaccctcacaacaactctataaggcagatatactttacccattttacaaaggcagaaactaaagaaagagagatcaagtaacttgcctgtggtctcacagagaggaagtcaaagagtcaggattcatatccaggtatgttggctccagggttggcattcttatcctctgacctatagtgcccacaaaagagttcacaaatctgtgggctttccaaagagtgagttctaaggtactcagttgaatcttggtcagtgttttcaattttggtaggaaaaaaaaaagtcccctctcaaagcaatttattcaaggcttctcttgggagatatttctggctatatacagatggagtagatctttctattcagagccgtgaagtccaccacgatgggtaatgttaaaataaaaaacaccccctctccacctacacgcacgagatctttggccaggctcccaccctggaggtggggattgagaacaaatgtgcacgatttccattcctgaggaagtgtcccacgggatggtaccagagctcagagcctcctgtgtctctgtagacagaagtctgcagaggcatggaaatgctgcagaacccatttggtggtctcgtctgttcaaactatttggactctagaaggggtacttgtgatcctccactgacaatatgagcaacaggggtggaaaatgagctcagtgacttaaagagaatgaagtgttgccacaggaattcagctggaagagtgttagagagagctggtgttcctcatctgctcttctctgtcaaagcaaccctggacactctgatctgagtttagtactgcactcccttttaaatcagagttattagcactttcactatcaaaatgaaaagtcagaatggattagcgggttggatgacctgtattgggccccatcagagaccactccatgatttcaacttatttttcaagtcaaacaacaacagcagcctttttgatatgtatatttaagtagaagtgcattaagtttgcattttatttgctaaatatacatttctttccattttttaagaagtaaggccattgatttttgccagaaaatgaggcatgccccttttcaaagtttttatgtatagcctgcatatgtggtatgaacccatttgtaatgcaatacattccataaaagtgtgagcagaattttgcatgtgtgcatttgtctggaaaagagggaccctttggtagcagctgtgggtagttggcagtgggcaaaaaaagactgatttttttcttccctcctaacactctgtttatctgcagatccttttctatctaagttctacataaacagtgttgcactgtaagcaaagtgccctgggtcttcatgaatattctgaatcatccatgcatactcacagagggaagctagtgctaccaacctcttcacaataaaggcatatgcatattcttcctgatcaaatattctgtccccttctctttctcaatttttctgatcaaatattctgtccccttctcttctggatgtgtgtatctctctctgtctctctcattgtgtgtgtgtgtgtgtgtgtgtgtgtgtgtgtgtgtgtcttcttacagatcagagataaaatgacctaaagaaatatctgggattattattgacattttacagtcatttccaaaaatgcaaaacaaacagctatctccaggcatatattaagagggtgtgtgggtgtgcatgtgtgtgcgtgtgtgtgtgtgtgtgtgtacatttgattaggaatttcaagtcaagatctcttgtttgtttcattcagcaccagaatgtaattttatctgaaaagtatctggttttggatagaaaacaggttggcccagctgagaactggcatttggaagtgcactggacaattaaccagcttttcctgtagaactttctggtgaccacccgattttgccctgcctatgtagaagggagggggacccacatcagaagaggatgggtgttgcaggaggcacatttcaagaaagtgtctggatttacaaaaaaatgtgtttcttcttagtctaagatagtttcttcataatttatgtggtctgagaaaaatgctatgcttattaataatagtactttgcagatgagagggcactaatatttgagcactataatatgcaaagcattgtaatttggtggagtatgagcatgatgtctttaggtcctttccacaaatttatgaaaccagggtgaaggtgaggatgatagccatttgtacaaataaagatactgaggttcatagaagcaaaataatttgcctgtggccacagggctagggagtggtcacatactctccatcacagtatatgtttacacatgcactggagtcaacatgaatggggccaaacatatatatacacacactctcgtgcttttcttataccacagggagtgtactgatttgccctgcccaaaaaagatcccctgagatttctcttccaattattcccttccctctgtacagtctcttgctgctatttgaagcatgtttgtattaagaacatttagctaaagcaaacctcatagtctgtgactgacaagaaagcacatgataaaaccatgtctttggctcttccatatcttgaatttacaaaccaagaaagtgggaaaaaaaagtaaaaattcatgtaacatttcccctacaaagttgtattaaaccgggcagctttaaatgagctttggtgcctctctctccctgttgcacatgtgttgatggatttttctcggcattggttgtctgagatttcacagctctccgtcacctcccttctgaaactggtaatagaaacgagcagtagcactgtgctgttccttcactctggtattgctctctacccagagccctgtgtcttttcttaagaagactacctggcttatcctctgtctgggcttttctggccatgaggacatggagtgaagattttggagctctgtgccctgtgtcctggcgtttaattatttctcaagacacgtgagctaaatttgagtagaagagcttggcagaaagaaaaccaccagttacggtaattttaataattaagcaacattgacttgtcctttatttcacaatttgctattattgattatgtactataatcctttattatacattgcctgattgttttcattgatgttttgcaacagaactatgtcaattttgtcctattttgtacattttttagcattttgcatatgcatatctgtgcaaacattaagaaataaatcataaaggaagagcattttaaaccattggctctatttcaacaatatgggtggaaaaagtatttctcctctccttattgactgctttacaaaaacaggtagaattttattcttttattgataaaacagaaacctgatgtggtgagggttgtagctgtggctgcctttgctgcagatgtgctatctctgaggctgggactaaacttcttagtttattccagcagggagtgggaaagtcacatgtgagtttaagaacattgacttactctgggctaacccaacatacatgttttttgagcagcaactgatgagacctgaatgttctaggaaatttcattgtgtaagcatggatttgacaaagatgacacagcatgatactatatccatcacccaggagggacattaagagatttcttagggtcctgaagctaaaaacgaagtccttggatctttttcttatttatttaattttattttaatccaagtcatgaatgtatagactttaaaacatcaaataattctcttgacttattgaaaagaaaaaaaagcccctcaccccactccaccccatctgtgctccttacacaccactttcaacttttagctttctttcagtatttacttccaaatttctaaataatatgcttaccctttttgtttttacagcttatatctttattttcttctatgaaaaggttttgttttcaacacctccaacactcaacacatacatatccccctttcctccattctcccagtatatctgcaatatagtctttgttacatcagttttctgtgttttattattataatcataaaaagcagctttctggtgttgctgttgagtcattctgatatttgatcctttctatgtggctttttcccctctttgaaagtttctaggctctttcctttggtctcagtgttataaaacttcaccaatgtctttcctttgggtctttatttctgccactgtacttgagctcttagagaaccatttcattttggatagcttttccaggcttgagaaactttcttgaattacatctttgattattttctttcttccattttctttgtttcttctgaagtaaagatattagacctctcagattaattctctagttttcttttttcttcttttttcctctctttgtcctgttttctggaaaatatcctcaatttcatcatcaatcctatcaagtgtttaatttacacaataatttctttatttctgagagttatttttgtttctatattccctttactatgtaatgctattgcttcatacctgcaatatattcttattaatcatttttgaagttttttttctccttcaactttctttattgtgtttgttttggtatttatctttaacgatagcaactttgctcaagaatcccatgacccaggactggcagtttacctttaatagtgatgcactgaaagctgatctgagggttagtgggcctcagtagggcttattgactggttggcttcagcctaggatgatctggctggactgttttattgggagaactgtcagtaggtctttttctttagagtcggtcagtttctcagaaaggaatgctccagtctcctactggggatgtaggtctgatagttcaggggagcccagtgacagatgggggccaaggccaagcccagcactcactaatatgtttcctgtgggtgcccctgcccttgatgtgcctggagccctggtctcagagtccctctatgctaacctttctaaggagtaaacctcaagtcttctgagatgaatgagggaagtatcctgggtaagcacagtataaaaggggactagaggcctaactatttcatctgcctgcattctcacttccaaaggtaactgatggttgtaattcctgagccttgatggggctctgatatatgaatcaggcttcccactgcagcatcaggatttagcttctccagggtgttgagtcatttacttatgcttcacctgctttctagcttcccagatgttattactgtggccccataggagttttgacttttgtatcttgtttgtattttaatgagatttaggagacagcagaagtaaatgtgtgggtttaatttgccttattcaagtggaagcccagtccttgactcctggttccagtagtggcatttgggccagatgaggatgtccctgggaaactgtggcaacaatgtaaggttgtagaagtggtacaagatgtgatttctctgtagcagccgggagtgtcacctctggcatctcagagttaggtatgtacaccctggagaaggatggtgctaggggaggcctgataggggattcagcaatggattgcaaacttattttgacccacattaagaagttctatttactctcacaatctaagagacagatacctacacactcctacaaacaaaactgtacagaaaagcaaaagttttacaagacagtactaaccccttctacgggccaagcactcaggtatttctattctatttaggttgtttgtttgttttcaatgatggtcttgacccactaatgtgtcacaagcagaagactgaaaagcagtgtcacttgaggtgacatccagacacctgcagtatatcaccactcttgccatcttcttgccctaaaactttccaggattctccatcaacccctgaacatcacattcaaggccttcagcacctggctccagcttgcctgtcaaatctcctcccacagtgtgcccacctagtatacatgcttttcacagcagtggctcctgcatgctttctaccctcctccctgcatgtacttcaagcacaccaagccttttaagatagcattttctctgcctaggcacccttgccccactgcctgccccaagaactctcatacatactcttaaagacccagatgaaatggcagaacgcctgtgaacttcatctaatgtacacactcagaatcttgggaaccttggggtctgaaagggcatgaatgttttttgtttgtattgtgaagataaaatccggccacagaactgggcgtggtggctcacgcctataatcccaacactttgggaggccaaggtgggcagatcacctgaggtcaggagctcgagaccagcctgaccaacatggacaaaccctgtctctactaaaaatacaaaaattagccaggcatggtggcatgcacctgtaatcccaactacttgggaggctgagacaggagaatcgcttgaacccaggaggcggaggttgcagtgagccgagatcgtgccattgcactccagcctgggcaacaagagcaaaactctgtctaaaaaaaagagaaaaaaaaactctggctacagaagaacaggtaataaattaggaaaacaccaagaagaaaattttgatataaaatagggttattaagtggcaagaattatctagtaacctttcctacagagcaatatttttatgtaaaaaaatttctagaatgttgacagtatgccatcaatatggtagatacactttaagctttatgaagcaatatcctattgttaaatatataattttgtaactacttttatgactcactgtgaagaactgccttgtgcacatctttgcacataagtctaaatacctgtaagtactttggattcttgatgcataccaccaagtctgtctcctggaagaacagatcagttcaaaccccatgtgcaggagagtgcctgttgggctatatagtggccacttctaggtattgtcattttttaaataccatgtctctggtagttttaaattttagtatgataatatatctcaatatttattttatggttcctacctttagtgtcatacttagaaaaaacttccagaaacccaaaacatagatcatttttgctagaatttaaagtcaccccaaataatattctccattttctcagtgagaagatgaacaaaagtagaattcttatgtccatctttgatacctaaacttttagaggtatagatgaagtaatcggtgtctacttgcaatgtcaatctactaatatcgtaacaggcacacttctaaagtcactaattatgtatagtcatatactaattgggaactactgtgatttttcttttctcatttcatgaaccagttttacccaaactcttgttttgtattttcagtgtcaacattctctgtcaacattctcatcatcatcagacccattctgagtcatgtaacacagttttcctggcacagcaggtgcacttccgtctgagttatttttaatctaaacatacataattctgtcactgagatttttaatccaagacacaaagagacagtcttataatattagcttctaaacttgtcctgaatgcgtatattgttcttgacaataagacaacttatactgtgctttatttttacattgttacttttactaaagatatatttgcagtgtttaaggagtcaagacttgttctaaaaagcctttcaactttttttcattttctctttttttcatccctcttccctcagccctatcccaccccctaaaaccatttttaactgtttcactgattttcatgacaacattttcctctatgtaggtgcaggatgtatatctatgtaggttgcctgtgttgttccttgttaattattcagttttaggcatcatctattacttctcatcatggaacaggagaatttagcctcttccacctcatcctgcctcccttcccattcccatacctttcagtaaagccatatttctattattatatctgtataaatgctattatgtctgtataaatgcttcccagctgagccatctcctaaattgtggttaatatttttctattttaaagtaaaatttttaagttgtgaaatatgtcctacatactgtattagtccattcttgcattgctataaagaaatagctgagactgggtaatttataaagagaagaggtttaattggctcatggttctgcaggctgtacaggaagcatggtggcatctgtttcttgggaggccttagggagcctttactcatggtggaaggcaaagctggagcaggcgtctcactggcaagaacaggactgagagagagaggggaggtgccacacacttgtaaataaccagatcttgtgagaactcactcactatacagtactgtattagtccattctcacactgctttaaagaaatacccaagattgggtaatttataaaggaaagaggtttaattgactcacagctcctcatggctgaggagacctcaggaaacttatgatcatggtggaaggtgaaggggaagaaaggaccttcttcacatggcagcagagagagaagagtgaggcaggaaggggcaagaaccccttataaaaccatcagatttcatgagaactcactcactatcacaagaacagcatagggaaactgcccccatgatccaatcacttcccactaggtctctccctagacatgtggggattatggggattacaattcaagatgagatttgggtggggacacaaccaaaccatatcagttaccaaggggaatggtactaaaccatttatgagaactctactccatgatccagtcacctcccaccagaccccacctccaacactggggattacaactgaacaggagatttgggtggggacacatatccaaagcatatcacataccagagagttataatatatatttgtatagcttaaataataataataaagtgaatatccaggttaacaaaacaatcttggcacaatcacatcccccttcccttcctcaggcccccgagaccagtctcacctacatgtgaaaagaacacaaaattgcaggaaactcaacagcgtaattagatttgttatttcttcttcagcagaagagttaagaagaatttttgtttttggtggatatggagatctaatatgcaagtcgtttgaatttttatgtttgtgtgtttgttaatgctgacttttgaatagtcagagaattttgcctgaacagtatttattttgggctttgtttatggctgctgggatgtgattcatttttataaatcttccttgcttatttgggggaaaaagtgccctttctgtttcagaggtattgaattttatatattctttcataggtatatcttttcaatcaagctaacagtgtccactttccttctgttcttatttaaattgtttgtttggtccatcagagagtgagagagcttttgaagtcccccattatgctttttaaaaatttctctttgtttttctaacagattttattttatatatgtaaattttgttattcagcctattatattttaaattatgtattattcctttttatcactggaaacacaatcatccatgttatttaatgggcttttcctgaattttgtttcatctgatttgccctccttttttctttgtgtccacttgatgctttctggcctttttttcatttttaatcttctctatgacttttttgatatgctctttatcaacagcatataattggatattgattttattatttttcaagcatctgtctattaaatagaagctaaacctattgacatataagatgataattgatatgtttatcactctttacgtgccttatcaatagattatgctagtattgcaacccatgcgctcaactttttaaaaacttgaatggtgagggcagccaattgtgatggctacatattgacctattcataaattctgcaagtagttattgaatacctgctggggaccaggcaccaggccaggcactggagatgtaacagagaacattacagtccttgccctgtaagtagggccagtttcatgagattgcagtcactttatggcctccagcttggtttaatgctctgctgttgttgtcttgaaactctaattttcaacaaaggaccctgaatttattttttcactgggccccataaattatgctactggtcttgccataaagttgtataaaagacagaaaacaggaaatttcaatatggcctaataaataccttaataggaatcagcagaggggactatgagagcatagagggggctgatcttggaggtcttcttgacagagctcatcactgggctgaatcagatgaggagtaggagttggcctggctgaaagagggaagcagaggaaatagcaggtataaggcccatggtctttagacttaatgatgtctctggccagagcaaaaattataggtatccctgaacaaagctaactgaaagcatcaaggccagtagaattacaatctaaataatgtactgttaggggcaaggatcaaagaaacattccagatatctgcacaagatgctaaactaactgactgcattttaagtcagaattgacagatactttatacaaggtctaatgccaaggtaatgggaggtgagtctgagggagagacacaaatcacagactcagaagggaatgctatcacaaagcattctgctattatcccaagttaattgggagtcatctttctaaaatgcaaaaccaactgcatccgtgtcccacatttgagaatggccattctgacattagcatagagaggggagaggctggataagcaggctaattagaaacctttgtgtggtgatccaagtgggagacagaaggaaagtgttagcagaggacatgaagtcataacatagtttcagccaacatgcaggagggaaaagctgcagcacttagttatgagttagcagtgtttgtgagagagagagagagagagagagagagagagagagagagggtgagtcgaagatggcactcactgaagtgcaggatgtaggactacaaccagcttgtgtgaaaaaagacagagtttataatttaaggcatgttgtgtgggaagtgggagacagaagtggaaatatccaatgagcagagctgatggggtctgtaggggtcttgcagagaagagatgccagctgacaccacaggcatgaccctggggtgactccacttcttgtattgtgcaagtgcagagatggaggtctgggagtgctgacattcaacaaatgggcagaggaagaggagtctttacaaaaggctgaaatggagaaggaacaatgagggacagaaaggaaaccagcattatggaagtcagagtatcatggcagccaaagtaagaagtgcatttcagaaacaatgaggaggttaaacacctaaaactgtgggctgaaacagcagaggaagtaagaccagcaaagcaaccctttgactggggagagcaatttcagaggaatgaacactggattatttaaggagggagtgggaagtgcagaagctaaagttgcgattgtaagcattaagactcctggtttctgcattcatgctttgacttgctttcctggagagactgccaattcctagagatagtaaatggctcacatatgggtgtgcctttcagatgcaaaccaaccagtccagagcccacaccccaccactttctctatggggctctcacattcagggccactgttcccctgccccaatcaccccagggctaggtaccagatagagacaatccctttacctcagagcctactgtaattattcaaacaagccaaccctaagtctctttcccttttctcatctgttcctttcctttgaaacacaataaaggttattacccacttttactcctcactctgcctcttttttttattattatactttaagttctagggtacatgtgcgcttccccatgtggccctttctcttgggatctgtgagtaatgaactgtcttttcaacagcagtcatcttctgatctattggcctcaccacttctgaataataatcaaacctacaccttaaaacaagagggaaatgtagtgactgagagaggattgaggctttagtatgttcatttttaactgatgagagagacttagtcgagttcatgctaagaaggtgccagttaagagggtggagtcaacaatgtaagagagagggaagaggaatttggggcaaaagtctgaagagatgggaacagatgagcccagagccattgcctttcaaggaggaggcagagctggacacagtggttcattcactcctgtaatcccagctacttgggaggctgaggcaggaggactgcttggggccaggagtttcagaaggagaatgcaggctcaggccagggaaggttgatgttgggaaggatatgctcccaaatgtgcagaggaggccccatttcaaaacaaaccctgtgtccttcttcctggcactactgctaagccagatcaccatccctagcctctgtcctccatagtctcatagactcctctggaccagcccataatgaccactgcacactcccctaggacttggcctgagccatgcatttgacactgataaatcttgctgtgggttgtctttatggatgatgaaatgtccttcccaccctactacaaggaggtagtcttagtcatgtccctgctgtcttagctatgtcctcaatgcccagcatcaagttgaacaggacacagtccctgcctagggagttcctgcaggagtacagggcagatatgtgtagggaaaaagggtaactatgataagtgcaactggaactgactgcctgatgcccaccatgggccttacagcctgttacctcatttcttactcacttctgcccaccagtgggccttttgggacaaggccctgccagactcattggaaatacagcctcaggcaggaatggagtgggaagaattccctgagaagccagggaatttttactttgaaaagcccttttatctgtggctgtgtccttggaaagggcatatttgcatttatttgcaggttactttgcccagaagtaagcctgtttttatgaacataataaaaagcactggccttgtagaaaaaaaggcctttccagtctatggagaaatgttcagtttgaagcaagtctagtttagaggcaagaggccaaggccaaaagaagtaacctcaaaggatcagttatgtgagtaagagaaatcaagagtagaagtaatgttgatttctaacctcaaagatgctcaagacacttaaagttggagaggaatgggtgattctgtttaacttgctcagcctgctgcagctgaggtcagaagcccttgcgtacctggggatacaacacctcccttcccagacatctgaggcttctcctaccaaccacgggaggcctgggcaccctgtgtcctctgacccctttcaacagcccctcttttcacaggcccacatacatgtccaaggctgggacatggtgccagcttcctttatcactccacagcttcactgcagaaacacaggccactcctctcctctcttcctgacctccctattctattctcaacttcacttctctctctgtaattattctcaaataaccacaaatgtctttatgctactctgcagttcatgaaggggtgtgtgtgtgtgtgtgtgtgtgtgtgtgtgtgtgtgtgtgtgtgtagcgtactcatctaattttgaatgcaaacagatcaattgcgcatcttaatttccagatagacatttttgatacttctaataaagagaatacccagggtgttgactcaaagcatggaaaaccttcagtctgatgcctgaaaatggcaaagttagaccccagggtccccccagaaggcagttctttgcacttaggtttcagagttcctaggacattgccggtggtcagggctacagacaagccccctcctcatcattactgctcaggatggttcacaagaagggaaggaggaagttgtttagcagaatggctgcctatatgatttttggtagcttcgagaccagatcatttgtagacaagttaatttccctagagtagaaaacaaaatcccatctcttgatcagcttcttcaacaaatggtgcttgaaaaccgtttagaatgcattaagcttcaaaaactaattcttcttgactcagagatgagattttctttatgtccacctagaaactgtacagactaaacctttacaatctcaaaggaaaacaagattaaatacccatttgctagtgtattcacacaaaggttttgtgatataaaagaaattatagagttgatgggtgggggcagtatgttgatgggactgatgagtaattaaggatgctgaaggtggccagggactgtggacagtgcaggagtcccaggggttttgtagggtcttcccaggcctggcttgtgggctctgagtccccagtccacacctcgataagatggttcagcttttatctgacatattggagatccctgtagatttcatataaagaacgtttgggaaaaaaaaaagttacccaattatttggtacactaagtaattgagtaattactgtgctaagaaggcaagcaggtggtgtttatttccaggagttgaagagaaagtatactatgatgaaagtgagccctgggctgggaactagtggatttcctggccttgctaactagttgtgtatacatgaattgaccactttctctgattaggcttggtgatcccaaaggttctttcctgatctgaacatctgtgattttatatgcttgttacttattattaagtattgatgccctcatccacagaccagagaggtgagggtttaagagatttaaggtcctcagatgagctggggagttggatagctgaattgttccctgcattgcttctgtgcacccctgggttcttaatacaggagggactttagtggattaaggctggaacacacacacatacgctcatggaattctacaggaatagagaaattaatatctcatgagggggtggaggcgggggcggaggagggaagaagagcaaagggagggaaagaggaaaggagagtgaaagaagaaaggaggaagggacaaataagcacacacgttggccctaacagtgtttgactcacactggtcctcagtaaatgtttgtgagaactatggaaggaatgaattattgaactgggccaaccctcaatcagcaaattctaatttctactctagtagaagtaagctaggaatgggtttagcccatcacttcctaaagctggtaggagccattaccagccagctgcatttttgagcagtcctaatatttcaacaaattctggccatcggtgagcctgagctcgcatgatccaaggtcactgtggcagtgtggaaactcaaagaagtcatagatgtcagaggagagggttgacatattggcacgtgcagccctcccaggtccaaacttttgtgcctccataaggatttttcatccagtagagtgaatgctagaaatgtgggccagaccaactgtcagaaagttctgtgtggtaaacaggctgccctttctgtttctaagcaggtggcctcatgatccacaggctactttcatgactattgtacaagcctgagagcagatgttttcctctgaaatcaagtattagaagccaccctaccagaaactattaaaatctattatatccctcctttctctcgagcctgatctcaaacatgtgaaatccaggctgctatgaatgtggtgggaccaatgcagatggattccaggttttccatctctagtccagactgtattaagaacccaggggtgcatagaagcaatgcagggaagcgtcattaaaacagtttggttctgatacaggaatgggccttcagaacaatgcaaaagaaaataaaggtctttgtttgttttctgagatggagtttcactcagttgcccaagctggagtgcagtggtgcgatcttggctcactgcagcctctacctcctgggttcaagcagttctcctgcctgagcctcctgagtatctgggattacaggcacccgccaccacacctgggtaattttttgtgttttcagtagagatggggttttaccgtgttggccaggctggtctcgaactcctcacctcgagtgatcttcccgcctcagcctcccaaagtgctgggattacaggcatgagccaccatgcccagccaagaagaaagtttattaaaaagacctcagtccatggggagatttagtaaatgaagtgatgtctcagagccatatgggatagttatttaataaatactgctgggacaactggttacccatttggaaacaacaaagttaagtcccagtgtacattaaaataaattctagatggcccaaagattgaaatgttaaaaagtgaaaatatgaaagtcttagaagaatatatgggagagtttacttttttgtttgtttttttgtttttttgagacagagtctcgctctttcgcccaggccagacagcagtggtgctatcttggctcactgcaagctccacctcccgggttcacgctattctcctgcctcagcctcccgagtagctggaactacaggcgcccaccaccacgcccagctaattttttgtatttttagtagagacagggtttcaccatgttagccaggatggtctcgatctcctgacctcatgacccgcccgccttggcctcccaaagtgctgggattacaggcatgaaccaccgcactcagccaagaatttacttttataatcttagcgtggaggcagcctttctaggaaacacataaagcccacaaaacttaaaggaaaaaataataatcattttgacaccataaaacataattttctgcaacacagaatatagtcatgcaccacataacaacatttcagtgaacaacatactgcatatacaacagtggtactataacattgtaatatatttctactgtaccttttctatgcctggatatgtttaggtacacaaatacttacattatgtacagttgcctacagtattcagtacaattacgtgctgtacaggtttgtagcctaggagcaataggccataccatgtagcctaagtgtgaggtaggctatgccatcttggtttgtgtgggtacattctatgatgctctcacaatgacaaaattgcctaacaatacatttcttgtaatgtatcttcatcattaagtgataatgactgtataccatagctaacatcaaaagacaaattagtaaaataaaagtgggtggcatttacaatcttacaaatatgggctagcatgtttgtcacaacaaagtactagttttcttattaagaattttcacaaatcaatggcaacaagccaagaaagaaaaaaggagcaaagttcagagacaaggaagcctttgaaaagatgtttaacttctctaataagtaaatgcaaattaacaaagtattaaattttttcagattagccagtatcaagagctttggtagttcagtgttaacaggaagggggaagcagtgcttgaatgtgctttcagtgggatgtaaatcaatacagctccctgcttgggaagactatttagcaatggctgtcaaaattacaaatgcatatgacctttgagctaatcatttaatttctagaaatatgtgatatagaaatgcacacacgggcctaaaaatattaattgcaatattgtttgtaataacaaaatattaggaaactctcccaactgtctctcatttagtagcatgaataaactgatacatttccatagtagaatattctacaatgagggaaaaaagaatgaagtatttctgatatgaaatatcaatatcagtatatctgatatgaaatatcaatatgataatatctccaagcccaaaaatttgggaaatattcaagaaaaagttgctcctagtgtgaaattgatcatccaaggaagacaaatgtctcattcctactctctgtgtgtatatattacattattagtttaaaaataaaattagtattttaactaagtgtattattagttctcatgctgctatgaagaaatacctgagactgggtaatttataaagaaaataggtttaattggctcactgttccacatggctggcaagtcctcaggaaacttaaaatcatggtggaaggcacctttcacagggtggcaggagagagaataagtgcaagccaaggaaatgccagacgcttacaaaaccatcaaatctcatgagaactcactcactatcacaagaacagcatgcaggaaaccactcccatgattcagttatctccacctgctcccacctttgacatgaggggattattacaattcaaggtgagatttgggtgaggatacagagccaaaccacatcactaaggatccagagttagaatctaagaactgagctgaaatcaacctttaaaatatggtatttctattctcttagtttacagaagagaaacctgagatttacaaagtccaaggtcactcaaaaagctagactcaggaacaaacttggagattcccagtccctggttcacagttcttttttttttttttatgtgatgctctttgttgtagaatttatgtcacgattttattatggagtatcagtctctccaagtgggcttccgtaagagatcacatataaaacaccaaaactaggctctgaggtccacaccctcctgcccgctcactctgccatggagacagctcatgccactgcaggtaatgacaactgcacagcacgagcaaggttgagtagaacaggtatagaaattggcatggagtggtgaagagtctgaattcccaaatgtcattatagaagccagctgcagtgctccctggctcacaggttccctggggctgactatcctcctgggtctccagctgtcatcttttgcttgatccctggatgggggcacactcacatccctgtgatgtgttttgcccctgatgctggtatcccctagcactttacctttagccagctttagcctagcagatgcattcacacctcctccatgagttgtgtagaccttaggaaagtaagacgtggtctcaagtttcccaaggaacaacttacattgccccccaacacacacacacctagcagcataagacacatctctgatactgccatcttcagaaacttctagatggaaaacatccccctactgtaagtaactccctgccatcctatttatgtatttgtttatctctctttcattttcccttgtccctgagagtagagtaaggaaagggctcattgctttcaacactttattttctctgaattcagcagtcttcacctcagcacagtttagtctggcccaattttgataggcatgggcctgtctctttgcatctttgtctcaggctgggaggcacattttgaacctggaagtttagaacacggcgtcctttgtttttgacaggctgttaaggatatgcacagggctagaaaactgaatagaacatcccttgtggatgctgcaggttcttagccacaaattaatacacaaaaacggtttggggtgtatcccaaaaaccgttaaaatgacttgtttatgtggagaagttaaagcatttctctacaatctcataacattattgattttgccatgaacctcttttctcatgagtcattctaagatatttttcaagcagtttcccttccatagtttcataagtttggaatgagtggaggcccaacctctgtgaatcgttctcttgtgtgttctttccctcctgtctccgtctcacagtctcacatgagtggctgcacccccggctatagcttgtttgcagtttgctgccaatatgactggagcatccggtgaggccacatctgcctttcaatccccccgccctgatattgtaaaataaaagtttgttattttgacatttttgtagctcactgcaccaccctttggtggccagtttagaaaaatttgataattaatgaagatatcatacaccggttatgtaaaagcaggataggagtagccacaaagaccctggaggctgaaaatcaggaacagaactgagagccttacaaagtgtgatttcatcaaagccatatgatagctactgtgtttatgtaaattaattttactacgttgtgtcacaacctccccccttttaaaaagctcttgccctctgtagcttgaggcaaccttctgcccatcattgatcccttctttccaggttattcccatttctacattcttagctgttacattttcaaattgaaatattttattcactactcatgtccagtgtcctcacttaccttggcatcatttcttccctcaagagtaatattggcacaactaagaaaatatcatccattatcatcaatacagcatattgatgttctgacgtagtccatcagtgtagaggcagaagagcaacagcagcccttaggatgcgatggacataaaggcagctttatagccagacctcagttccaatcttagctccatctggaaaaaataaataactttagactcttaccctctacctgacattgaaattaatttactttagagcaaagacttcagcataaaaaataaacccaaatacaaagaagaaatcatgagaggccttactatggccccaaaccagaagctccataaaaataaaaacatctctacagcacaaaaatcaccattaacaaagtcaaaagcaaatggcagactagggtaattatttgtaatttaaattgcaaaaactaatttttctaacatagaaatactcctacaaatccaaaacaaaaagcccaaaacctaaaaataaagggacaagaaaagtaaacagaattttcagaaaatgcaacacaaatggctcttaaacaaatgaaacaatgcttagcctctctcataatatgataaatgtaaattaaaactataatggcataccagtgttcaccaattggattagcaaaggtcaaaaaacttgataacactgtatgttggcagaggctaatatgttgccacaagactataaattgcgataactcaaatggaaggaaattttgcaatatctgtgaaattcctgctgcatgtatctttcaaccttgctatttcatctgtaggaatttattttgcagatatatttgcctgtatgcaaagggacaggtgtaaagatcattccctgaagcactgacgtaatagcagattaggaaacaatctagatgctaatcaatagggcacaggttaaattaattatggaatggtcataaagtgaaaatgcctgcatgcccctaaacaggaatgaggaaacttttttttttccctgggttgaaggtttatttatttatttatttatttatttatttatttttcttttctttttttttaattattatactttaagttttagggtacatgtgcacaacatgcaggtttgttacgtatgcatacatgtgccatgttggtgtgctgcacccattaacttgtcatttacattaggtatatctcctaatgctatccctcccccctcctcccgccccacaacaggccctggggtgtgatgttccccttcctgtgtccatgtgttctcattcttcagttcccacctatgagtgagaacgtgcgatagtttgctgagaatgatggtttccagcttcatccatgtccctacaaaggacatgaactcatccttttttatggctgcatagtattccatggtgtatatgtgccacattttcttaatccactctatcattgttggacatttgggttggttccaagtctttgctattatgaataatgccgcaataaacatacgtgtgcatgtgtctttatagcagcatgatttataatcctctgggtatatacccagtaatgggatggctgagtcaaatggtatttctagttctagatccctgaggaatcgccacactgacttccacaatggttgaactagattacagtcccaccaacagtgtaaaagtgttcctatttctccacatcctctccagcacctgttgtttcctgactttttaatgattgccattctaactggtgtgagatggtatctcattgtggttttgatttgcatttcggaatgaggaaactttttatttactgataagaaatatctccaggatgtgttcttatgaaaagagcaaatagagaagtatgtaatggcatgttgacatttgtgcagaaaaagggcaaagggaatattttttagtattttcttatgtgtgtataagtgcacaagtaactgataatattgtttgcctctggagacgggaactggaggtgtggtgaacacaggtgagcaggagacttaaattttaaatcccgtggcatatctattcaattatttttatctttgatgagttcatgtcctttgtagggacatggatgaaattggaaatcatcattctcagtaaactatcacaaggacaaaaaaccaaacaccacatgttctcattcataggtgggaattgaacaatgagaacacctggacacaggaaggggaacatcacactggggactgttgtggggtggggggagcagggagggatagcattaggagatatacctaatgctaaatgacgagttaatgggtgcagcacaccagcatggcacatgtatacatatgtaacaaacctgcacattgtgcacatgtaccctaaaacttaaagtataataataataaaataaataaataaataaataaataaactaatacacaaaaagagaggatattggcttcaccattagccagcgatgtagcctttgttttcacaaaataatacctatctcatagtttggttttgaggactaaaaggacccagctcaatggcaggcttgtcataggcattcagcaagtggcagatcttattaattaattacactgcaacccaacaacttcaaccaaagtattttcttgtgaacaaatggtgaagttttattatattttagcctaatatagcaaaatccctacctttaattttcacagtaaactaaaacactgtgtgtctgttataactaaagtccagaattgcctaatattcacagtaatcagatcatcttcttgttccaacaaccagctaggagcttaatttaaaaggaaaacaccttacttattatataacttaacattaccattagtcaaacagatgaataaacaaaaaggaaattgtacataattttgatatgaatatgaagatgttatcagagcaaaacaggctcacatcagtgtgtcaggacatcggtgaggcagcattcgatgcaaccctatgtgtccctggaaatttggctggaggaagctgggatcacttatattctgaggatgatggaggtgagatgcagaaagataatttgatgtcttcaagactacacactgactgatatggttgaggaaagaatccatacgtcctggctgttctttgctatctcagttcccagatcacacagattagcagggggaagacacaagattgtccttctgggccagcttagctcaaatttttgcagctacagcaagaacagcagctatccaaataaacacagtaaattctcttactcacttcaagctgattctgacaaataaagaagcaagctcaatcagctttataaataagaatgctaaagaaaggttatattcaaatgttctttattcctgcctccaaataattgagactaaatgaaaccatttcattcccccatcccccagtcctgacaactgcttggctgaatatgagtcgagctcactgaaccatacagagaggaatgaatcaagcatgagggtggagctaagagccatggagaccagctgagagatggaaaagttcagggcaaggtcagtgccagtggcctcaagtctagagcaggccccttgagagccagatagagacagctaggcgggtcccactgaggcaggtcccgctagggaagaggatgtgctgctgtgcccacaccacatgaatagcacctagaagagtcctagaagggaccaagggtaccctcacacacccacctccagaccagttcagaaacgtattctcatatagatctatcttgggtaataaagtttcattggtttttatccctattaatacaggaccctgttaatactagaccccagcctcctacaaagctcttttcccacccctttctggcaagcatcttgacaaacatttaaggcaagcattttgacaactatctgtggcatctgtggattttttttttcactcttcttcttctgctcccccatcccaagaacaatctgggcactgtgcatccattcaccacatccattcccctgggtaccaccactgcattctttgggtgccaccctctcctcctgaggtcctctgctccactggacactacagccctttgcattggcaaagctaccttccaccaggtgccccactggtgcaaacccagcactgccctgtcagggacaggcttaggatgaagcaagcaaggcactcactcccctggcgtaccaaaaaactcagtagtagagacaaataatattttaacacagtattttttaaaataaagattgatgcaaaaaattcataatgaactaaatttacaactttcaagtaaaaaaggggtttctgataatgccatgctgagccatattagagactgagacaaaaggaaatacatgtccccaatagtatatgtttgtatgtatttttaagggttaatttttctagaatattaaaatgtctgaaaaatatttaaaaacaggaaaatagctatattaaactcacaacattatttttgtttaaatattttatttatagtgaaaccagaatttattgtaatgttactttcctggcctaaaatggaaccaaattcatcaataatattttcaaaatttactctttgcttatctcattttcagttgagagttttgaattctaatgagcaacattaactcagaaagtgtgatgcacataaaactttttaataagagatatgaatataccttctgaatttgaaagtaaatgaaaaagaaattggacatgtatgaattattgcatgagagtatcaattattatagggaaagtacatatgaaatagaaattaaggagattatagaggtcctaattttacatgtgaaatgaaaatatgagaaaaaaaggcctttatatattttgaatttttatttttaataaatattataaatttatttttacccaattattcatgcttcttgtagaaaatatacaaatacatgtaaatcaaaagaaaaaatccagattatcataaagataatcatcttattttgtcgtacttttttctacacatttttttctatagatacataattaaacacattaatctgtatatgtatgagttcatattaaattcacatttaaatatacttagtacaactttttctcattcatttgggggactaaaactggtctataagacgttttgattttttcttcatcttttaaaaaaattttatagacacataatagttgtacatatttatggagtatatatattttgatataagcctataatatataataaattaatgccatgttggtaaaaatgtggcaggccctatgctttgtaccctagatatattattttgtgtagtccttaaaaccacaataaagtagatatatttttttttaacttttattttaggttcagagatacatatgcagatttgttctataggtaaattgcatatcccaggggtttggtatacagattatttcaccacccaggtaataagcatagtacccaataggtaatttttgagcttttgaatttttcacttgagaaagtttattttgtatgaatacatctaatttacaaaaagcagccaatgatttggcttttgactattgtaatgatttaaatcctatagaaatgttatctgatatagttttaagcagcatgcaatatcaataatttgtaataaaaatcagcatcatgtttggatcttctaaaatggattcatacattttgcttagtgcaggcttatccaaatttggaagtggtcttaaggattttttttaacaatatcagtcaccctggcattttgtggaagaagtttcagtaagctgaagttcgttaaaagttatttaagattgtcctttggtcaagagacatttccaaacatgggcagttctctgactgaaaatggggcctcagctgggaggactcagagactgtggctggagcaactggagcccgccagccatccttctcgttccctgtggcctccccatgtggcctctccagcataagtctcaggatagctccccttcttacacagcagcccaggctgaagcaggttcactgtgcatggttaccaagtctgatgagacagagcacccacacacataagttacaagaggctggtttattgtttacagataggcagcaagggacaaccaaagcctaagatccattgtgagctgatccctcaaggctcagcaaagctgcctggggcagatagtcttgtctgcttgtctgtgtgtgccccacctgtagctaagggaccctgagaagcagctcatccaaggggaatcctcatttgctaggctaaagtgttgaatggcatcctgtttctagcgggtggatggaacaaaaccctggctcttctggccagttcctccctatttcagaatgccacattcccagcacatttgacagctattcctgagaactacaatcaagaaagggggagaactgggttggtgcaaggccacctccctggagaactgccttgtgcccagggcttccagacagagtgctccaggcatcctggaatggaaatgcaaacttcttatgacttagcctcagaaatcgcagaacctcacttctgccatattctagtgaatgaacaactcaccaagaccagcacagtttcaagaggacagggaacttagacttcacctctcagagggaagtgtagcaaagaatttgtggccatcttctatctgccccatcccaatggaaagacgcttccatcaaagctgtacttcaaagcatccagaagctcagagctctgagtcccaaacacagacacaaccaaaccacagactcacttgggccgggatcctccactactccaaaggccccttttgaatgctttctgtgatgttaggatcttttcatctttacagccatgaatggctctgtctgaggaagaaaatttcacatttggtcagctcattaggagaaagatcaggactggtcaccattgtggtcagggctggtgctggtggttacatggagggaggggacagccagttcagcagtgactggaacctgcctccccatgcacctgtgccaacccacacctttctcccagcatttgtttttggttctctatttgaggcttcttagggaggcttctcctggagagaaaggctggcttttcaaggtgggtatttaggatttggtgtatgcctggcagggatattctggcagagttgtgggtatgaaggaaatggattggatccagagagggtgagtgccctgagaccagcagaacacagctggggaagggcagctaggatctgcacataaacccccacctggcatggctgctgtgccagcaggcattcttaagtggctggccttgcagtctcctccatgactttgggcaagttccacctttgcctggctcagttcctttcttttttcaattgcctccctcatatagaagaggcagtgcagtggtgatggactctgcctcttactggtcacatatcctcaggcaggttatggaacttcagattcctcctctgtgaagtgaggattaataaagtgcttgccccacagggttgttgcaaggattgaataggttgattgtataaggattagaaccaggcctgacactcatacccatggtacatgtgatccagtggaggcatggggctttgcagccagatggagctcaaatcccagccctgccacttactagctctgtaatagagttctctagagggacagaactaataggatagatatataaaggagtttattaagtattaacttacatgatcacaaggtcccacaataggctgtctgtaagcttgaggagcaagaagagccagtccaagtttcaaaactgaagaacttggagtctgatgttcaagggtgggaagcatccagcacgggagaaagatgtaggctgggaggctaggccagtctttccttttcacatttttctgcctgctttatattcactggcctctgattagattgtgcccaccagattaagggtgggtctccctttcccagcccactgactcagatcttaatctcctttggcaacaccctcacagacatacccaggatcaatactttgtatccttcaatccagtccagttgacactcagtattaaccatcacgctagctatgtgaccttggtcatcttatgcctccttcagcctcattttccttctctgtctccctctaattgctgtagggatcggagaaattgcgcatagagggcctaggagcagctgcgggtaaatcacacacacgtcttctcacttctcttccaggcttttcttccttctcgctatttgtcagctccggcatctcacccttagcaagatgcttcacattaatggcagttgtcatgtatcaactgaacatgacacttccagcctctgagccatgtctgtctgcaaattcccagtgacatactcaggggtcccagcgtgagggctgttctcttccatccagattctcagcctctcttgacttttcagaactgattgctctgactctgtgctcaagggccttcatgctgtcagggctgaaggattcttatattccaaacacctggatgggattctgttgttttcctcacagcattgaatcagtactaccttctcatgggctcttaacgacctgcccaacctatctcaaactccatgtttcttaaagtgcaatccttggactcgcagcatcacatcacctgagaagttatctgaaatgcccattcccagaccccatccagacctcctgaatcagaaactctggggtggggccgaacaagctggttttaacaagccttccaggagatcctgacgcatattcacgtttaagaactgctaaaggttaagaaacaccttagcgttttggttaagatgaaatgtaagaatcaaacacatttccagccaagtctgtttttactgttaatttactgattatacctacatcctttcaaaaaggaatgaatgagggcttaggattaaacaatgatgttgatgataacaaaaaaatagcatgtattgaaaagttaccttggtgaggcactgtgctaattcccatgtgtttatgtcatttaatctttataaaaatctgatgaaatatttattctcgtcatttgtatctgaggaaataaaatttctgaaaggttaaatacataacctacaaccaaatttgaaggagaaaaaaatattcttttgttcttgggatttttgttttgttttttgcaaactgtatcattgtaccttaagtttatttgacggtccctgtatccaaggaactatttagaaataataattcctaagagttgagtctcactaggcagagtaggagcaagtgatgctagtagcaagggcatccctggggcctatcctcaatgctgagcagtcggttgggtgagctgccatcggcaggtgacagacccagttggaaagttctctgcagacctcagcaggcaggagacagtgcacactgtcattgagggaaactacctgcacagctttgccctacaaaaacatgtaacaaacatgagtcccaaatagatgtcaattattggccctaatgggtaaaccaaggtcctcctactgcccctatatggtggtccatatagaataacaacccttttgttttacttctttagaagaaaacacctttcttataatatgacttaaatctaatgaagattttcttttttctaagattaaatagctaccattttcttagtgcttaactatattcaggttctatagtagacgcttaagcatgttagatcaatgatgcctcatataactctgccagataaatattaccatctccatttttgcaggtaaggaacagggcacccagagaggttagcgacttgcttttggtcacttcggtggtaaatggtaaagtgcagtctgacaaccagcccaagttctggaggcaccaggatgcttttcataggctgcaaactggtcccagatgtagttcctttcttcccttctttgtagtcaagtgggtcacaattctacagagttagattcctacatgaaatgaaggccacttgctgtaatctatgaaattagttattagggttactgggatctggtgctcagaagttaacatcggtattaggtgccaggattttcccacccttgtctttcccctgctctgcattcccggttgggggtggggggcactgagccccacaggctgtgctacccagactcccttctcaacttggccaatgtcagcctatgcagggaggtaggagagcagaaggaagactacagacacggtacagcgtatttcctgtctctctgcctgaggcagcatctctagaagcagctacaccttttctgtggccccagctcccagctccaggatgctactcctggtaacactgcctgctccctcatccctctggccttgaggtaggaagaacctctctgttcatagcctctgagatgcctcaccattttctcccaggagccttagctgtttcatcatctatataaccaattgtctatattagagtccctctgaaaaacctagaatgctttctcttttactgctgttgagtgtgttatcagtggttgctgaatcttctaattctgtattctatactgttgtgtcaaacccctattaacctcagtagggaaggcacccggttcaagaggccaaagaaaagacccagagccagcaaacaagacatggagttttaataggggcttacatacaggggagagagtccagtggcagcaagctggataggagaactgacttatgtacagaaacagtccagtggcagcaggctagacaacatatctaccttcctacagtccagtggtggcagactaggcagcatatctgccttcctacagtccagtggtggtgatctggacaacatagttgcacggctcagtagctacaggctgggcaggaaaaccacaaccacttccaaacagcatgtagtttatatagcattttcacaacacccttcccttaatgacctccaccttgcagccttcatttaacccaaaactcagggcctcaatcccctgtattgcatgtgttccgtgggacaggccaggggttgagatatttgtaaaagacaaagaatgaatctccaggttggcgacacctggattccccagcttggaacacacattcaggtgcatctgccatacagggacattctaagagaatgcttcaattattgccattgggtacatttaccctgcatacacaaaccaaagcaaagctcacaaatcacattcttacagttttcaggaggtatacttcatttttcataaatcatcaaggtcgttttaaattggtcatggattttaattgctgctgtgcttaattcttttaccaacaaaggaatgttagtttagcttcatcattctcaatttagcttgttgcagattgcttggtgcaccttgtatgtgtaatgatttgaatttgtatcaatagtattattagcattgtattttcttataactattgtatctgaattttgaagtagaattttaattattcaattcctcttcaaaactttttatcacccagttcagttctttttccttaaaacaaaaatgacaaggggggaaacaagttaactactctgtctcttgtcctactaagtggattgtggtcaaaatttaaaagaaaaaaaaaatcatgactgggcacagtggctcactcctgtaatcccagcactttgggaggctgaggcaggcagatcacttgagctcaggagttcaagactagcctggccaacatggtgaaacccccgtctccactaaaaatacaaaaaaaattagccaggcatagtggggggcgcctgtaatcccagctactcaggaggctgaggcaggagaatcgcttcaacctgggaagtggaggttgcagtgagccgagataaaaccactacactccagcctgggcgacagagtgagactctgtctcaaaaaaaaaaaaaaaaaaaaaaaaaaaaaaaaaaaatcatgccacctccgaaaacacccagctaattttgctacacatgggaatcttgctaaaatgcagattctgattcagcaggtcacaatgtgagtgtggaggtctgagattacacttttctatctagcttctaggccatgcccacgctgctagtctgagaaccacactgggaatagcaagatcttcagcatatcacagagtctctcccatgtaaactcttagtttgcacagtgccctactgtgttggggaggaaggcctgggaatgccttgcttcctcactggcagccagggcctaagcagtgtttcagttccctccttctcacaactgtattgttttagtcgaatgagccaaaatcaacctggcattcctaggtgaaactttaatgtgattgtaatttcagtgctgttctatgtgattccgatctgtcttctaatgagaatacacatgtttacaaatttacttgtgtcatagaaaaagaaattagaaaactgcttatacaacaagtcccttgaagtgattagtattcgcagtatgatgttaagtaggtttttttagggaaacaacacaatgattttaaattttattctgattctttgattcacgcagctttctatttgcttgaactctgaagccaaagccctaatttgccataagaacactactaggatttctggaataaaaataacctgatcagatgtcaaggcactgacccaagaatgatgtctacagtctgttcccagatttgcttctagttcagtcagtgacatatcagcaaattacttgttttcattttcctcagtaaaataatgataatgatcatttatacctgcaatatacccattattggcttaatactacatgtggaccaaggaggtcataaatctatatttctagtccaaatttcttttttttttttttttgagacggagtctcgctctgtggcccaggcgggagtgcagtggcgcaatctcggctcactgcaagctccgcctcccgggttcacgccattctcctgcctcagcctcccgagtagctgggactacaggcgcccaccatcacgcccggctaatttttttttgtatttttagtagagacggggtttcaccgtgttagccaggatggtctcaatctcctgacctcgtgatccgcccgcctcggcctcccaaagtgctgggattacaagcgtgagccaccgcgcccggcctctagtccaaatttctaccctcctaagaatatatatatatgtgtgtgtgtgtgtgtatctccagactggtatatccaaatgcccaccaggtcttaccacctggggatatgatgggtactccaaatttaattgtcctacctaaactttctgccttccctccaaacctgatcctcttcctatattcctatcctggctagttatatgaccatcacaacccactcatccaagcccagaaacatcatttcctgttacactgtgagctcactggggtagcacttggtcttagtcaccttcataaccccagtattttgaactagacttggcactgcaaaatgctgaaaaaatatgcctgtattgaactaaactccataaagatggatggtccatacaaacctagaagttatttatgagaattttgaagaattgccattgtgaaaaattgcaatacttctacctgcccccatgctccaaaacaaatgggaatacagcttttctgttagtgatttctatactagggtatagtgaactcccatgaatctaaactccatataagcaaagcttggtagtgttttaattcttatttttacattctgtaccaactcttatctatatttatctccatatttgttattttttactgtatttcttctagcctgtcaccctcactcacggatgcattcctgctatatgccaatattgtaataggtgctttgtgacattgtttttaatttcacagcctgtgaggtagattttataaatattatttttaagtgggaagcaggttcaaagagagtacatgacttaatatcaaacacaagtaagtgaggagggtagagctcccatcgtattctctctgtggctacaggccttcataatacactttaggggatatgatcttccttcctcttacttggaaaatttcatcaaagttgtagtatcttctccatttataaaatagcgtatgtttttgcaatttgaaaaaataaagttacccataataccactatttagagatatcagcagttacattttgctacattatctttcagggttttttctatttatagctgtgtttttaaacatgccatactgttttaattattatatatttgtaatgtatcttgacatctgataggacaaatttccccctccctcatatctcctcttttccaaaacttttaactagaaaaatatctctaatttttttttcaatgagagcttctcttcatcttcttctaccttgtgagaagggccccttctgaatatctagacatataaacaagggttctctccatgtagaaaagacttcttttgaagtagcttgggttggggaggctgtcaataaatgatagtaaaatgaatctaaaatgtgcttatatcattttttaagaaatcaatttttttaatgcttatagaatcagttttcttctgaatgccttcccagagctgggaattagggaagacattgagacaccaagtaataaggtaaggctgagagggattaaaaaaaagacttagagggtttagaaaatatgctgttgtctctacagctgcagaaaaggagcctcactttttttaaaattagaacttagttacagaagagaggtttactctgaagcatgtcacccaccagttgcctcctaagaagttctcaaataaatgttctttcttccccttaactgcaaacccagcagataagcctgtagctgtgaaacaaaagacactctgcttttgccacctgcccacctgagctcctaaaaatgatgtcacattttcattcctcaagagctggactgttcagtggctaggcaattctccagaagcccaagagctctgagagcaaaagtgtaaggccaaatttgtatatttttctgggccagggccctgagctagaccaggtacaggccctgggttcccctagggttttgacctctcagtgaatctgatacaagatgagactctttgggaagccccaccctgggggcatgagagtactacctagcctttccttttcagcttggacattagccacccagagggttgcccctttaccagctttcctctagggttggtgcagaatctctgcctaactcctcagggcatgaggctgatacaagaagatgggcatggcatccagtggctgatcccaccaaaggcacacagcatgtgctggcagtccagctggggcttggactcatcccccatcccagtccagccctccttactcagagtcttccagcatattgcctttgttgaagctagtgtactgccatggaggtgttcatgtcagctgatggagcactggctcatggtgggaactaacaaaactgtgatagactgacatgtggtcagagatctctgtggacattcatacctgtgtggtattcagtgctgaggagaacacagaaggccacactgtgtggtgcctagagtgatggaactgaaggaagaacacaaagtctacataaacaacaacagtgcagggcaggaaggagtgctaagaaaattcatgtctattgagtcagttgtgaaaataagaattcatccactcactgattaagaaccctcctgtgaagccaagaaagataagcgcttaagaggtgctcacatcttaggtatacagaaaaaccaatatgctgtaatcatgttccatttgcagagatcatcttgggaggcctgatgtaataagacaaacaaaaagttgtgtctgcagaatgcatgggaccaatcatgggcccttctcttgatggatgcttaacttagcagcacaggcagatccctaaataattaattaaaatagtgctgtgaggtgttgtgataaagatttatgcttagagaagaagtgagaaagttggatgaggctttataaagaagaatgggggaaataagtagaaagtatgtatgtttagaggctgggcacagtggctgatgcctgtaatccctagtactcaggaggctgaggcaggagaatcgcttgaacccaagaggtggagattgcagtgagctgagatcacaccactgtattccagcctgggcaacagactctgtctccaaaaacagggggaaaaaatgtatgttttgaattttgtttggtcgtactgtggaatgtttctgacattctcagaagtttctggcatgctataaagacacccatctataagtcatatagattcgacaactctcatgggcccacaagcatagattttaagaagacaagggggtggagccaagatggccgagtaggaacagttccagtctacagctcccagcatgagcgatgcaaaagacgggtgatttctccatttccaactgaggtactgggttcatctcactggggagtgccggacagtgggtgcaggacagttggtggtgcagtgcaccctgcgtgagccgaagcagggcgaggcattgccacacccgggaagcgcaagaaatcagggaattccctttccgagtcaaaaaaagggatgacagacagcacctggaaaatcccgttactcccaccctaatatgcgctcttccaacgggcttaacaaatggcacaccaggagattatatcccgcacctggctcggagggtcctacacccacggagcctcgctcattgctagcacagcagtctgagatcaaactgcaaggcggcagcgaggctgcgggaggggcgcccacaattgctcaggcttgagtaggtaaacaaagcagccgggaagctggaactgggtggagctcaccacagctcaaagaggcctgcctgcctctgtaggctccacctctgggggcagggcacagacaaacaaaagacagcaataacctctgcagtcttaaatgtccctgtctgatagcttagaagagagtagtggttctcccagcatgcagcttgagatctgagaacaggcagactgcctcctcaagtgggtccctgacccccgagtagcctaactgggaggcacaccccagtaggggcggactgatgcctcacacagccgggtactcctctgagacaaaacttccagaggaatgatcaggcagcagcatttgcagttcaccaatatctgctgttctgcagccaccgctgctgatacccaggcaaacaggatctggagtggacctccggtgaactccaacagacctgcagctgagggtcctgactgttagaaggaaaactaacaaacagaaaggacatccacaccaaaaacccatctgtacgtcaccatcatcaaaaacgaaatgtagataaaaccacaaagatggggaaaaaacagagcagaaaaaccagaaactctaaaaatcagagcacctctcctcctccaaaggaacgcagctcctcaccagcaacggaacaaagctggatggagaatgactttgacgagttgagaaaggaaggcttcagaagatcaaactactctgagctacaggaggaagtttgaaccaatggcaaagaagttaaaaactttgaaaaaaaattagatgaatagataactagaataaccaatgcagagaagtccttaaaggacctgatggagctgaaaactatggcacgagaactacatgacaaatgcacaagcctcagtaaccgatgtgatcaactggaagaaagggtatcagtgatggaagacaaaatgaatgaaatgaagcatgaagagaagtttagagaaaaaagaataaaaagaaacgaaaaaagcctccaagaaatatgggactatgtgaaaagaccaaatctacatctgattggtgtatctgaaagtgacgggaagaatggaaccaagttggaaaacactctgcaggatattatccaggagaacttccccaatctagcaaggcaggccaacattcaaattcaggaaatacagagaacgccataaagatactcctcgagaagagcaactccaagacacaaaattgtcagattcaccaaacttgaaatgaaggaaaaaatgttaagggcagccagagagaaaggtcgggttacccacaaagggaagcccatcagactaacagctgatctctccgcagaaactctgcaagccagaagacagtggagaccaatattcaacattcttaaagaaaagaattttcaacccagaatttcatatccagccaaactaagcttcataagtgaaggagaaataaaatactttacagacaagcaaatgctgagagattttgtcaccaccaggcctgccccaaaagagctcctgaaggaagcactaaacatggaaaggaacaaccgataccaaccactgcaaaaacatgccaaattgtaaagaacatcaaggctaggaagaaactgcatgaactaacgagcaaaataacaagctaacatcataatgacaggatcaaattcacacataacaatactaaccttaaatgtaaatgggctaaatgctccaactaaaagacacagactggcaaattggataaagagtcaagacccatcagtgtgctgtattcaagaaacccatctcatgtgcggagacaaacataggctcaaaataaagggctggaggaagatctaccaagcaaatggaaaacaaaaaaaggcaggggttgcaatcctagtctctgataaaacagactttaaaccgacaaagatcaaaagagacaaagaaggccattacataatggtaaagggatcaattcaacaagaagaactaactatcctaaatatatatgcacccaatacaggagcacccagattcataaagcaaggccttagaaacctacaaagagacttagactcccacacaataataatgggagactttaacaccccgctgtcaacattagacacatcagtgagacagaaagttaacaaggatatccacgacttgaactcagctctgcaccaagtggacctaatagacatctacagaactctccaccccaaatcaacagaatatacattgttttcagcaccacaccacacctattccaaaattgaccacatagttggaagtaaaacactcctcagcaaatgtaaaagaacagaaattataacaaactgtctctcagaccacagtgcaatcaaactagaactcaggattaagaaactcacgcaaaactgatcaactacatgggaactgaacaacctgccctgaatgactactgggtacataacgaaatgaaggcagaaataaatatgttctttgaaaccaacaagaacaaagacacaacataccagaatctctgggacacattcaaagcagtgtgtagagggaaatttatagcactaaatgcccacaagagaaagcaggaaagatctaaaatggacaccctaacatcacaattaaaagaactagagaagcaagagcaaacacattcaaaagctagcagaaggcaagaaataactaagatcagagcagaactgaaggaaatagagacacaaaaaacccttcaaaaaatcaatgaatccagtagctggttttttgaaaagatcaacaaaattgatagactgctagcaagactaataaagaagaaaagagagaagaatcaaatagacgcaatagaaaatgacaaaggggatatcaacactgatcccacagaaatacaaactaccatcagagaatactattaacacctctacgtgaataaactagaaaatctagaagaaatggataaattcctcgacacatacagtctcccaagactaaaccaggaagaagttgaatctctgaatagaccaataacaggagctgaaattgtggcaatcatcaatagcttaccaaccaaaaagagtccaggaccagatggattcacagccaaattctaccagaggtacaaggaggaactggtaccattccttctgaaactattccagtcaatagaaaaagagggaatcctccctaactcattttatgaggccagcatcatcctgataccaaagcctggcacagacacaagcaaaaaacagaattttagaccaatatccttgatgaacatcgatgcaaaaatcctcaataaaatactggcaaaccaaatccagcagcacgtcaaaaagcttatccaccgtgaacaccatgagactgggagtcttgcccattttgtccactcctgtacactcagtgtttacatcagcatctggcacatgctgggtgctcagtatatatgagatgaataagcaagtgagtgaacaatgactaaatcaatgaaccaaggttgcttacatttcttccttcaggggaagtttcaatgggaagatggccacaccccagcctctggcactctcttatcctgacaaccttatgagctcttgcaggacagatctggtcatacatctatgtcataaatttatttacatcatctgagcagcagtctgttatcctcagccttgctttttgtcccatcagtaaaacacttcattacagtcattctccctagggaaatggagcaaagtggaaagacaggtcaccatagaatctccaagaacatatgtgtttggaaaacaacacttctgccaagaaatgatgctgttgcccgcattgcggcacatatcccctcctaagaatcactcatttgcagcatttggtacaggacagatgcacagaggtcatgcaggaaaggtgtgttcacttacattcacactctgctggcacccccagtgagtaccaagggtctggtctttctcttggagctctcggttgagctgtctaattcttcctctagccctgtaaggcacaacctatcccattttgtggatgagaaaactgtagctctaaggactttaagtaatcagttctaactatgttgtcattggtaaattttgaaggtttgctgttatttccaaaagatcgtattaaatttttcagtgtttagaggaattataccataccaaaagataaaaatcaagaaatgtttaaagtttttaataatctagtttttaaaaactattttataccagctttctctttctctgagaaatcttaagatacttaatgtttccccttagttaatagaagttataaagttccatgccttttttctgacattaaggttttttattggcagataataattttacatatttatggagtacatagtgatattttgatacatatcacatgcagtgatcagatctgggtaattagcatagctaccatctcaaacatagctgccatgtcaagtatagctacttctttgtgtcagaaacattcaatactctccttctagctatttgacactatgttgtatattattgttaactatagtcatcctactgtggtatagaacactagaacttattccttctatctagctgtaattttgtatcttttaataagtctctccctatcaccttcttccccctacccttcccagcctctagtatcctctgctctactttttacttctatgagatcaatttatttagcttccacatatgagtgagaacatgctgtgtttaactttctcttcctagcttatttcacttaatgtaatgtcctccagttctatacatgttgccatgaatgacagaatttcattcttttttatggctgactggtatttcatggtgtatatataccatatttttttgtattacatctatttttaaattatcctttttgggggctaaaccttattaaggtataatttacaaagagtatgttgcatccattttaagtgtacagttcaacgggttttgacaaatatatacaatcatataaccactactacagtcaagatacagaacatttccaacttcttgagaagttatgttgtgccccttttctgtcagtcccgctgctggctccatgtaaacaatgatctgctttttgtcaatgtagattaattttccttcttttaaaatttcatttaagtggaataataaaattgcaatttttatttaaatattcttttatttagcataatgtttttgaggttcattcatgtcatttatatcagcagttcatttttttcctttttgagacagggtcgccttctgttgcccaggctgttgtgcagtggcacaatcatagctcactgccacttcaaactcctggtctcaagcaatcctcctgcttcagcctcccaagtagctgggactacaggcacatgctaccacacccagttaatttttgtatttttagtagagatgaggttttgtcatgttgcccaagctggtcttgaactcctggattcaagtgatccacccatctcagcctcccaaagtgctgggattacagatgtgagccaccacaccctgccagcagttcctttttattgttgaataatagtccatttgtgcatacaatttaatttgtttatccattcacctgctgatgaacatttaattagtttccagtgttttggctgttatgaataaaattgctgtaagttttcttgtgccatctttttatttttcttaaaaagaaatatttcatagggacttgcaaacagaagccatgtctgtgtcttgggcagtggtgagacaagatagtggatctctatgcctcatgtacaagtctttgtgtagacatatcatttctgttgagttttatacctgacaatggaattactgtactgtatagtaaccagtatatatttaactttgtaaggattcaccaaactgtttttactagcaacatacgagagatccagttgctccacatcattaccagcactgtgtattgtcagtctttttaatattagccattcttgtatataccacatcttttatcccttcatctgttgttggacacctaggttaattccatatcttggctgctgtgaatactgctgcaataaacatgggggtgcagatgtctcttcggtataatgatttcctttcatttggataaattcccagtagtgggatttctgaatcacatgatagttctatttgtagtttggtgagggacctccacactgttctccatagtggctctactaattacattcccaccaacagtgtgtgagagttcccttttctctgcatcctcatcagcatttgctatttttttgtttttttgataatagacatgctaattggggtgagataataccttattgtggtcttgatttgcatttctctaatgattagtaatttgaacattttttcacatattcgttggccatgtgtgtatgtcttttttaaaattttttgtgggtatataataggtgtatatatttatggagtacatgagatattttgacacaggcaggcagtgcataataatcatgtcatgaaaaatggagatccatccccttaagcatttatcctcaaaattagacttacaatctaattttatgattttaattatcttaaaatatacaattaaattattattgactatagtcaccctgttgtgctatcaaatactgggtcttatccattctaacgatttttttgtacccattaaccatcttcatctccctctccacctcccactactcttccttcctagcctctggtaaccatccttctacactctatctccatgaattcaactgttttgatttttaggtcccacaaataagtgagaacatgcaacatttgtctttctgtgcctgacttatttacaatggagtactattgttcagccataaaaaagaatgagatccagtcatttgtatgtcttcttttaaaaaatgtcttttcagatcattttcccattttttaattggattgtttgtttttttgctgttgcttcagttccttgtatattctgaatattagctcattgtccgattaatagtctgccaatattttctcccattctgtaggttgtcttttcactctgtcagttgtttcctttgttgtgcagaagctgttaatttaattgcatttgtttatttttgcttttgttgcctgtgcttttgaggccttatttataaaatcctttttcagatcaatgtccagaagtatttcccttatgttttcttctaacacttttattactttaggtctcatgtttagttcattgatcccttttgagatgatttttgtgtagggtgagaggtggaagtctagtttcataattctgtatatagatatccagttttctcagccccatttgtggaaaagactgtcctttctccagtgagtgttcttggcacctttatcaaaaatcagttagctgtaaatatgcggcttaatttgggggttttctactctgctctattggtttatgtgtctgtctttatgccagtaccatgctgttttggttacaacagcttcgtggtgtattttgaagtctgataatacaatgcctctagctttgttctttttgatcaggattgctttggctatttgggataatttgtggttccatacaaatcttaggaatttctttctatttcagtgaagaatttcactgatattttgatagggattgcattgaacctatagattgctctgggtagtatgctgttgatttttttttttttttttttttttgagagaagtcttgctcttgtcccccaggcttgagtgcaatggctcgatctctgctcattgcaacctctgcctcccaggttcaaatgattctcctgcctctgcctcccaagtagctaggattaaggcgcctgccaccacgccgggctcatttttgtattttttagtagagacggggttttaccatgttggtcaggctggtctcgaactcccgacctcaagtgatccgcctgcctcagcctcccaaagtgctgggattacaggcataagccaccgcacccggcctgctgttgatttttcaaaagctttggtattttaagagattatcatgcttaaatttgtgaaagtatacagagctaagaatctttgtgtaattatcctcagggatttcagaggtaacttggaaatttttttttataggatctggcttcatcacccaggctggagagcagtggtgcaatcttggcacctcgcaacctctgcctcctgggctcaatctatcctcccacctcagcctctggagtagctgggactacaggcatgtgccactgtgcctgatttttgtattttttgtagagatggggctttgccatgttgcccagtctggtctcgaactcctaggctcaagcaatctgactgtctcagcctcccaaactgctgggattataggtgtgagctactgagtctgaccaacttggaatcttttaaaaaataagtcagggaaatcaagcatggacagctctggacagttccaagttggaaagcttttccctataaatctcatcaccaggagagcatctctctttcttcctaagccacctctcgtacacacctactgaggcttagaagctgcagtttgattatgagagaaaatgcctgggacagaaagcaggtagattccggtttctcacacatttgtgggaatgatccagaacccaagacctgtgggacacaggcagtccagccatgcccaagatgcctttgacctggctctccattccatctcctgactcatctagcactctttgaacagattagtctggctgcactgttggatagggccctggtctgttttgtcacccctatacgtttaacacagtgcctggcacatagtgggccctcaatacatagtgaaagaatgaaagaatgagtgaatgaacaaataaatgagtccatgcacagacgcaggattccaccctgtcctctatttcagcaggatgccgacacaaaggttcttctcatctagccttgcctgcagttgtgcatgtttggttggaaaccagacacctgagcatggaccagggagcagtacacttagccagtccacccggggtgctggggtcctcacagccctctccccgcacctctgccccatgaaccacatgcatcctgtgagtttcccctgagtcataagtttaaataaacgcaataaaatcagtaatatcaaatgaggataatcatgactgagccttccctggaagccccaaggaagagcttccagaaaagctgtctgcgttaactctaagtcaaatcataatcgaaaacacattactactttttcctggcagaaagtaaatttatttttaaaattttatttttaattgacaataattgtgtatatttatggggtacaatgtgacattttgatatatatacattatggaataattaaatcaagctagttaacatatctatctcacacatcttatcatttttgtgtgtgacataaagcacattactttttaaggaaaagttttctgctctacaaatcaacctgtggttttacagctcattccccacggatttgctgtagtcttccacctccctgcagccccaggctggtgccctgattctactctgagacttgagtaagctgaagcattctattttaagttcattaaaatatttcggaatgctatagagttttggtataagcaatgaatggagaactcatccgatgatgcacttgaagtcttctcggtctgtctagaacttagaacatgatattaggactcttggttgcaaataataaaaactcaactcaaaaagccttgaacaaacaagagaatttgttggctcatataatggtaaagtccagggattgccttcaggcttgagtagatacaggtgttctaagtatatgaacagaatcctgcccctccccactgtcagatctgcttttgaacctctaggctttcattctgccatggagccagccctgcagaaagggggcatctattaccaagatctccagtagaagctcccagctcaaccccaatggcaggtctgagtcatgagaccaccaccactagtgccaggagtggtatccagccttccagaaccacatagactaagttggagagggagggaggagtgtcccaaaaggaaaagaaatgtcccttttagaagaatgaggggcacagtaacaactatcctccactgataccatgtggacccttccagctgcagagctgagcctttctggtgaccagctgctcagagagcagggcagtgtgtggaaggaggagcctggagaacatttctcttctgcagttgcatttcttttgtgcttttaaagatatcaaataaatcataagcccagagggcgtgatttctagaagcaaggctttctgtatttcctttattttctgttatattattctaaattctgaaaatagctttatcagtgttttttaaataaaaatgacagatgcttcttgtaataaattaaaattctatagtaaaataaattggagagagagagtctctattcatgctaggtgcctctgaatagcacttgtgcatgattgcaagctcccagtttttaatctctgctcgagtttgctcctttgggcaaggaactccctctttctgcatgttgatttatgcatctatgaaagagaggactcatcattttagagctattaaaagaaattatcaagccctcttctgatgccaggcgccttattatttatgttatattatttaatcttcaaaacagcctgataagttggttattgtcatcatccccatcttatagatgaagaaactgagacttagagggattaagtaatgtgctcaagaccacacttgtagtaaatgccagggtctgggccacttccaccagcacccgtacccatgtgcctaccactgcactgtaccctgtgagaattaaataagataatgcaaggaaaacttttggcacagtacctcagacagagtaagcactcaaaaaattgtgctcattttttcataatagtgatactgattttatgatgaagttttatgggaaagaaattatacattcggtatattgtgtttgataggtgctttttctcccaccatgaggaagacaaacctctcaatttcattttttccaccaaaccagggggagaagataatgtttgccttctgccctttcattctccttcctgagctgcatttgggaccagaagtaggctttgccatggaccagttggcgactctttcaggggtttctctttaatgtgaggccactttgagagggactttagaatctcacaccatgggtgggaagtgtaaattggtgcaagctttctgaaaaagtcacatctttgaacctggctgctttacgtctaggatccacaactgtggatatgtgaaattgtttagctggcagcatatccatcacagaaccgtttttaatgcagaagaaatgggaaggattcaaggtccaaagattggagatcagttacataaagcttgctgtgtccatactatggagaactctgaggtgactgaagatgtcatgggagaagacttcaacaacattacagtcaatcaggaatactaagtggaaaaaacaagttataaaacaatgtctgtccatcacgtactggattttattaagtgtctactaggtgcactttagtggtctaggcacatgggatataggagtgggaaaaaaatgtcttctttgagcctatgttctattcaagaggggaaatagataaacaaattaataattgtcaatatgttgatatactgattattgttgtaattacttaatcatagagaattatatatcactaaatagcaggtacaaagaagtattctgtaaaaatataaggaataaaaatcagagtaagaggactgtcatgttggcgtggtagtggcatttttgcaaggatcgtcagggaaggcctcccaagggaagtgatatttgcacaaaggcctgaatgaagtgtcggattgagcctgagactatctgtggggaactgttttataggcagagggaacagcaagatcaaagccagtgtgagcgtgtttgttaaaagacagtgtgaacattgtatgtactgaaagacacatgtgctcaggaaaacccatttgtggctttttctcttcattgaagtcagtaacaatttaaaaggggcacctccccactgccaccatcactgtttcctggccactccagttggctgccctgctgctgccccacagcccctgtctgctaaaccttgtgggaagagggagttcatcctccctgttgaaaaatttggtctctcattgctgctctggccctggagccccttcagcaccaacagctttagactgacctctcggtccctgccttctctgtgtgcctgcatgaatacacacacacaaatgcacacacacatgcatgcacacacatacacatgagcacatgcacatttgcatgcacgtatgcacacacacacaccccaccacaagttccaggacccctcccaatctctgtgtaggctgattacaaaccaccttgcatggaagtctgaaagaacactcatctaatgtcaggttccagtagtagaactttgggtagttttctgaatcttcttttgcctgtttttatttcagtttttataataatacatgtacttggttaaaataaattcagacagtaaaagatattaaaaggatttcagatccccaactccttgccaagtcccagtcccccagggaatcacatttaaacatttctgggggctaccataataatcctaaataatatgtttatcttgccacttattgattagtcaactttagactttaatgaatagttcacttttttcctatctccttaccttctccttggaagttttattaaaacttttattatatgctggcgacctctatgactttaactagcatattgaaaccattatctttggtatatataccttacacagtctgtcttgactgcattctgtaagattttgactccattctgcaagatggggaaattagcatctctgaactaccctcatcattcctccttctctttatatccagacttctatcaggctatcaatgatttttaatttttctttcaataacaaatgcacatgtcttgaccgtgtgatcattttatactttgtctataaatagggtgaaaattaagtagtttctaaattatataaatattatcttctagagaccaaagtcatgacttgaaattcatggagagaaaaaaaactgttattcttggctataacacttgggctacttgaaaaatgggtcatcatctttcttcttctactcagttagtttacaaaatcatacaacttttcatttgcttcatagttagaccatattttcttgagctgtttttggttttggttttgattttctgaaagcttctaatagcctttccttattcttgttgacagaacaaagacgtggctccttcttcaccatttctcttcatacatgtagattcttaattatatacttattgaatgccccatttgggctgcctaccttccagatctgctgcatcaaatcctgggacttctcttcattgtactcctgggacagtttccttctttttagagtcccaagatcctctttcttggatggcttttagttctcctggcatacaccttgagaattctcttttccagaaagcaatcttacatgtctgaaaatgtctttattttgccctcttgtgatgatggtttggctgaacatagaagtctaacttcatgccatttattcttagaaaatctatgctctactgtcttctagcattcattgttattgattacaaattttagcatcattatttttatccttttgcaaagtattatttttttctgtgtgaagccactaagttctccttatctttgaggatctgaattttcatgaagatgtagcaaggtaggtttgtctgctttattttgttttatgttccatttgttgtttaggcaattggtaggccgtcttaacctaaagacttttccctttcttagcttggggaaattttcttctgttatgtctttgattttttcccctctttcattttctcttttcttcctttttggaattctgttagatgctagacctcctgaattgatcccccatgtctcttttctctcatatattccatatttttgccttcttattgtacattccagaaaatgtatgttgattttaacttttaggtcttctattaaattttttattgatcctgttttctatttccaataagttgttgcttatcttctacatatatttcacatcaccctagcctgttgcatggatgcagtatcttttcaaatcattatggacattaattagagtttaaattactttcaatatcctgagttatctttctttgccctttgttacttgttgttagtttatcttgactcttttttctttcttcttatgccattggattgttgcaaatgtctggtgatttcttgtcatctattcatatttttgaacaaaggacttagttggtgaataaaggtaaccaacatgggcctcctctgccattgggtagataaatattcccaatagacctctcttttgaaaggagtttagggctgaaaggtggaggtgcttactgagagctccaagtttgtgagttaggcaggcaattgacaggctttgccttggtgtacgtgtatgatatctgatgggcaggcatgtagggactcccccaatgccaaacaagataagcttcttccgtattagtccatttgtgttgctaggaaggaatacttggggcagggtaatttataaagaaaagaggtttgtttggctcatggttctaccattacaagaaggtgccagcatctgcttctggtaaaaacctcaggaaccttttacttatagcagaatgcaagggagcctgtgtgtcacatggtgagagagggagcaagagagagggaatgttgtcacactcttttcaacaaccagctcttgagtgaactaatagagtgagaactcattaccacaggaaggacaccaagccattcatgagggatatgccttcaaagcccaaacaccttccaccaggcccacctctagcattggggatcacattttaacatgagatttgcaattgggacaaatatccaaactatatcagcttcactgtatggtgttaatctccatactgaagtcttaaatctgaagtagattgttcaacttcaatagagaaccactttatcttttgggcctaagaccaatcatcctcagaccaattgctcatttgttagggtgtagggatgggggaccaagaggcctcattattgtctacacaaccattaaattacctttctgagtactgtcataatccaaacctgctctctgaatcaaccaactcaaaattgggccttccagttagagtccaagctcttccatctgttctgaagtacatggttctttgttacctttatgctatcattgccaaaatctctgattttgctctcacccccattccttccttgtatagattgttttttacctttggatatcttctcacatttcactggggtctggaaaagaagagcaactaaatgtgggattgttcttccattgaattggaagcctttatattcttgttggttttctgaattttctagaatgagtgtgtattattacatttataataagaaaaataagaaaagcagctgttttcaaaatagaaaggctttagaaatttgttctcgtcaggcataaaagagaagaatcttgtctttctttttttttttatttatttttagatggaatctcactctgtcgcccaggctggagggcagtggtgctgtggtgctgtcttggctcactgcagcctccacctactaggttcaagcgattctcctgcctcagcctcccgagtagctgggattacaggcatgcgccaccacacccagctagtttttgtattttcagtagagatggggttttgccatgttggccaggctggtctcaaactcctgacctcaagtgatccacctgcctcggccttccaaagtgctgggattacaggcatgagccacagcacccagcctgaatcttgccaatgttttgtaccaaccattatagcattaaccaggaaactactttcccagagtgcttcaatctgaatgaggaagaggctggagaattttgctatcttccttgtgctttttatttttccaagatgaattagaaatgttgttaatacagtaagaatattaaatataaagcctactattaaatgccctgaaacttcatggtttaaaatgtcaagcatttattggcttgctctttggagtgactcagtggatggttctcctggtcgcatctaagttcactcatgtgtctccagtcaaactagtggccgatggcttctttcacctatctgggagttggccggctattggctggggcaagagggatgattgggccaagtgtctctcatcacacaacaggctagcttgggcttactcacgtgataaaggttgtgggattcccaagagcagcaacagaggaaactgcagggctcaggattcacacaacatcactttcactattttctatggtcagagaaagtcacaaggcccgcccagattcaaggggaataaacttcacatcttgatggatggagctgtgaagcattgcagcagttttgcaattcaccatttaataattctaattttgtgttgtctaattctgttttcctcaggcttctgagggcccaatctctggaatggttctacaataatgtgaagagccgcttcaagcgctttggcagtgccaaggttctgaagaacctgtacaggaagcaccggctggagagtggcgcgtgcttcgacattctaggtactctcacttcctgccgctctgggagtctttggtgggctggtgggtagaaggcctggctcaggggccctgaacactggagcacactcacctgggacagataaatttgcttaaatatctggcaccagtgagaagcagaaatagaaggacggatgccagagattctgctaagttgtgactcttttggttccagcgtccccactgggctagagcttataagttagaagctatgaagaccaagtacttctacaaattgtgattattttaatctcagatcaaaaattaggtattcttgatcatcatcccttaatgattaaaacgttggaaagtcatttgcccttggctacagagagagtacatctgtccctggagggcatgccttctaccttcctttcttcttactccaaacttctgttcttatggcccagaaggtgatgtagtgggagagttagaaaagtgtcagcttcctcccaggaaacttgaaggatgaattttacctatgctgtttttatacagttaagataaccaagctacttggaatgggaaattatattctttagtcctattagatcagccagtagaaaagaatggtagtcagaatatggacagcatgccttccaaaaaggctgtttctttctatctggtggcagatttttttttcatcacttggctaacacaggtaaatgctttttatccatgagaaacaaggaagaagaaaaaacctcattcatcttatttggagttttttcaccatcattattttacattgttgttttctcaataaagtctttggttgtatcttatctaaaaatatgtcagccacttagacaacggggaaaatagaatggaggcactaaacatggagaatcattagggtcttttgttgtcattattagaatttctgtctttcaaactgctcaggaaagctatagctaagagagcagtgccgaaggtttccacatattatgtttatcaccatttcaacaatttctctaaatactctgtaggaatggaggcaaagaagaaataaagcttcaaagtcatactgttagcagttttacagcccagagagatatctcaagaaggtttatgaatagaatcggctcactcatttgcatcccatcctcttttcctctcttgtacatcctcgggtatgctgaatatgcccctttaaatgtcaccaaattcagatctcgtaggtgttctttaccacttaatgcacattgaggaataaagaaaacatgtggaaaaccctgtagaatagagcagaatttttatttctttccccttctctctaagtctccacaagtggagaaagcaggcatgaatcccaagtgggctagtgcagggctttgaaatttacaaggatcactttcaaaggagaattctttgctaagaataaatatctgccctgattgaagcagctttaggtgctgggccctctgtgattcaccactttattcatctgagtctcagtcacagcacttatcacatatcacattgcattcaggattacacagctgcctctcctgccagactgtgatatgcaggtggtagcttgtttatctgtgttctcaaagcgtggctcaaggcctggcacatcttatatcctcattattgtactagttcaaccttaaaagcattttgtggggccaggcatggtggcttatgcttggaatcccaatactttgggaggctgagtcaggagggtcacttgagaccaggagttcaagaccagcctgggcagcatagcacaatcctgtctctaccaaaaaaaaaaaaaaattagtcagatgtggtggcatgcacctgtcctttgagctacttgggagactgaggtgggaagatcacttgagcccaggaggttgaggctgcagtgagccatgattgtgccactgcactccagcctgggtgacagagcaagaccctgtccaaaaaaaaagcattttatggataccaagacacttcatagaaatatgggaatcagttgctttaatactatttgtatctccatttaagtcgagatttcttttggagaaacatgaagacaagcagacaggagacaatttatgagatggtactcaaacatataaagccatggtcataaaacaacgagatctattctacaagctacacaggaaatttagttagacttcaagtatagagaaatcttccagggcctaagtagcctcctggttgtgtgagaagactcaagagtccttcattagcttttgcctgtcacccaataccctttgtaggtttgtcatctgccatcctcaattcatgactacacattagaatcgccaagggcgctttgaaaaaaaaccttccaataccccaaatcattgtccaccccccattaattactgctgaatttttggaggtgggatccagtatacatatttttaaaagctgcctgtattattccaaggtacagccaagactgagaacaaggtcctcagctagaactcagagtaattagttcagcagtgttcttccagctctatctaatggtacttattttcagaatgttgattgtcagaacatgatatgcaaaatctgcagtgcacaaggcatgtgctatgctccaggactctcagtgtaaaactcctttcacctacagaacgtcttcactatgcggatcactgtagtttgccataaaaacactcaattcaggccgggcacagtggctctcgcctgtaatcccagcactttcggaggctgaggcaggcagatcacaaggtcaggagatcgagaatatcctggccaacatggtgaaaccccatctctactaaaatacaaaaaattagctgggcatggtggcactcacctgtactcccagctacttgggaggctgaggcagaggaatcgcttgaacctgggaggcggaggttgcagtgagccgagattgcaccactgcactccagcctggcaatagagtgagattccgtctcaaaaaaaaaaaaaaattcattgaagattccttcaattcacacagtctcacgtatcacccatcacatacacacctcgtactgccatcagttcctcagcagtgctcccaagcgaacctttctccttctcctgcagctcacagcagctgaccagattaggcctaaaagaaaacttgttttatcagacaaatctaagatgtattcatttattcagtaaatatttactgaacacctactatgtgcccatctggcttaagagttgggggtgatgaaatgagcaagaccctgccatttcagagccaaaactctagtggagaagtcagataagtaagtacatttataaataaaataatgtccaaaggtaacgagtgctcacatggcttctctaatagacccagcatgacttttttttaaatttaattttattttaagttctgggatacatctgcaggacgtgcaggtttgttacataagtaaatgtgtgccatggtggttttctgcacctatcaacccatcacctaggtataagccccacatgtattagctatttatcctgatgttcaccctccccctgccttgacaagccccaggatgcattgttccccctgctgtgtccatgtgttgtcactgttcagctgccatttatgagaacagagaacacaatatgacatttttaacagttatcctaaaagaagcactacatgaaaaaggtaaaagttgccattattaatatacttaatcttcagacaattggataaataatatatgctttatttagtgttagataaataaatgggaaaaataaaccttgcttttattatcattctatatctaattttgtttttatttttattatttttttattattattatactttaagttttagggtacatgtacacaatgtgcaggttagttacatatgtatacatgtgccatgctggtgcgctgcacccactaactcgtcatctagcattaggtatatctcctaacgctatccctccaccctccccccaccccacaacagtccccagagtgtgatgttccccttcctgtgtccatgtgttctcattgttcaattcccacctatgagtgagaatatgtggtgtttggttttttgttcctgccatagtttactgagaatgatgatttccaatttcatccatgtccctacaaaggacatgaactcatcattttttatggctgcatagtattccatggtgtatatgtgccacattttcttaatccagtctatcattgttggacatttgggttggttccaagtctttgctattgtgaataatgccgcactaaacatacgtgtgcatgtgtctttatagcaacatgatttatagtccattgggtatatacccagtaatgggatggctgggtcaaatggtatttctagttctagatccctgaggaattgccacactgacttccacaatggttgaactagtttacagtcccaccaacagtgtaaaagtgttcctatttctccacatcctctccagcacctgttgtttcctgactttttaatgattgccattctaactggtgtgagatggtatctcactgtggttttgatttgcatttctctgatggccagtgatggcgagcattttttcatgtgttttttggctgcataaatgtcttcttttgagaagtgtctgttcatgtcctttgaccactttttgatggggttgtttgtttttttcttgtaaatttgtttgagttcattgtagattctggatattagccctttgtcagatgagtaggttgcaaaaattttctcccattttgtaggttgcctgttcactctgatggtagtttcttttgctgtgcagaagctctttcatttaattatatcccatttgtcaattttgtcttttgttgccattgcttttggtgttttagacatgaagtccttgcccatgcctatgtcctgaatggtattgcctaggttttcttctagggtttttatggttttaggtctaacatttaagtctttaatccatcttgaattaatttttgtataaggtgtaaggaagggatccagtttcagctttctacatatggctagccagttttcccagcaccatttattaaatagggaatcctttccctattgcttgtttttctcaggtttgtgaaagatcagatagttgtagatatgcggcattatttctgagggctctgttctgttccattgatctatatttctgttttggtaccagtaccatgcttgtttggttactgtagccttgtagtatagtttgaagtcaggtagtgtgatgcctccagctttgctcttttggcttaggattgacttggcgatgtgggctcttttttggtgccatatgaactttaaagtagttttttccaattctgtgaagaaagtaattggtagcttgatggggatggcattgaatctgtaaattaccttgggcagtatggccattttcacgatattgattcttcctacccatgagcatggaatgttcttccatttgtttgtatcctcttttatttccttgagcagtggtttgtagttctccttgaagaggtccttcacatcccttgtaagttggattcctaggtattttattctctttgaagcaattgtgaatgggagttcactgatgatttggctctctgtttgtctgttgttggtgtataagaatgcttgtgatttttgtacattgattttgtatcctgaagactttgctgaagttgcttatcagcttaaggagattttgggctgagacaatggggttttctagatatacaatcatgtcatctgcaaacagggacaatttgacttcctcttttactaattgaataccctttatttccttctcctggctaattgctctggccagaacttccaacactatgttgaataggagtggtgagagagggcatccctgtcttgtgccagttttcaaagggaatgcttccagtttttgcccattcagtatgatattggctgtgggtttgtcatagatagctcttattattttgaaatacgtcccatcaatacctaatttattgagagtttttagcatgaagcgttgttgaattttgtcaaaggctttttctgcatctattgagataatcatgtggtttttgtctttggttctgtttatatgctggattacatttattgatttgcgtatattgaaccagccttgcatcccagggatgaagcccacttgatcatggtggataagctttttgatgtgctgctggattcggtttgccagtattttattgaggatttttgcatcaatgttcatcaaggatattggtctaaaattctcttttttggttgcgtctctgcccggctttggtatcaggatgatgctggcctcataaaatgagttagggaggattccctctttttctattgattggaatagtttcagaaggaatggtaccagttcctccttgtacctctggtagaatttggctgtgaatccatctggtcctggactctttttggttggtaagctattgattattgccacaatttcagatcctgttattggtctattcagagattcaacttcttcctggtttagtcttgggagagtgtatttgtcgaggaatttatccatttcttctagattttctagtttatttgcgtagaggtgtttgtagtattctctgatggtagtttgtatttctgtgggatcggtggtgatatcccctttatcattttttattgcgtctatttgattcttctctctctttttctttattagtcttgctagcgatttatcagttttgttgatcctttcaaaaaaccagctcctggattcatttattttttgaagggttttttgtgtctctatttccttcagttctgctctgatcttagttatttcttgccttctgctagcttttgaatgtgtttgctcttgcttttctagttcttttaattgtgatgttagggtgtccattttggatctttcctgctttctcttgtgggcatttagtgctataaatttccctctacacactgctttgaatgcgtcccagagattccggtatgttgtgtctctgttctcgttggtttcaaagaacatatttatttctgcctttatttcgttatgtacccagtagtcattcaggagcaggttgttcagtttccatgtagttgagcggttttgagtgagattcttaatcctgagttctagtttgattgcgctgtggtctgagagactgtttgttataatttctgttcttttacatttgctgaggagagctttacttccaagtatgtggtcaattttggaataggtgtggtgtggtgctgaaaaaaatgtatattctgttgatttggggtggagagttctgtagatgtctattaggtgtgcttggtgcagagctgagttcaattcctgggtatccttgttgacttcctgtctcgttgatctgtctaatgttgacagtggggtgttaaagtctcccattattattgtttgggagtctaagtctctttgtaggtcactcaggacttgctttatgaatctgggtgctcctgtattgggtgcatagatatttaggatacttagctcttcttgttgaattgatccctttaccattatgtaatggccttctttgtctcttttgatctttgttggtttaaagtatgttttatcagagactagcattgcaacccctgccttattttgttttccatttgcttggtagatcttcctccatccttttattttgagcctatgtgtgtctctgcacgtgagatgggtttcctgaatacagcacactgatgggtcttgactctatccaatttgccagtctgtgtcttttaattggagcatttagtccgtttacatttaaagttaatattgttatatgtgaatttgatcctgtcattatgatgttagctggttattttgctcgttagttgatgcagtttcttcctagtctcgatggtctttacattttggcatgattttgcaatggctggtatcggttgttcctttccatgtttagtgcttccttcaggagctcttttagggcaggcctggtggtgacaaaatctctcagcatttgcttgtctgtaaagtattttatttctccttcacttatgaagcttagtttggctggatatgaaattctgggttgaaaattcttttctttaagaatgttgaatattggcccccactctcttctggcttgtagagtttctgcaaagagatccgctgttagtctgatgggcttccctttgagggtaactggacctttctctctggctgcccttaacattttttccttcatttcaagtttggtgaatctgacaattatgtgtcttggagttgctcttctcgaggagtatctttgtggcattctctgtatttcctgaatctgaatgttggcctgccttgctagattggggaagttctcctggataatatcctgcagagtgttttccaacttggttccattctccccgtcactttcaggtacaccaatcagacgtagatttggtcttttcacatagtcccatatttcttggaggctttgctcatttcttttcattcttttttctctaaacttcccttctcacttcatttcattcatttcatcttccatcactgataccctttcttccagttgatcgcatcggctcctgaggcttctgcattcttcacgtagttctcgagccttggttttcagctccaccagctcctttaagcacttctctgtgttagttattctagttatacattcttctaaatttttttcaaagttttcaacttctttgcctttggtttgaatgtcctcctgtagttcggagtaatttgatcatctgaagccttcttctctcaggtcgtcaaagtcattctccgtccagctttgttccgttgctggtgaggaactgtgttcctttggaggaggagaggcgctctgctttttagagtttccagtttttctgctctgtttttccccatctttgtggttttatctacttttggtctttgatgatggtgatgtagagatgggtttttggtgtggatatcctttctgtttgttagttttccttctaacagacaggaccctcagctgcaggtctgttggagtacccagctgtgtgaggtgtcagtctgcccctactggggggtgcctcccagttaggctgctcggggatcaggggtcagggacccacttgaggaggcagtctgcctgttctcagatctccagctgcgtgctgggagaaccactgctgtcttcaaagctgtcagacagggacatttaagtctgcagaggttactgctgtctttttgtttgtctgtgccctgcccccagaggtggagcctacagaggcaggcaggcctccttgagctgtggtgggctccacccagttcgagtttcctggctgctttgtttacctaagtaagcctgggcaatggcgggcgcccctcccccagcctcgctgccaccttgcagtttgatctcagactgctgtgctagcaatcagcgagactccgtgggcgtaggaccctccgagccaggtgcgggatataatctcctagtgcgccattttttaagcctgtcggaaaagcgcagtattcgggtgggagtgacccgattttccaggtgccgtctttccaggtgccacccctttctttgactaggaaagggaactccctggccccttgcgcttcctgagtgaggcaatgccttgccctgcttcggttcgcacacggtgcgcacacccactgacctgtgcccactgtctggcactccctagtgagatgaacctggtacctcagatggaaatgtagaaatcacccgtcttctgcgtcgctcacgctgggagctgtagaccggagctgttcctattcgaccatcttggctcctccctcccctctatatctaattttgacatgattcttgaaaaggtctgttgcttcatctgggatttgttggacaaatgtggtcttttaaaaatgctgagccacatgaaattagagtttctgccaactcatgaaaaatagtggcttcatgtcatctagctgcttagcccatgctttccagaacaattcagtccctttctgcccttgaaaaaacatcacatcatactaaatgacaccaatgctcccacctccaaatttaaaaggaaacagaaagagaggtgttgtactagaagatttaaagtcatgcaaaaccagggcttgtcctctggtgaggtcagtcttccaaagactttttcacatctcccctgtccttatgtttcccacgaccctccccatcctctcagcaggcaacctcaaatcttccttcctatggcctacagggcatgccaggcagagacttgccctggtgtgcagctgcagagggagcactgtctcccttctctgttgcctccccctccccttggtcttgcatcttatccctctcaccttccagaaaagtctcaaggtcacttcttgcttattcaatctctgtctttactgggatttataaacacacccaagtctctcctgttttctaaacccctcctcgactgcattttcctccactcattgtcctgccatcctctttctcaccgcaggtcaactttaaaaagtgagctgcattcagggcttccattgcctgcccttcctcactctacactcacctcccccttccaagctattctctacgcagtagccacagtgcacttttagaggcacagatcttaccaggtcatctctgtgaaacctttaagggcttcacatggctgttgggataaagatccaaacactgatgtggtcaccatgaactgcatggcctgtgtccccaggtcacctcaccagagctgcttttcctctctgcagccctgccacgctgcctctcatttaggccttcagatacaccttttctcccaggactggtctctgtgcaagctgcttcctgtgccttgtatgttctcccactccctacacctcttggctgattcttcactgcttaggtccgccttccctgctgaacactttcactgtgctgtgaaccatcccatcaaagcacttaacctatctataattttatatatatatatttatataagtatttgattaatgaatttcccacatgagagtctcatgcttgtcagggtggggtgggggcaggtttagctttgctcatcagtgtacccctaatacctaggccaaagccagacacctactggtgctcatagactatttgctggatgaatgaataaattccagatgcagccatgccaagccacacaactagtaatttgcaggtccaggaattgaccttacatctctcagactttagtcttttgttctgtctttgactccatattgcctgcaaagaaggtttgggaagaaggttggggttggcagcaatgctgcaccaggaatcagtgtgagaagaaaaaagcaatgggtcaaaactgttagcattattgtgggacctcatgagtccctaaacctatttgcaaggctaacaacccaagtgtgtaatagtggtctgccagttcagtgacacagtgcatcagggttcactgaagacctttgataatcatattcattctcttctcccacccctaccctgccaggaggaagcctttttgagtcaaacctggagaatgaaggaagcatttctggcagtgattcaacattttataggcagtcagaaggtaaagttgcttaagagtttacagctactgggaagttggagtaatagaaacacctacaggtacaggtactgccagggtcccccagatgcattgttaccccagatgcaactatctactactgtgtgtgagtctccctgggtcacttattattgccaattgtatgaatccatcatcaaaataggtgagtatatccaaaatgtggccaagagaacagcattcgttacccaaccatggatactttacagtcaactagtaaatattcttctggagttggaacatatcaatcaatccactcacttgtgcatctcatattaaaatattcctttaaagaatgtgtcatttactgattaacttttacttttttataccaatataattgtccccttagagcagtggttaaaagcaaaacaaacttctaatttcaaataaaattttatcatttcaattctttgtctaaagtactggacattgataatcagtgccccctcaattgccttcctcctgtgacctccacagcttatctgtactctctattctctctttgggggctgtgatagttaattttatgtgtcaacttgacttgggctaagggatgcccagatagctggtaaaaccttatttctgggtttgtctgtgaaggcatttctggaagagaacagcatttgaatcatagactgagaaaagaagatccgccctcatcagtatgagtaggtgtcatccaatccattgaaagcccagatagaacaaaaaggcagaggaagggtgaattcactctccctcttctggagctgggacatccatcttcacctgccctcagacatcagagcttctgattcttgggccttcagactcaggacttaaaccagcagctcccctattccacagcccttcacatttggactgaattataccactgctcttatgggtctccagcttgcacacagtatatcatggaacttctcggcctccttaatcacatgagccagttcccataatagatctcctattttatatctatatatatcctattggttctgtttctctgaagaaccctaatacagatgacttctcatgaaaattgtgtcctgtattatccttactacctgcagcttctccataggttaccacacaccattgtatgacctcaagtgcacctccatttgctgctgagccggaaatgcccagccttgatctcatcccagagttctacactcagatttctaatgcttggccattagcacctgaagatcttatagggttcttaaccccaacttgtcctagtcaagctctttagccactgaggtccaccagtgagagatgtttccttcagtccctctcctcatttccccacagctacccaagtacctgtcagctctgttttcaatcttacacttttctttccattccacagcccatatcctgcatacctctctgctcaaaactctccggattagtgttaatttcagtggccatctgtatcagcagtgttctccaatacactaagtatatatgtatgtacatgcacatatatatattcctttcaggggactggcaagccccaacatacagggtaggccagcaggttgaaaactcaggcaagagttggtgcttcagccttcaggctgaatttctcctctaggaaacttcagtttttgctcttaaggcctttcagtggattgaatgagacacacccacattgtggagggcaacccttacatgaagtcaactgactgtagatgttaaccacatctaaagaataccttcatggcaacacctggactagtgtttgattaaataactgggtactatagcctagccacgttgacacattgaccatcccaccatctagctggtcttctgaactttggccaccttgccttcttaatcttccctcctacccttgccaacctttctctctgaaacactgacctgaaccttcactttttacccagtgttccacatcactttcatccaagaattataatcatagcatccaaagccttcctagttacagctccaggtgcctaccttccagggatccacacagatatctctatcacacagatagttatgcatatctcttaggggttacttatgtgtctaatcacccaatatcttggaaggtacatgagagcatggactcagtttgtccatcaggttatcactggggccatcacagagcctagcacacaaacggtactcagtaaacatttgtttgattcaacaaaaatttgtagatcttttctgtgaaaaatacatcggtggctatcttgaagaagagagaggggagatacagtgtctaccaccagggagctcttagtgtgatgacaacttatatcgcataggctctagttatcaaaacattggaaagactgtgcaacctggtggtgtgcagagccctgggctgggttgcccctacgtggctctatcatgactgtcatagctggcttgtgacatactcatcagctagctagatcactttgaccttaagtggattgtttagaggctttattatgtttgccaaatgatactttctgtctacatttttgtccttaagagcctaagaagcttgaattattttttaattgagtaattaatgaattgatatattcacaccctgtctcattccacaaagaattttcaacagcttacaggagatttgcatgtgttaaataatatatgagtaggagattataaatggaaacaggaggttgaaattggggacaaggagacccaggtacctagcccttgctgacctacattcctgcacatgatgtgacttggacttctggggaaaactaagagaaggatgatagaaattctcacaagtaagaagctaaaatctaggatctcaagggaaacagaacttttcccagcacttagctccaaaaagaactttgtcacctggggaagtcctttattttctctcatttgttgccatatcttaaaaaaaaaaaaaaaaagttcactaaaagtatggtagcactatattttttaatcacgttagcttgtattcatctcagttttgtggttaaaatcaagggctttggattagaaggaatttggaatggaatccaaattcaaattcagaggaattggaatccagctggattcaaatctttgccttcttattgtcttgctgtgtaccttgggtgagttatttaaccactctgtgcttcaaatttaccatctgtaaaatagtacctatatggcacctacttaccactggatttttgtcagaattaactgtgatcatgtgaaactctgggcttggtgcctgccatgtggctgagctctgaggttggccagtgttgttaatactggttgatagtccaaaaaattataccatagagtttatatttgcattaagtcatatgcacagcccattgtccttagtacatttaataacattttccccatcatcacaatatacattatatgaacaaaataaagcataatctttatctgagaaagtagataaagaaccattatttccttatatgaagcccttttgttcagtcacctttaagccattctgtgtgcttagaccagtgcttcatgttaggatacaacaatgaatatgatcaattcttgctctgtgaaaatgacctgtgggaaggggccgggggtatggagcctttttggatgatgaaagcaagcccagaacctgggacagacctccagccaagggcggggctgaagggatccgagaagatttgttagaggaggaatttttgggccaagccttggggtccgtgggaaccagctcagttatggagcaagagtctaggagggaggaggaatgagattgcaggcatgaaagaatcaaacaatttgttgcaactggggcatgggatgtgaatgatgcatgggaggcagtgtgaggcaggtgggaagggcgagggctttgtgtgccatggtaaacagcttagaacttatcccagagcccctgaagaatttaagcagaagagcttgaacaatcgttttactcatcattcccttttagaaatgctctttgttctgtttcctgtctaggacatagtgtgatggacaccttggctgtggccctacgggtggctgaagaggccattgaggaagcaatttccaaagcagaggcatatggggacagcctggtagggcccctcctgctcctctctgtggggggaggtgtgggttggggtccttgctgccaggagaaagtgcaggttgtcaggaaatcaatgtcccagcagctctgactagagcaaggccctccctctgcttttgtggtcaggactctcctggcaaagtgactgccaagtcaccccaaatccacccacagcacacagccattctcttccctcctcaggacaagcaaaatgaggccagttacctgcgggaccacaaggaggagctaactgaggaactggccacgacaatcctgcagaaggtaggtgggtcctggcagtgggatggctgcagtttcctggctgggcctggtgcagggactctggcaagtagcaggtgaaacatggggagtgtctctagcactgtatcttctgtgccttctcactttagacttttgtgccctggggacccatgcagagggaatgcatcgcactgcttgcttgctttgcagtcactgctgctagctccatgccctacgctgtcccttgcatggtgtacctgtcaattacttctgagaaaccaaacaccccaaaactctgtggcttttgacaaggatctttctgtcttccacagccaattctccaacaccaactgagaagtgaaattccattctgatactaacttcttcctggagttagtgcagaccccacaagttaagggcccagtcccacaagactgcccctacttcagacaccagccacaagtttcaggtatcccaaagccaccacacttctccctagcctgctgcaaatttgggagtttccatgaccgtggaccctcaattcaattatttgctagaactcacagaactcaggaaagtgctttacttaccattaccggtttaatataaagggtacaggtgaacggccagatgaagagacacacagagcagcagggtctggggacagggtgtacagagcttccatgctctctctgtgaacatcactcccccaacacatcgatgtatgcaccaacaaggaaggtttctgtgccttgttgtatcagagtttttagccaggtttcagtatgtaggcaggattgattaaatgattgattacctgattgaatgcactctctagtctttctgctcccagccctctaatcatgtactgtagttggtttttctggcaacctgcccccatcctgaagttatctaaggacctcaccttgaatcaccttgttagtgtaacagacactcctatcactcaaataattgcaaaggtttttgaaactgtgccaggaactggggacaaagaccaaatacagatgctcctgagcttacagtggatggggttaagtccagatagtaaccgcatcctaagttgaaagtatcataagtcaaaatgcattcaatacacctaacctactcttaatatatcatagcttagcctagcctatcgtaaatgtactcagaacttgcattagcctataactgggcagaatcatcgaactcaaagcctattttataacagtgtttattagctcatataatttatggaatgctgcactgaacacacaccgctttcccaccatcgtaaagtccaaaaatcttaaatcaaggactatctgtatatatgttttgttataccacaatttatttattgctcacacatctgcagtagctgcacttcaagctatgggttgggacaaagtcaggtgcagcatgttcactctggggcccaactgagggcacatcagctgcctgtggccatgacaggagcacaagccagcaagaggaagcacacagtgcttgttaaggccaaggcttagctctagcttatggttactgactcccccctctcatctcattggccagagcaagtcacacatcgagcccaaagccaagggctgggacgtagattctccctatactgggagggtctgcagagtcacactagaaagtgccgtatgcaggaagtgttgaaaaacttcagtcttcccttttggtcacgataattcacatcccttccgtatgccaagtagactcaccacacccaaagacccccaaatgtctcatccaatcacagttcaaagtacatttgatccaattttagctcctttttagctggagatctgtaaactaagcaaacaaatgatctccccccatatacccaacatgcaatgttggaagagggacagggaggcagcactggccctacccacctgcagaggggaagaatgggaggcaccggcagtcactggtcctcagcaattctgaaatcctgctgggcaacatggctgggtccccaccctgccatgggagatggcacctcagttgattgttctctgggctctcagccttccttttcatcctcctgtctggcctaaaggaacattggagaatatgcccatcttggtggcttagcacatttcttgactgcttcctgcctataggaagttgaaagcccagagaccttggtacggatggactcactaaatccaaatgactgtgcaaacgagctggatttggagccattctggtgactcttggtgtctacacccttgatagggcttccagatgcttcctaaattcaggacttacaaccagaggctctgggtttgagatccagctccaccatttatgagctgtgtagccttatccaataacttagtctctctgagcctgtttcctcatctataaaatggaaagaattagaatatgtaccttccagaattaagtgaggtaaagcctacacaatacctaacatgaggtctgacacatgctaggcacttaataaatagagaagctgttaacatcataaaaggattatttgtaaactgtaaaatgcttagaatgctcaaggctataattgtgctggtttctcatagcgcagatctgaaacagcctggtgttctgttgaaattaagcttataagtggctgaaaaaaattccaaagatggtcccagttactccacatagcatcaggaggcctctccaataacttgccccttttttgtcctcccctccccagattatacgaaaacagaagagcaaaagtgagcagcaagtggaagaagagccaggatggccacatccccagagttgcagcacaaaggtggcagatgaggggacctcagcatcccctggaggctaccgtgctcccgctgccctctgggtgagtccccaagcagtgctggtctaccctccacacgtgcaggtctggggcacacatttaaccctctgtagttgaatcaggtggccactggccagggtaaaaatttcagaaggatggggagcgaaattgaaagagaaagtgagtgtgagtcgggggccaggaagggtaagagaggagagaaaaacacaaatggtctattgataattatagagatagattttacacagagaccaatttaggaaaaatacaaatgctgataggctgcatttttttttcattctgaaaagaattatactgagtccagtgggggaaaatagctttataaggaccatgtgtactcttataacctagattgcttgctttactgaaactgaaaagtgacagcgagaaaattaccactgctgtttcaaccaccaaaatggtcacatctggacacaggaagtcacagtgtggagccaacctttctgtctgtcaccttgagtcacagagctcagtggtctttccacaaccaagggtttggtgctgttcctgtctgcagtagagttgctgagtctgtcacatcctttgttactggtttgagtaagcccagttgaggatatgcaaagtgctggggaaggagctgggtggggcaggttctgcaagaaactgagggactggccagtagggctctggttctgctagatataggtgctcacagtctgggacagggcagcacacaggtgcacttcaaaactggaaagtcaggcatgggaaaggcaaggccaggggcttaccccatccccactaggggtctagtggcattcatccctgcatgagcagattaaaacgagggcatgcaaagtagcacatggtcgacttgcagtccacaagggatcagcataggtcacctacataaactcctttgtcctcgccaactgccagatgcacaacggttacaaggagtatctttatggctttatcagagatgaaacttcattgatttatcagcagaacctttccttgtcaacgtgctgtcagcttgttttactgctgctgtcatgcatatgctcagcaccaaggagaaccaaacaagtagaagacgccatgcccaccgtccagagctttataatctggttagcaaggcaggaggggacacgggtaaggctggtaaaaaagaggtaataggagacagttcataattgggtgctgagttgaaagattgagaatagaaatggatttggaattcagacaaggggcctttccagcagagagtggaaaaggatcctactggatggagcaggggagcaaaagcccttcaaatagcctgtcactcagactggtcacaaaatcagagctgcagttcctgggctcaggctgcaggcatgacatcaccttgcatttggggtctttctgaagtattttctgcaaactcaaagtgtcaagtcttggggagatccagaaagtagaaattcccacagcaccccagactcaaccatgagtcaatgagtcagaggcaagaacagagagcttgggctctgtctctgccactcctggggtaggattctggacttgcccttgactagatatgagaccttgaacaactgtttagtttcgtgtctgtaaagtggaaataataagacctgccctaaaggatggctccaaggattccttgtgcagccaacacagtctttattgagcttccactatgtgcaaggcactgtgctaggtgcttgtattggtttgttctcatgctgctaataaagacatacccaatagagggtaatttataaagtaaagaggtttgactcacggttccacatggctggggaggccacacaatcatggtggaaagtgaaggaggagcaaagtcacatcttaagtagtggcaggcaagagagcgtgtgcaggggaactcccccttataaaaccatcagatctcatatgggaaagacccgcccccatgattcaattaccttccaccaggtctctcccacaacgtgggaattatggaagccacaattcaagacaaggttggggtggggacacagccagaccatatcagtgctacagagacagtggtctccgcagatacagcagactccaccatctaatggtgaaacatgccataaacaagtaaataacaacaacaaaaacacaggggtatatatttcagtaattggcatcaaggggatagaggggagggagtgctggggacaggtagacgctcggttagggagctgtcagggaaaaccatttttaggagatgacctgaaaccaagacttgaaagatgagaggtctgggagcagtaagaggaagggcactgctacagggggaatggcatgcatggaggctctaagcgggaaggaacttggcatgttcaagaaatagaatagtggttgtgtggctagaaaatggggtaaggggcacagtggcaacagtggcaggtgactaaatgagacgtggacatagctattgctctattattaccttatttccacgtttcaaaataaaggtgactgtatcttcaaggtatcccctgtgagttatgagctgtacttcactgtgttttggtcagcaaggctccaggcccagagagcagagctgttggcatatcacttatctgcctgctccaattcccagaccacctgctgccaccagcccaaccccactatgggtcctcaccagtgccctctccccttccttcccccacacagccagatggcatcagcttgcttctcttctaagatatcaactcacccactagaacatttccatccactcactgcatcttggggctgtctcattcttcctttatcagaagctgaaagctctttctctgaccctgtctcattttcccttgcactaaagagacctcaccccccagaaacagaccttttctgatttttcctgttggcatcaggtgactgcagttctgcacagtaactaaaattctcatgtaaatcccgtgaacagagaggtatgggaagggggtcatcacaaaaagcttaaacagtaatgttaataatggagtgatggtcaggtatctatagtaataacacaggaccaataccttttctttatataaattttatatgcaacgggctttcacatattgtttccttagctccacatgagagcaccctgcattatccccattttacaaaggaataaacggaatcctagctaccccaagccactggaactaagtggttgcaggtttcctggttctgagcatttcctgcactccattgtctcctgtttccttgggaagctccggagatggaatgcctgcttccccaccagatggtcactggatctccttgtcatgcatatggttaaagctggaagtagtgtccctcccacctcctagagaccagagatgctctgtgtatcattagagatgtaggacagtgggctcttgtatcataagccaaaacagtgggcacaacagtgatgacaggcaatagtgttcccgtttcagcagcaggacaacagaggcgtttcattcatccacactcctcggccaagtactggctgaaagcagcttcaaataaacaaccatgacccttcccaaggggaatctcccgcctggctcatcagctcactggaacgaactcagtccacccaggacacaggcatgaccatgggctgttttcactgaggaagacatttagaggcacaagccagagtctcataggatttccctttggtttactaaaacaaatacctctcaggattttatttgttttgtcagaaaaaaatctgtcttgccaaacacctgcctcctgcacagcataactcatggctatgctttgacatcaatgtaaagagaacttaagcatttctttgtttttttgaagcaaatagaagaatattatttatttctagatttttatataaaaatagggcctaatggaagcccctccctgaatgtaacatatgttttgaatttccatattcaacacttcacaagatatgtccaccttcccccggcttgaatctaccttttagggaaggagttgggagagaaccgtgtggctgtagtttgggaaacaccatcaaggatactgacacatacccttgggtgagcacctctcctggcttaacagtgtaaccacccagatcatatgcctggcaggggtgcaggcaccttacaggaggaacaaggttatcagctggctctttgttactgcaaccttcatttttatcttagacatttgatcaaggaggctccctcctgtcctctccctgtgagttcacaccatcccatgattttcaatatgtaaacagcatacttttgtcaacaatatcaggaaggaagaagtatatgctctatcttcccccccattcatacttatactcctggggagctgccccaagcaaagaagcctgaatctgagaataaagagaaatctgttatgtacccagcgggtcccggacacaattttccctttgagaagctgctattatcagcgccttcatgattgtctgtggtcacgtgtgttctggattttccacagctcagcactgggtgtgtagtaggcatcttgcagtacaggtctgtggctgattgatggcagaacaagtctattagtggggttttaatggaagcctggacttgaacctttcccttcaggcttccgggatacctgtggaggaggaagagtgtactaattaaggtcctagcaaaaacactgggattcataccctcatagataaccatttttagctcctgacttggttaaaagacaagcactgtgattagagcttttaaaaaatgttattggaggccgggtgtggtggctcacgcctgtaatcccagtgctttgggaggtcaaggcaaatggatcacgtggtcaggagatcgagaccatcctggctaacatggtgaaaccccatctctattaaaaacacaaaaaattagccgggcatggtggtgggtgcctgtagtcccagctactggaggctgaggcaggagaatggcatgaacctgggaggtggagattgcgccactgcattccagcctgggtgacagagcaagtctctgtctcaaaaataataaaataaaaataaaaaaataaagataaatgttattgggatggagagcttccactgtcccaaatgtggtgataagaatgcattgagtcttgattcgttggattgtttagaaaggcctatactaagtcctagcctgaacaccaccaatgcttgaagtggtgaaacagatactcatctgtccccattgggcttcagccatctacatgtaacaggacaagctgaggtgacccacagagcccacgctggccaactcaggaagatgagccacagataccccaacagcaatgacaggaaatgacctggaccctcccctgaacttattcccacttctcttcctccctccctccttttgtccttgtctacatcctgctgccctcctttcccattctcagactcccattgggtgtggttccccatgtcttgccccccgatggcactggcctgacttcccttgggcaggaaccctctcaccagcaccatagcagggccagcctggtgccccccaggggtgacacatatggtagacagggtcagctttctcaaatgctgtatacagcatggctgggcacattcatgtaggctaagccactcctttacctggccctaatgccctgtgatgaaaaagcctgtgccaggagagtgaacccaaatttcagaccactggtctaggacttaagtccaatagttaatttcaggtccaagagttaggacccaaaagggactgaccctggccaaagccactgtatggcacacctctgggaacccccattcatatggaatacaatgctagtaatgccccctggggatgtgcagctgctgctgaggcaaagaatgtgaggaacaaccattgcttgaggaccatgcattatgtttgtacatcacatgtgatttcttttactcctggccacaacataaggacatattattagaccagtttcatagatgaaggtagtaataagtggggccagaatttgagtatctctttcctgctccaaaactgttggtcaagcttcttcctctataaaatgagatcagtagctcagtgatctccaaggtccctttcagctgaggttctgaggctgcactgttcagtatggtggccgtaagctacaagtgactattttaatttaaattaaataaaactaaaaatctagttctttggtcacactggccacatttcaagtgctcagtagcaccagtgcctagtggtgactatgttggatggtgcagatgtagaacatttccatcatccatcaagttgtatttgcacagcactggtctagggatttagataaagaagaagacatgaacaaacagcataaaagcagaaatacaaggccaggtatggtggctcatgcctgtaatcctagcactttgggaggctgaggtgggaggatcatttgaggctagaaattcgagaccagcctaggcaatacagtgagaccccatctctacaaaaaataaaaataaaaattagttgggtgggctgggcacccaggtgcccaggtgctcacgcctgtaatcgcagcactttgggaggccaaggtgggtggatcacctgagatcgggagttcaagaccagcctgaccaacatagtgaaaccctgtctctactaaaaatacaaaaaattagctgggtgtggtggtgggcacctgtaatcccagctactagggaggccgaggcaggagaattgcttgaacccaggaggcagaggttgcaatgagccgagatcacaccattgcactgcagcctgggcaacaagagcaaactccatctcaaaaaaaaaaaaaaaaagaaaagaaaagaaaattagctgggcatggtgttgcatgcctggggaaaatgaagtgggaggatcctttgagcccaggaggtcaaggctgcagtgagctatgattgcaccactgcactctagcctgggcaacagagcaagaccctgtctaaaaaaaaaaaaaaatgtcagaaatacacatggacgctggccagaacctggacacgaaccaatgggccgagtttcagttcttgggtacttcagagaacatagctctcccacctttcctcaagctgttctcaccctggacactcatctgcatcacctgcccaagccctgctttaagggtcttgatgcaaggggtctggagtggagccagggcttccatatgaccagaagctcctgggtaatgctgacaggatgccaggcttaaggatggtatcattatatcctgagacagaatcctgacctacaggctgtggagggccctaaacctgtggcctcctgatagggcctcccctttttcagttctccaatgacccagacacctttggcttaagaaataaccatgcagaatccccaatccccatcagcaccactgcttaggcttgactgcaaaacccaaacttaattcatccccatccagatgggatttctcatctattctcttggaagaaggttcagtgcgaatgctccatttttaatttcctccctcattgtgcgctctctgccagtatgggggtcagtgcgacctggctttcaaagccttaagacgcaatatcctagaaggcaccagtgtgggtgttataactcatttcatgcctctttgggtgcatgcatataaaaaggcctctctaataatatcgtgatcttattggtaataatgatgatgacaccagggaccagacacttactgtgtgcccagtgactaaggtgaatctctgtctggctttctctgttctcctgtcttttgtcccttcctattttctcagccttttccctttgtctctgttgtttccttcctcacgttccttctctcttttgaatggccatagtatagaattaaagtactttttgtcattgctataattataggattgaatttaatacttacatctgaccctaaaaacacaaagcaaagctgtgtctcagttacgtatacatatgaccactcttcttgatttgccctcaaatctttgatactaaaaacattctttccctgttttttactgtgggctctttgagagcaaagactgttttaaagctgcggttggtgccacagggagcctgtcctgttgatgatgatgataatcatagcaatcatagcaacaatctatggttccaagggatataagtagaacacattgctgctgcccacacaggagatgcagctactgcaaagaatgctgtaacaaaagtaactgatgatcacactgggtgttttgcccaaagcttcgggaccagttggttcacgtggcaagtcctgctgggctggggcacattaaccaggagtgcattgttgccaggcttgcagcaaaggctgtcaggcacacaccaagagagcatggaggagcatcgaattggaatcagtcagacccgagctcaacccttgccttacccttggccatccatatgctttgggcaagttattcaatcctgactctgtttactcatgtgcactcaatcaagttgagtgagagaacagttacaccggctcagtggtaatacttaataaatgctcttatttggctaatatttattgagtgctttctctgcgctatgcatgatactgatcccttaacatgaggaaactgaggcttagaacagtttaagtttttccaagatcccacatagcaagaggaggagctggcatttacccactacctaaggtatcacccataagttaatgcccaaggagtaaagaggaagggcctatctgaaggcccaaattctcaagttcatcaatgcaagggattgctgatgtgctaacattcctggatccatggactccccctgcagcccccttgcatagatgttcaaacactctaactcagaccagctcttccagtcaccagccctgcgtcttctgtgtaccctagaataagtaagacaagcagagtctgtgcgtaggaaagaaaagtgggcacagagggctcagccagcgttataagccagtataataaacaaataaattactcctctctggctgaactagctggtgagtaaaagcattgttgtggtgccctctgctgggcgtgtgttgcttgtaatgaatttgtggcagaaccacacctgggtctcagaactgtctttttccaccctggctggagactgtaggccaccagtgtcctaggacctgttggagacagctctgctgggccttttgtggttgtcagggtgtagcttttttctagtgtggaacactgatttgcctgaaatagactatttttatagcctggcattccctactctctgctgttgggaccagagagggacttttcatttgttagtcttggcttttgcagagaatgggggagaatttccgtcccataaaaaaggaccccagccaccacatatacacacaagtctgagccactgcaaaaatgaaatattaagtattgtttcccctttttaaacttgtattcagtgatttacagtgagaagcttgtagattttttttaaaggccagatacagtaaatggcttctgtgaggctgcaataatactgcatctggcaactaggctgtcagcttcataagggccagcactgtgtcttacagcctataaattcagtcacaaacatgcaaccaaggatcacaaacaaaaggccatccctgccctcatggagttcattgtgtgtggaagacacagcaagtcagtgcacaacgataacagtgtggacagagctgtgtgatcacacaggaggagcaacctagccaatcccaaggtacaccagggccaagggcgtgtccctcttgatacatggaggtttgccatagaatgatgttttccttcatttttaataacttcacttgccagttgaccaccatcctcaatctctatcctctctgaaagctgctcattttctgtcagatatttagcagaatcgcagaatggctctgaatacctagccctgtgaaaacctcgggtgttgtcaagctgcatcatccaaactgctctggacactcgagacagggtcagtgcttgctgtgccctcagaatgaaggagatgacactcagccaaaagccactttacatgtgtgttagcttggctctcctccaagtaaaaccttgctctccaggatgtaagtgtagatgacagtgggatcctttttatttctttctcttactccataattttgtgtaagaaattggaaaaaaaaaattaggcactttgaaaaactcattttgtaaccattcactcgatagcaaacattcattgatttccaattctgtactagttactgtgccaggggctacagatgtcactgctaaaagaacattaccctcagttgctccacagtctagtgggggccccaggccagaagagagatgtttgcaagagtgcagtaaaacataagtacagaagaagcccatgaccaccagcccagttggggaagggggcaattggtagatttcccacaggccatggcctgcttgaactgaaccttatcgacgcacagtgtcttgaggaactgataaggcaaggagagctcatcacctctgggttgcgttaacctatgaccattgcatcgaaaggcaggtctggaggcccatcatgctctctcttctatatttgaagggataggagcaggttgtaacacttggttcacagcttagggggttccatatttgttctgtaagcccacctttctcctagatcaccccaaggtttcgtggggaaagtagaggtttcctacgactctgaatctgaactggcctgcattaccactctccaacagagtgaaccagacgccctgtatgtgaggggtcctgggccctagcctggcctgtgatgatggggatgctgggttttgatcctcatctatctctgtgtctttcctcagactggtccagagtccttaggaggcaaggccattgagtgcatcttcctcttccaacctctaatcttaaagctcagtgttgtcacccaagtatcctgtgctcatttttgctgtctttctttctttgttattctctcataccttttttttttaagctaccattatcatacagtttactgtgagtgcagggcaagattaagtttccacgactctcaaggaattaagtcacttggccaaggtagtgtagccgaggtggtcacggagcccaggcacggctgactcctgggtccagctccaaagcaccccatggccctgcccacagctcttctctgaaagagcttgcctttgtctcctaggctaggtacctgtgggagagagaaaggtgaggaaatgagcacactttgcactgggacagaagggagtaggggctgctggtgctgacatcaaccagcaggtggaagcccactgcaaagggggtctgagttttggatcagtactttgtttaatactgtaatcatagatgctttcagtggctttgtgaatataccctttccttcttaagattaccaatgtaaaaacagcaaaataaacaaccagtaaaatataattccttcattaaatggcaaagaaaaactttagtctctttctatttgataaaattctctatacaacatttgagcttcacaatacaacatatatatatataatgcattatatatctataatgcaattcaagtttgttcctgtcagtcacttgaatttccatttctgccacttatccttaggttagagtttgttttccttcctttaatttaggagctacatgggaatatgttgtaatagtcctgtgctgtggatggatcataccttgctctgggatctcttcaggtttggaggtctttgaggagaacatgctttccactttgcatgcccgagagcaactcatcacacacagttggccctgagaaatattggccgcaagagtggtggataagaaagagccgtatgagagctggccccgtaaaattacactacatctcattctttctactaggcctggctgacttgcaagggaataaacatttacctggccttatatactgatttgcagcttttaaggctcacgtgaaaagagccattaccattaaacatgttttctccatgctggacaatgtctgcccccaaaaggtgaaggcacacctcccaggcactgtaccttatgagctcaccccttcccctctttcctttccacagaggtcccagtctgccttctcaatcactggagaagaagccctgaagacccctccagtggaggctccatcgaggcagccaagggaccaaggccaacacccgagagcagagtctgctctgcccagctggaagagtgtggacaggctggatgaaacaagtaactgttttaagcagtatctagttggtctgtgggtttcaaaagtgtggtttggagacatcttggctattgcatggccactctgctcttcttcccataagtctgaactggtgtgtgtccctctgggctaccaagtcatgaggcctccagcacaacacacaatatataatgtggtcatgttctccacccaggcagttttcctagctgctctggcagaatgaaggctcttagggtgtcatcatattctatgctctgtgctgagacctgtgggacagattgggggctcctggacaagtgtgttcacatcactccactgcacaccccacttcagctgcctgttctatgtggactaggagaatgtgtcttatgtgggccaggagcattaaaccaacctctcatggcatttcaactttcaaagggatttgggtcccagcaaatttgggtccttagggctggttttaaggatgtcctttctgaaactggataaattagttagggtagcatatgccactataacaagtaaactgaatatctaagcggcttaatacaatcattttctttttcatcacacaacagtgcagtacaagtacccctggcctgtgggaagccttcagaggccaaagtacaaggttcccaccttgtggctctatcatcctccagggcctctgagtcttttatgggcttatccatattcagacagcagatggaggaaggcagcatggaaaaggcaggtacctgcttcttaactatctcagcacggagagctcacgccactttcactcccaacctgtggacaggaactggtcacgtggccccacctcaatgcaggcccggagaaatggcatcctggctgggcagatgcataccagtaacacggctgggccatgaaagagtctttggtgggcagttgtctatccctgcctgagggacatcctgaggaaggcattgatgtttgcttgcacctctgctcttcctgattcctccccctagaatgtcctgcctctacatggggcaagtcagcttgcctctttagagactcttcaacatgtatggaatgtggtcctttataaagctgttgagtcacgtaatccctcaaaatgaaggggctcaaatgaactgagtcattttcctaaagtctcacatcagaagactgtaagttgcttggacccatcactgtgggtgacggccgagggccatgaagcccctgtgctcagggggcctcctggtctacatgaatgtcagactaaaacttcccccaacccctgcacaggtctactcctctcttcctatttcctgcatacacacactgtgtcaggaggccaggcatatttgtcttcacatgaagaaagcattaacagtattctcatcccatgtcgtatcagatttagacccctttcctgaataatgaaaacaacaaaaaagattaacagcagcatagccatcctagtaataagcttttaaagattgtgctattatttctactctaaaagggaaaagatttaaccaacaactatagaaacaaaatccattgttacgacagtgcaaagaatcagaaaacattaaatatttttaactgtcattctaaagatttaccaaaagagattatttttatattaaccttttagtacctattagtagaaactgcagtgccatgacattgcagaaattctgcagcatgtgatcgtttctttacttatgtatatggtgtttgcttttgctttttaagtgcatttttcttttctagatatgcctttctttcctccctctgccctcccagtctattcatattcattcattcatattctcgctctctctcttcttcctcattttctcacttctctctctttctctatggattgcaaatgcacacagaaaatggactgttagattccatagagtacatgagaataccacataatagaacttcaatacacaatatctagctttctaaaatcactttaaaacatacagagtcacttaaagtataataaaaaaaatacagagtccatatgtaggcactattttattttttcctccaacagcattaccagacactgtcattattttgttttgcagataagaacattgatggacagggaagttaagtgacttgttcaagaccccacagccaatgtaggcagagctggtcctcaaatccaaacagcatgactccaatttgcaggttttcaactactgcattataagtgtctctctaccataaaaacaaacaaacaaaaaacaaacaaaaattcagacttgcaaagtgataaatgtgtaggatattataaaaacaactacaagatgctctatttcacaaaatagtttccaactggattatgagcattcataataaatttgcaaaggaattttgttttcaaaacatgattttgtacataattttctgtaaaattaggcacccataggtaatttttcaattgtatataaacataaaacttagttccacagcatcacacacccaaaaaaagatttcacattctgctcaaaactctatgcatctctcaggataaagatttaaaattttttaaaaaggacttgggtggaaaacttctggttttctgaggaatttttagcccttgacatgctaaactgtccatgccagcctcagaggtcttgagggatgtctgaaatgtttagcaggaagcaaattattcctacaggcattgctcaatctcagttgggcagaaacatcaaatagaagcgttccgaaggtggaggtcatcttagaaagtgaatgcccactgggctatatttggcagttgtgtttatgcctcaggagaagggttgattcaggagcctgttcgtgcacagttggggtcagtcttaggggcactgcggtttgggtaaaccacagtaactccgctttcagtcttgacgctgcttatagcagttaatgggtttcccccaaatgcattttcactttataaaccttgattaggcatctgctgtatatgctgcgtgtgttcagtgttggggaaataaagatcggggaattgtcactgctctgggatcactcagtgagagttagttgtctgcacaataatggaagagcaggaatttggagaaagaggaagagggagcaggatccccgaggggtgttcctgatggaccgggagactgtggtattggagcacaggtgcagctttgataatgctgctcaacaaccaccaaagttttcacatgtctgggtattcagggagccatctgtgtttttgctaagaagtaaaagtttgctgagggaaaatttggtcaacttctagcttccaaagaggcatgaggcaacctagggttgtaaaaaagcaggagaaggagagctggcaatgggtcaaatgccacctcaccatgtaggggaccacatttataacatggtcaaccctagagccagccctgagtggcattatcaagggtcgcctcctttggattcctcccagggccccaggagaagctgtagacagcagggctcattgagagctgctcaatgagccccgtcgcccctatagcctttggtgcctgtattcattaacaagtagtattcatgtgcccaggatgagacgcaaagttggccaggggcttggggcatagcagtgaagaagacgtggctctgccctcaaggagcccatgatcaggattgaggggtagggtagacaaccaagaaaataaactataatatagtttgagtgttaagaaatgaaagctttttggcaaagctcagagaacagaatagccagcgtctcaaggaaggaaggccaagcatatgcaattgaggagtgatgtataagtcaagtcttgaaagatggtccagagagcagcctcagtgacagattagaaggcccagaggacttttcctttcttctcagagtgagtgctccacagccatgctcggagtccactttgcatcatgtgggcgtcttggtttgactcccaccagaagcagaacctaatatgaggatctgaagacctatagtttatttgggaggtgagcccagaaaacacacagggaggggagtagaaatgtgagacaaggaaagaaaatcaggcaataaatgacttgttactgagcagatggccactgtgggtggctggagcttgaccccactggggactctgggagccagtgtagaagactcacctgcctggcaagcaaaagaggggggatacttagccaccagctcccctactcattggttgagggctgctcccaggaggcgatgaatcctgggtacttccactctgcccctggggcaggcaacacaggctctagtagccagagcaagcctcaagtaaagacttgcaagtgctgccaattggaagtccagctggcatacactgaagtcgtgagggccaaggtttggggtggggcacacacagagcctgctgcagtaaaaatcaatataactacttactagccatgcatagcttcactgagaacctgagcattcctgagaaacccttaccacctgactgacaatccccagacacagcattaggagaatgccagcaaaatagaaatacttttctcaaaagacctgctattaccaccaccacaggtagaacccaataataaatggtaataataatgctagcaagccactcttctgaatagctccattgtcaatgaaaatagtgttgctgtatagatattaatatgtcatactgaatagtgactatcagatacatatatattttctgtatgcatacatatggagtgcatgggtgttaattcataaccaggtgttaagtactaatgctaaatctgattcaacagatataagctaaaaatagctcagggccctaagtatagcaggcactaggattgatgctttatatgcattatctcatattaattctagtgacagccaaaggtgggtcacactgaccccactgttggacaaggaagtaggcccagaggtgttctctaaccaaggtcacccgctagtaaattcagtagctggggatcagccctgcatctgctttaatccaaagctcttgttctttgccctatactaaagcagcctccttcatttatagacaaggggaaaggagccatcaggaattaatttcctccctgagcaggcatgtgtaacacactcacaagcatcccctcgtgcagtcctctgacaacccagtgaggttttagctatgccctttttcaccagtcagagaaccgaggcacagaggatcacatagctgccaggtggctgagtggggcttcctcccggacctctggcttcgagaccactggtctttccactgcacaaactggctctgggacacagcaggctaattttcttgtaaggataaagagatgcctgagatccaggccctgcctcagggaccttgtcctcatactcagcaggtgtgtgacaggtagaacacatggaagaacgtggaatgagccaaccaggccctcacaccaggagagctcagaggagaggccatgatataagcagggagatgagaatgtcctccaggaaaaggccattcccaccagtgggatgaggtgttgtagagtcactagggctttactacatggaagtggtggagagggacactgaaggcaagagcagcagagaaaggcaggtgtgtggtctcaggcttcttggaggaccctgcttgtatcagcccactgccagggaccagcgtcctcctcgtcagtgaaagccccacttcctgactctcaaaataaaaataactcgatgtcctgccagtctgagctgcagtcaggcagtggaagtggaactgggttgctgttgaaaacatatgttccaccagcatctgaattcccctaaggctgtggttctgaaacaggcttagcaggtacaatgctctgtgggcagcactgtgaaatactgataactttcctttcattatgtggagcagtagcagtttaactggtagaaaacctgtgtgttttaactagcataaagtaagaccctgcttcagagtcctactgcagcagggctgtggctgctacaggccttaagccccaaagcagatgtccacacacaaactggggaatggtttcttcaaagccctggggtcctcatcactgcccccaggcaaccctgcaacagtcctggttaaaaggaaaaaaaaaaaaaaaagactgggtgctgtggctcacgcctgtaatcccagcactttgggaggctgaggcgggtggatcacctgaggtcaggagttcgagagcagcctgaccaacatggttaaaccccgcctctactaaaaatgcataagtagccaggtgtggtggtgtgcacctgtaatcccagctactcaggaggctgaggcaggagaatcacttgaacctgggaggtgaaggttgcagtgagtcgagatcgtgccattgcactgcagcctgggcaacaagagtgaaactctgtctcaaaaaaaaaagacagctcctgttggcaactgctgtgcctgagacctcagtcctgggccaagtacgaatagctaacggagcagcatttcatcttactcccaccccacagacacgtgggaagaaagcattttcctattcaccttaaacaagacaaaacaacttttaccaatccacccccagcatgcagatcaatccttgggaccatgctccaggcagacctgagcccagtttagaccactccagaccatagtcacagcctgagaactgctccagctgtccttgcatggtgctctgcagctggccaaggacttccgtggcacaatctatagcccagagctgccttggagtcaggtagaggatgcacctcgtcctcactctaaaagttagcagctctgtgacctttaacagttacttaacttcgctcatcttcatttcctcatccataaaatgacattggaaataccaaagttttttggcctcaagtcctttccagagtgaggcatgttccttgagttaaaaatagacctatgtgcctatctcaggagcctattacgaagtaggatctataaaagagccaagagcagatgtgttaacctctgaggtctgccagggcaggtggtggaattgtttcccatcagtgaggggaaactaaggatccaggagacaaaattgtagcccaaggtcaaagagccagaagctggtactgccaactgcagccctctcccctccccttccaggcaagcctagggcaggagtgggacagtgctgaggagactgagatggtatcaaccctggtagactgaaataggagccagatctctgagtttctctgcatctgtgaagcactgggaccctttgagctttcaagagattccttggggaactttgaactctgcccaccaattgggtttgccttcctgggcttcctaaaggcaactgctctccaacagccccacaagccactcttggggaggtaacaagtggcaacttcatcttgcattaaagtgataacagcccctctctgctttctctatcctctccatccacagacctggccccagttttgcagagccccgacgggaactgggtggccctgaaggatggcgctccaccccccacccgactactggccaaacctaagagcgggacgtttcaggccctggaggtggcctccagtgtggcatctgcctacgatgagatgggctccgatagcgaggaagactttgactggagtgaggccttgagcaagctgtgtcccaggtcccgggccctgcccaggaacccccagcctcagcccacacaggcccagagctctgaccaaggccccatagctgcctccccatcctctgcactctcccccaaccctgaggccatgtgctctgactcggagacctcctccgcaggctcttcccgagaagttgggcaccaggccagactgtcctggttgcagaggaaggcccccaggaaccctgcagctgagaagatgcgcttgcatggagagctggacgtgaacttcaacccccagttggccagcagggagacctcggacagcagcgagccggaggaggccccccacaccacagaccggcgggccaggaggtggagaagagcccgactgggctcagaagagccaagcaaagaaccatcttcccccagcgcccagctccgggatctagacacacatcaggtaatggaagtgcatgcgtgcaaatgcacacacactctttaggtaggatgtgccctactccaagcacaagtggcatagagtcctgggtttggaatccgcagacccagattctcatcttggttttgcagctaagtagctgagtgcctctagacaggtcacatcaactctttgggactccacgtcctctttggagatgacagcctagaattcaaagtgtggtttgtgagtgtggcccccagaccagcagcatcagcaccaccaggaaactcattagaaatctgccaaattggagattctgggcatgggacccagccgtgtctattttaacaagccctcctggtgattctactgtgcactcaagtttgagggccactggccttgggtttagggtgagggatctagagtcagactgcctgggttcagatccaactgtgtggccttgggcaaggcatctctctagttctcagtttcctcatctgtaaaatgaagatgatattagaacccacctcaaaaggtgttcatgacaagtgaaagagatgtttataaagagctaagctctgtctgagatgtgacactaggtctcagtaaacattatttcaatattctgtgattctttagtctacatcagaccccttctctggatcctcagtagttcttcccacatggtttagttcaagaaaaatgtgattaaagccatgaattttctccctttaaaaatgcacttgtatacacacacatactcacacatgcacactcacacatgcacaaacatactcacaattttgcttttgcttacaatttcagataattcatgggctcccaaccagactaactttatattctctaaatacaccctgctcattcccagccctgtgactttgattgtgctatgcccttgcccttgcccccacctcttctggtgaagacctgcacatcactgtcaactcaataccaaaccttgtggagcccagctgccatgccctatactcttagtttggccagatagtgtcccctatggctgcagacaactcacgtaggtccaaagatatggtccaagatttcaccagtgtcttctacaagatcttctatgaatgcctcagccacatccctggtcctgaggcccccatgaagacaattgaggactcaggtcctcaagtcatagaatttggtatcagtcctgattgacctgctaacatattgcctagaaaaggtattttatttagtccaagcttcgttttctcctctgtaaaacagaagatcattaaaaatctgtctcatgggattgttatggtcttagaataaaattaaaaactttggttcaagtgtgaatcattattgtctagctcaagtggagactgttgtccagaaacatggaatgatttgcctcaaaggatactcttgagggtttgtctgcatgattcacttgcaggtgtaaaatgtcacgtctccacctcaactagctttctatttattctgaaatggcttgaaatttgtcttctgctaatccttgcaaggcattgatagagaagaggcactgcctctgcctcctggggagtgaccttgagctagtggcagtacccactcctctccactaggtggggatggtgctgcacttccagagacatcaaaaccctgatgggtttttttttttggttaattattattatcattatttttaatgcagagtctcactgtgttgcccaggctggtctcaagctcctgggctcaaacgatccttctactcaacctcccaaagtgcaggattacaggcatgagccactgcaacaggccctcacctttctaattctccctctgatttcatttactgcggcagttagttttcttcatatatatatatatatgtcatatatatatatgtcatatatatatttatatttatttaagttatttactttttaattatataaataaatgaatatagtataatgtaaaaaatacttaaaacatacagatgcaattccccttgaccacaaccctaaatccctgtcatctccaccaaaatgactgcaagtgcatttggtgtgaatccatgcagatcttgtgcattcatacataaagtacatttagaaatatagttcagtgaatgtgttttagcaaaattggcaacatgctgtccatatgcttccactgctttctcctaacagtaagtgatagaggtgtcaccgaggtgtcaccatgttacccacaacaacaggtgagttcaaaaacagtccaatgaccacaaccaaggaggattaaggagaggattttgttacctgcaacaagtaagaaggacgctggggatagctcctcaaagcagcgcctccccaaacaatggtgaaaacagggcttttcttgggctggttagctgagtcattgtatatagaggtggagacaaaatagcactggtgcagttgcccatcatgcttctacatagtaacctgtatagaaaatgcagaataagctcctccctgggaggggcctgtagtatggtaatgaggaaagttcaccaaagctcatctccaactcaggcatctctgggatccaaccagtttttgtttttcctggactgagctttttccgggaactttttgaaacaataagaactgaaggtgcaacagtaacaagtgggtacttttttttcacagtgcacacccaaaaaccggaggacccaaggttacaaggcacacagacctaggcattcaacctgcaaaagattacattgagatggtgtatcaaggggggactgtggggattgtagaagtctatccagggtgtgcaataggggatgcattgtctgtggagaatgttaaaacaataatagatccaacaaaagtcagtcttattttcaccttgcaccatgtccagacaattctaagcaatgctagtgataacatactcttcctgcctggttcagtggcttccaacacctaactccttaacccccttggttcaccactgttccataatgatgggtatttaaagactttttcaatatcttgattttataagcagtactgcggataataggatatttaaagactttttcaatgttttgattttataaacaataccgcagagagtattgtagcataaacctctttatacaagtatgagaagtggaactgctgactggaggagtatatgggtctttaattttaaaatagacttgccaaattaagctcccaaaacttcagagcaatttacatagccataacagtgtgtgagtatgttctctcatgttgtcaacaatagtgttgtcagtctgctaaatttttgccaattttatgtgaagaaaaaaatcctctttggctaacactttcataattactactgaaattgagcaatttttcctgtgtttaaagctatttacacttttcttctttcatccatcccgctagccttgatatgcaatttacatttatactttttttatctgttattttattggactatttgtctttttcttactgatttttaggaattagttttattttctaattatataatagatttcagatctttgatggttacacgtgaaactattctctccttgtctcttttgccctaagtatattttacatacaaaaatttttgttcataataatttatcaattatttttggttactatcagttatttcctttattatttttgtatttggtgtcttaaggccttaaatttgcaagggttaaggattttttttccaatttcttcctaatccttcgtagttttctattttcagtttagccccttagaccgtctgtactttatccttctgggtgatatgtgataagctctaaccttcaaattaagcatttgtcacaaaattattattaaataatctatcatttatccgctggtttcagatgcccctttagtatattttaaccttttatttctataagcctgttttatttctttactttctattttgttccattgatctagaagcccgattcccttacaaatactattttattttaattataataactctataatatatgttgcaatctggtggatggtcttctcttcactgttgtggatttttagaaaatgatgatatcattttctaaaagcattttggcttttctcagtccttcacttaaatgatttgttaaaatctgctcaagttgcaaagaagcctttttaagttttgattggaattgcgttaaatgtatgtatctacttcagaataattgatatctctgtaatattaagcctttcctatcaataatgtggtatttattcccacttatttactttcagtgaagttttatagatttttttcaaagctcttatactcttcttgtcaagtaatttttaattatcttatacattgtgttgatattgtaaatgagattttatttattacatattctagttgcttttcactggtgtatagaaactgttaatttcatgtttacattttataacttagttccctaatggattctcttctcagttccagtagtattttgggtgatcatcttagctattccagatagataatcatattgtcaacaagtaatgacacttatcttttcctataatgtatacttatttctctttctttttttattgcattggtgactaattatgctacactgtgacatagcaatgacatctggcaccttgcctttgtcttgctgctacccttagtgacctgcttccagtgtttcactattaagtgggatgcttgctctaagtttattagatactatcaaaatgataaattatctattcctaacttactaaacaatttaaatcaggaacgtgactgctttttggcagtagatgatcatagactttttcttttttatttttatttcattttacgttatttttgagacagtattttgttctgtcacccatgctggagtgcagtggcacaacggctcactgcagccttgaccttctgtgctcaagagaccctccagcctcagcttcccaagtagctgggactataggagttcatcaccatgcccagctaatttctttttatttttctgtagaaatggggtcttgccagattgcccaggctggtcttgaactcctgagcttaagcaatcctcccaccttggcctcccaaagtgctgggattacaggcatgagccactgtgcctggccagctttttcttctataatctgttaatgttgtaaatcacattaatagatttctcaattttgaataatcttttcatttgttgcataaattttacttgattatggtttttttttaataaaaagcagattccacttgttggtttccattttgatgctatctccttcagtttggtatcaggtgatactaagaacatggcaagggttccctattttatattatttttagaacactttatatgacataataattttctgaaagtttgggagaattcaccttttaagatcttttactttctttatagatttcttctttggttgttagactatttagattttgtaactcttcttaaatccactttagtaatttacattttcacaggcaatcatctatttaatctagattttcaaatgtattgatattatacctaatattctcatcacgttttaaaaaaaatttctctgcactatagttatgcatcctctagtttatagattttttttctctctcttgctctcattctcattctctatcattccctcttttcttacttgaacttaccagtctttttttttactggtgtctttgaagaaccagctgttactttcattcattaatcccagggattttttatttttgcttcctagtctgttaatttctacttttatatttattaatgtcttctttttactttcttgttttcatacatgtttttctatatattctgatatgtaaaatatttcatatatatttccaatatagctaatgaattttccctcaaattcagttttgtttccaccccactagccttgatatgcaatccattgtcaaacttttccaagtaattgatcatttccaatgtaattcgcattttaatcaaattaagttagtgagatggataacactttgctttgtttttgcattttgttttggttttgtcactaatttttagtatgcattatgaataatgaatatggcttacataattgctaatgttgggaatttgttgagactgcctttatgatttaataaatgatcagtttttgtgaatgttttatgtgtgtttagaaggaacacatgttctctgttttttggagacaaaactgcatgtgtatgtatgcattgttctgggcattaacaagacaaggtcctgtctcttgaaggtcacattcatttcccttcatttctctaatttcccacccttatttactgttgtcttcattgtcctgtagttttcttaattcctatctttttagagtcttgtgagggactcatgttaggagatgcaaaagtacatctgtcatctcactctctgctagatgcttcacctcatgggccaggattagcagcagacaaagccagctgaaagcaggagtcctttctcacattctctaccttatccctggcctcactcacttgacacatacctttgcacgctgagcctctatgccaggggtccccagcctttttggcaccagggaccagttttgtggaagacagtttttctatggattgcggcaggtcgtgggaggtgagggatggtttcgggatgaaactgttccacctcaggtcatcaggcattagttagattctcataacgagtgcacaagtctcgtccctcacatgtgcagttcacaatagggttcgcgctactctgagaatctaatgccaccccgatctgacaggaggtggaactcaggtggtaatgctggctcacctgctgcccacctcctgctgcacaggctggttcctaacagaccaatgaccagtaccagtccatggcccctgagttggggaccccctgctctatgcaatccataacataaaccgctgaacacactcttctgtcctcctaaacccaaccccctgatggacatagatgggctaaaaccccatctcttttgaatattaattctgctgttgcagaattaatgcaagtgtaattctgtaagtctagacttcaaatgcaggtctatgtctgcttctgtgttttcagtttttctgcagtcttttgtcttatctccccatttcaccttatcctgtagtcttttagtgtaagtgctgaactcttatagctttttacacctcttaattgaaaatctgtattattactctctaatgagaatgcaaaactgctatcagacactgtgtcctggttgttagtaaaattcacatgatgccttcaggctaacttgtttccttctctctgcagtatttttccatgggttccacattaacttttcctgttagcagttcttagatgaggataatgctattcccactctcattgtttgccaatatctaatgcccacaaataatttccactctgctagcttaagataggggatttttgttatatacttactgcctcgcattatgcttctctgatcagatggctaagaacctagccacagtattgaatacagagataatgaatgaatgaattagaaagaacagacaccatcacacactttgcatggtttttgtagtctctaccccagggcttacgctttatcactacacctcccaggatgcaacatggtaccatggctagttcttcctcctacccacctaaatattttagactaaatacattttcaaagtagctataaaacagggaagcaccgagggcagttggaagtgagcttctcctcggatgcttaaaaagtcccactgccacaatagaaggctcaactgttgtgtttttgtttgtttggtgtttgttttgctttgttttatggtgagcatttatcttaatatttctggaccaagattggaggttgagagaatactgggaggagggtcaacaattattgtgactacttagaaaaggtagagagtgaatggatctccagatgcactcgtgagccttatatttaataaaaaaaatttcgccattcatttactggcaacaaacagacttcgattgccttttagtgttgtgggttttcatctttttctgtatcttcccacacagttttggtggaaattttgtgtgaaagatgtttgccagataccattttgaaatggaaacctgctgattttttgttgattgagacttcaggatcacaggaggctgttattttaatttcctccaatgtttcatttttggttatactcattagtgaaacttgttttcttggggtaaactttctcctgcctagcattctaggttctaattattctttaaaaatatggtaagagtcttgccatagtgagaaactaccagttctttataactaaccatctgtaaatattcatttatttaataggtgtatgccttgctccagaaataatttaaagtggcttacataaatatgaacaggagaaaataaaataaaaacataacgatgaaaaggaggacaaagggaaaaccagagtaggaaagataagatgaagccaggagtaatgatagttcacaaaattgatggaatgaatcttaggcaagagataccaaaaatttgtctctgagttactagaggacaataaaaggagagtgacatgagcagctcctgaagtcatggaagctctagtagaacaataaatccattccttaaaggatgctgctttcggagctgaaatccaagagaaactcatcctgtggatccttgtggagaggatggagaccacagcagcccctgctctaaactactcccatggattcacactctgggggttgcttctcataatgtcactcaatgttggccaatccttcacagcaggcactgttcaattaagtcaggctgatgaggggccaaaatgcactgacctctgctgtccgggctgctccaggattaagtgtgggcatatggagagcagtggaaggctgcctccccacagctcccctccctgttttgtgagtgttgtggagctctgcattcgaggggatgctctctgacaagtgcttgtgaggcatgcatgttggcagtaagctgagttggaggtagtagtgacactcccctgagaacactggggctccagaaggttcgcctgcctctgaagtgtaccaagacaatatccccaggcaaggccttaaaatctactcagaactgtattggaattatttcccgtacacagacgaaagggtaatcattcccctctgcccttcaattctccaccctgattttcaaatctttttaggcatagaggattcccttaaatgaaatctaaagggaaggcagcagagtgcactttcacttgtaccaaaggttgtatctcccacaaaaataaaaataaagagaagacaaatcataatatggctgaaagcagagctgctctgaggcacagttgctcccccattcctcgccacttacctccacgtccacagcagcccagcaagcacaaacaatagcctggaaggactttagagcaggtgtgaccaaatacccctcagaagaaaaatcttagtcacatgtctgtcaactgattcccctggagaaaaagaattgctagaagtgccttccaagataaactcgttgcagagaacatgtctagaaaatgagacatttgctgaaaaatggtgcctcttacattttctttttatcataggcccttttgaggacctaatgggtacactaggtcagggtatccaatcttttggcttccctgggccacagtggaagaagaagaattgtcttgggtcacacataatatgctaacgatagctgatgagctaaaagaaaaatcgcaaaaaaaaattttgttatgttttaagaaagtttatgaatttgtgttgggctcaattcaaagtcctcttgggccacatggggcacgggttgaataagcttgctctaggtcttctctctagggaggaaaaaaatgtgcataaatccaacaaagttttatattcaatcttggggagtattgggagcctgtctggagcctctctatataggatttttaaataggagtctgttggatattaaggattatccactgaaaatgatcactttattgtagcaatagttaaattatttggggccttcttttaggtagatattaaatagcagggctaactatcaactatggcttttacttgtatgtagcaataaaaccatgtcaattccatgaaagaaaatgttgagttctctattccatatggcagggacccaagcccagctcattcaaatggatagcaagtcattcagagccaatgcagagaaaggggtctagagcacactcagtcccttcaccccaacccctgccctgcgtgtcatcacgtgattgccaggaaatcctcctgctgaccctgactctcacactggcattaaggcccaggttctgaatcaccaccaaaatccatggatcctataacttagtctatgcctatcacaatcctgagtcaaagaaaaaacgaaagtgaaacccactgttagtgctgctttattcctaacagatttctctgcaaagcgacagaacagttgtggccagtatgaaaatattgtgtcttaattatgcctaatgttccattattggaacgctaagcatgtgggagttatttatctgactgctcaaggtcatcgccaaggtctgattgcaaaaattcaaaaaaattgcaaactcaggcataaattggttaaatttgttcattcctcatgtaaacattcacctgaaaagcccaggctagcaattttccagatattctatatggaattgccataattctggggaataagtggttgccctttcaacaaatagcatagtctaattccatcagataggagattagtaatgagaaaacacacagaggaggggtggataccaagtcaggaggttttggttcctagagtgggagatgtgctccaggttagattcagacttgttttttaaatcaatgtaatatgaaggactcagaaatcatggaatctatataccaaggcaactgatctgtaataataaaagctaaaaaaataagccttccagatgacatcctggtgctaagatttcataacatccttcaccaaattcatcaccaggtagttagtccccataccttctgtgcaattccaccaaccaggcaggtccttccacatgatgggttctccatgagagaaccttgagagactctctttgaggcaataggaaatgtattataatattaatttctatgagattccagatggtgtctttccatttccactgtgtgacactgaccaagggtttggtgtatatttgtgtatgtgtctgggtgctgttatcacaccaattatgaggaaaacaaatgccttattcacagcatgtgaataaaactagttttaggtgaacagcaatgcattggaaaagggaaaacttctacctttagacaccagggacagaaacgttccaagtcctctgggagagacagatcagcagcagagtccagcagccccacggctcatccacttgcctccaccctctgaacagctgtgccaaaggattggcaaggaaaactatgtacatttgccacactgagtgccctagagtcgtttaacctataagctggagcttttctctgaagtctactaaaataaaatctaaaagcaagctgcagaaactttgttttttaggtcaggttcagtatctttcatcaacaggaatgaggagagccaccaggacataaggatatattcaacaaatgttaacatgtgactgttgaaagttatcctttatctggactcttttttaaaaggtggagaaagcccagagcctagcctgccctttgcctcctgaaacaacctggcaggtgaaagatagcctctatgaaaaactttttctcagactggggttgcttttataaggaagatgatgaggctaaataggagaaaaaaatgtttttaattacggtaggctggatttcaatgtgcgcagatcactggggttactgaggtaaacacagtgttctaaggaaatctcagggtattcatctccagaaagaattctagaaaaattatcttctcactcctttaagcccttttgtgaaaaaagaggttaaaccccttgcctcttgggttctccccctgctttgtggctctgctgttttccttttagtgagcacggtttaatttggagcatccagtcttgttttggtgtaagagaagagcttggccttcagggtcaggtcaccttcagctcaaccatccactagtgtgaccttgggcagtgcactcagcctttgtcttcatcaatacagagttccagaactgctgggatgtttgaatgcaacatcccgtgcacagtgccctgtagagtgtgcacccaaacagtgtgctcagcagtgagaaatgtctcgtaccttcttcccccaccactcatatccccatcacctcacctccatttacttatttatttatttatttatttatttatttatttatttatttgagactgagttttgctctgtcgccaggctggagtgcagtggtgcaatgtcggctcactgcaatctccacctcccaggttcaagcgattctcctgcctcagcctccagagtagctgggattacaggtgcatacaaccacacccagctaatttttttatatttttagtaaagacagggtttcaccatgctggccaggatggtcttgatctcttgacctcataatctgcccacctcagcctcccaaagtgctgggattacaggtgtgagtcactgcgcctggctcttctccatttatttctatccttgtgtttcttaagctgaagaattcaataaattcctcaagaatttttagaagacctccagtttgagaaaatatgcattaaactttaaatactgtcaatttaagaaaaatgttggcaccaccctaaatataaatgcggatataagaatggagagcttacacacatggcagcacccagctgtggggctgaggcccaggtaatccagaacatacctcttttttaggtgatcaatgagatgaaaaccaaaatgtaaggttattgtaaagaacttgcacaccactgaaaacatattagaagactcttgtttaagaaactatattggcttatcttaggagtattctatcgttaagtgtttaaagatatgactttctgtttagccagggtctccaagttccatataaatatatatatatttatatatttttatatttttatatatatttatatttttatattttatatatttttatatatttatatatatttatattttatatatatttatatatatttatatatttttatatatttatttatttatatatttatttatttatatatatttatatttatatatttatatatatttatttatttatttatatttttatatatatttatatatttatatatttatatatatttatttatataaatatatattatttatataaatataatataatatatattatatatattatatattatatacattatatatattatatataatatatattatatatattatatattatatataatatatattatatatattatatattatatataatatatttatatataataaatattatataatatatttatatattatataatatattatataatatataaatatagagtattatataatatattatataatatataaatatataatataatatttatatattatataatatataaatattatattatatatttatatattatatataaatatatatatattttttttttttgagacagagtctcactctgtcacccaggctggagtgcagtggtacgagctcagctcacttcaacctccatctcctgggttcaagtgagcacatccagctaatttttgtatttttagtagagacagggttttgccattttggccaggctggcctcaaactcctgacctcaaatgatccacccgcctcagcctcccaaagtgctgggattacaggcctgaaccaccacgcctggccacacactacatttaagtgtgcaaggaagaggcaacgttttgttccttagtaactgccttaaacttctccattagcctccccattctgagtagctaggaatgtaaatcaaccgattcaaagaaaacttggcctcttgtgatttaaattattttcctttttctttccatttaaacccgcctttcctaggtaaataatcagtcctccaaaccctccactttctctgccttcactgtcttggagagcatattggggagcttgtagggtcctcatggctgcagggcatcttagagctagatggtgtcctctgggtccttgcaggactctgcagtgatggggaccctgctcgtcaggtcatttctctgcctcactggcatctgctgccaatgtctaagacttgggaaccttggtctgttccctgtcctgctccaatagaagccagcaccccttccacgggcaccagagtggctctcacacatgtcagctacctgtccctggctgtccaatcccaggacagctactttattacaatgtcaccagcaatcttctatgaccctgcttctgggtgccctctatgccacacaggtgccaggaaggaccctggagccccccttcggcctcccttggaagcctctcatcaggggtgattgcactctgattctgctgccccatatcatcatgaggtggggggtcagaggtcacaggcatcctgcaaggctgcttctctctggatttcaatagaaggagaagtgaaattcgtcttttgaacagattcatctctagaaaccctctgtccatgttcacaaaatctgtcttttgagccttttgttaccctaaagagctaatggagtgaactgatcaatgatcttttggttctggatctacattcaccttccctggcgtaaaatgcttatggtttagcctaagaaaatgaggacacaagggaatgcagttttaatgggaaatgaaaagcactgctttcttgttttcaaaataatggtcccattacacgtacaaatatcgatttataaggtggggagtttgagacaccacaccagtgggcaagcaactctgattttcagattacttaaaatgttttgtacccagatacagacattgctcatagttatccagtttgcccataaggaatttcattctttcccaccgcctcccaccctccctgcaaaagctcctcaggattctccactgagttcataatcttctctgtgatctgcttatgtccctcactgtccaacacagtgagtatgtttggtgtttcagtgaagttgttgtgataatcagggtccctttgaagtagaagagcattttttttttggctgaagactcagcagcacccttattttctctaaattctggttcccaactggctttaaacacaaacctccttactgctcctttctctgaattcaactgtaagcttcccatttcctgttcaatcaacacgtacccctctattgttgtcttactaggaagtagatttattcttatcagtatttcttagccgtttggaggcatggacccctgtgaaaatctaatgaaaactaataatgctcatcctagaaaagtgtgcgtgcataccaaagtttgtgaacaatatcaggggtccacagaggcccatccatggactccatatcagccaagatcccaacttagcatttattgtctcagctatcatgaaaattaaaatcagctcatggggggaaatatgtgtgagttgataacatagggcagggattgcttaaccctttgcaggctaaaaatacctatttttctctggagatgtaaatatttgttaatctacttgatgaatattatatggccaaataatactgttatttttgaagttcttgtggcttttaataatggtgcttccagttatgctcatggtatcatctgggcatcagatctgtgtgcatacgatttgtctttctgtgaactcaagaaccatcacttagcattatgattcttgctgctccaataaaacttgtatgtcttgataatctttaggattccattctttaagatttgctcagttatctattctaattccccttcctgacaatatccacctcaaccaaccagatgagggcccttcctctgagtctcatcaaaaccttacatgtggttattctgttccccagtgtgttacaattgtctggttcaatgttcctctctccaccacaccgtcaactccagtagggcaggaacagtgtcactctcacctttgagccccagtaaagcacagtgctcagcacatagtaggtgctcaacatgtgtttgctggatgtagactgaatcacagcaattcttcataatttctcatgtgataaatagacatgaaacgtggacaaatcatgttaagcaggtttcatcttttgggttaactattttagccttgtaaattagtctttcattgtctgtatattcaagcaataattgagccaaagcttaatattaataaaagtaaactagagttaagataaattgacagttccatgtgtagagatgataagagaaggtcaccatggctgagtttgtaactagttgctgacttcctgcataatttagtgcatactacaacagtagcagaaaatctatttgatagttaaagtcctattccttagactggtgtttaacgctctgcagactgacccaggcctgatttttccataccacctggctccccactctctccacttctgaaccttatccctcaaactatgcaagcagcttcatgcaccctgggtcctattggtcttgctgcttctacatcaagaatgcctgtcccatgacgacatattaaaatgtccctcatattttgagaacctgctcagaggtcattcttcctgtggaccacctgcacatcccaggcaaaggaattcccctttctcaaacatgctaggagcacaggttacttcacatgagtccctcatcactgattttcactcaggaccagaaaaaaaaatagtcacttccaatagatgtttttctcttaattattcagtgatatttttcatttctatgtcatctgttttcttctaatcacctttggatagatgtctccctttagaatttatccaattacaaactgtctcaagtaaaattgatacacaaacaaagtatgaaagaacatgtcacatatctttttaaaaaagcaagatatccagattattgttgcaaaatgttgtgtgatgaagtccttcctgctgaatgagtaactggatgaaaagaccatacttctttttcatccttactaatattgttgataatatttactcatcaattcttgagcttgagaaaattcacctaggacactgtcatctgaagactcttagtctgagatttcaataatataaccaatttcaccattattgttagaatctagagacctgctgtcctctttgaattcatcttttgagtcatctagtgattgtgaaatgttgttctctgtcagtttttggaattttcaattgtatgcagtgaaagctaaaagcagattcaaaatagtgatgatttatgtcactattgaatcatccttctaggcaatttcattattctatttattttttcatctttctttagcataattgggaataattggtgagtaatgatgagaaataattccctggatgatgaaatagcaaaatgtttcaaaagataggaaaaataagatcacaaagatcccatgatgtatcttagatttataaaaaggtcaagtgaacccatatggtaattgtaatgagttatattttatttaaaacataagtaagttctcttcttgttcttcagaagccctctaagagaataaaagttataaaatatcaaaccgtacaaatacataaaacaactccaagaggaaactcaaaaagtaaaattgggtccagtgaccccgatggtatgccatattatgtacatatgaacacttcaacacacatctgtctaactgaaggccaagaatagagtaagagtcacactctctatgtcttcctggagttccccaagcctggtaaagggtttactcacagaaggagtttaggagatattcagcaagtggagagttggagcaggagatataattattaagggaatgtcaaacaatattccttacatatgtgcaaggtccttgtaccatctcaaaatcttggccctttgcctagaatattgttcttccctctcttccttttagctggttgactgttaactttgaatctcaactcagagtcccttccgcagggaagttttccctaatcctcaacccctcccatcaagtgcttatttatgggctgtgagaatcccttcccttccccacatcccagccacaaacatcatcttctctgcattgaaccaccatgaaaagttagtactcattagccaatgcctcttcctctccattcccaccctattggttactggttacaaaaatacagtcagatagaaggaatgagttcttatgttagatagcacagtaagagaactgtagttaacataatttattgtttatttgggctgcgcatggtggcatgtgtctgtagtcccagctacttggaagactaaggcaaagagaatcgcttgagcctaggagctctgggctgtaatgtgctgtgctggttgggtgtctgcactaagtttggcgtcaatatggtgacctcccgggagcgggagaccaccagattgcctgaggaggggtgaactagcccagactggaaacaaagcagctccaagctcccatgctaatcagtgatgggattatgtctgtgaatagctactgcactccagcctgggcaacacaatgagaccctgtctctaaaaataataatttattgtatatttggaatgttctcaacacaaagaaatgataaatgtttgaagtgatggatatcttaattatcctgatttgatcattacacaatgtaggcatgtatcagatatcacatgtatcctataaatatgtacaattattaggtatcaatttttaaaagtgaatatggaaagttttagtgtgtctcattcattacagggctggcccaggcaagggctggtcaggttctccaagcatcctttgcaccagcacagtgctgcccatggtaggagctcagagagtagtctgtgaatgaaaaaaaaaaagaattcaaacacttttttgagtaaagaggattaccttctcaaattcatgcatttgagaaagtaaaggtaaaactaaaagtccatctgaagagaaagcagaccaggtaagaaagctgttactttcctagactatatgttcctatgttcctttactcaggggttattgggaacaagaagcaacatggctgtagcagagggctcctcatctcatgattctggctttcatttaggtgtcggatgatttatcagagacagacatcagcaatgaggctcgggatccccagactctcacagacaccacagaggagaaacggagaaacaggctgtacgagttagcaatgaaaatgagtgaaaaggagacttcttcaggggaggatcaggagtctgagcccaagacagaatctgagaaccagaaggaaagtctgtcctctgaagacaacagccagagtgtccaggaagagctgaagaaggtaagggctgtgaagccacctgcagacagctcaagcttctgcagtggggtgttggagaaagatcctatattggtgcagaaagctgctgggtccccaaagagctctctctaaaatgcccatccctgtgcatttgggagagcctaagagaacccttcttaacttgcactggggggtacaatcaggaaaacagcatcatggaagtttcccaagaactcttaccttccactatctttcatcaagacagccccttggctttgagtctatgatttagtgccccttatccctctcactggtaaaaatcagtattatttcctgctccaccctctccctgagcagatacatccatctgctggtacatgaagaattttgcccatggattaaggtcatctagccaacccctcttttaatcagtgatgaagctctgctccatgctatggagcctctgtgttcaaagtggccttctggattgtttctctctgcagttttcagatttcgatttggttgttttagcgtcggaatcctttttcaaacaatctttatatggaatcccagtgtttcacacagaaaaaaattattcttgtctcagggtccccaaagccctaaccgcttgattttcagacccacactcctcctccccttttcctacccccagtaggcccctgagttccaaaggacacagttggaaaaccacagaagataaactcaacctctggcataaaagaatcccacactccctccccattgtcagtgctctgcctgctgtcctccagcattggggtttcctctacagcttctcaaagcacatttatgctagacttgccactttagagtcagaatatccctgccagcctccaatggaagggaacacactaacatttgttgagtgtctcctctgtgtctcctctgtgcgtgtgcctgtacacatgttcattaggtccttaaataaccctttgaaatagaagcagcccatttttgcagaagaggaaactgaacctgagtcattgaggtccttacccagggctcacatctggtaagtttcagagctaaggctgcatcacaaacctgcttggccttaaatcacaggccccttcctttacaatgagccagagattctattttatcttcagagtgatgattctgttagagaaaaacctcccaggtgttttctgtgtcccaagtatatactgtgtaaactaagaagttgctggtaatgcacatgcatgagtgaaggagctgccttcatctgcccagcagccgagctggggtcctgtggaggatgaagtgaagaccattacccgtggctgagcccctgaaccctccaacacctcagactctgtatttcacttttcccatcccaccctccataaccatcaagtcctcacccataaatctttccctggcttgtctgtgagttggagagtggagcttgttctccacgaggagcccctcactgggatatggactccaacctattgcaaatggtaagggctctgatcctctctgttacttgaactgatgctgcattacagtcagatttgtacgctggagcttagagccagatggtaactggagaatatcacattctttcttacaatggctttatctcccactggctttgctgcctatggtcccaaggctctaaaaactctcactgtaccagtggcatgccaggctgtgagtcatgcaacctcacccttcatcattctgcaaggagcaacctcctggaggcagtcaccaatgtacgctattctcccctgggcagagtgtcagcagagaaaggaggagctactggggggacttcctggggacttggacaagcgcccccatcctgcccctgccctaattaggcaggaaattaagagagttggctttattcagattcccgaatgtgtcagcttttcaaagttcaagtcttgccttcctagtcttccatgagtcaatgaattaaatattcaaacatattcttttgcatgtaaaagtccatatagccatatatatatatgtgtgtgtgtatatatatatacatatatatacgtgtatatatatatacatatatatacgtgtatatatatatacatatatatacgtgtatgtgtatatacatatatatacgtgtgtgtatatatatatatacacacacacacacacacacatatatatatatacacgtatatatatagagagagagcgccatatagactatatatatatgttggagggttcaggggctcagccacatatatatataactatataatatatggtttccccatcaggcaggtactactgtagttaaagaaaaacagaaatatagggttaagtattgaatattatttaaaaacagaaaagttttgagatatattttaggattagactgagtttgaagcataatcgcccaggcgcagtggctcatgcccataatcccagcactttgggaggccaaggcaggcagatcgcttgagcctaggattttcagaccagcctaggcaacacggcaaaaacccatctctactaaaaaattagccaggcttggtggcgtgcacctgtagtctcagctatgtaagaggctgaggtgggaggatcacttgggcccacgaggttgaggctcatcactggactccagcctgggtgacagagtgagaccctgtctcaaaaaatatataagtaaataaaaacaaaaaaattagccaagcatggtggttaatgtctgtggtcccagttactcgagaggctgagatgacttgaacccaggaggttgaggctgcagtgacccatgattgcaccacagcactccagcctgggcaatgacagagtgagaccctgtctcaaaaataaatatataaataaaaggaaaaagaaaaacaaaaccatgcagtttgcaaactctgtggcattggttaatggcttacctcactgctactacttagaacctgacaattcatttcttgcctgcttactctacctcacctcctaactggtctcctgaccctgcaggcccttcttggcccttctaattctttctccactcagtggccaggctgccctacagttcctgcacttgcttacagcctgtcaacaggctcatgtctgtcttgctttttaattgatccctaggacccagtccaggttttcattgttgattgaataaacacatcttggcctcatttgtaaaatggggataatcataaccccttatagggttgtgaggaatgaattatgtagtgtaggatttagcatatagcaggagcccagcaaatcttaattattgtagctttagaaaaataagcttcactgtcatgaaataacatccatctgctggtactgaaggaacagcttagtgctgatccccatcaacacttgcagtgtcatgctgtgggtctgtaactacatttggtgctccttgatgctatgcagagtgtaagtgtggaaatcactacatcagacccctaggttaccatcttcaggatcagagttaactgtgatgtccccatgaccccaacaccactagtctgagcaacacacacacacacacacagacacacacacacactctttggggagtagatctacggtaatgtgactattccagaagcgccactgcgccacccttgtttcttaaccatggtagtgcacactagcccaaagtccaactacctgaggaccttctctgagtagcaagagctcctcttcctacacagaagactagctggaagtgccagagaaataccactcccaggagcgggagtgaggcactaactagtgactgatgggaagggtgtaaatatcccagctcctttgctttgcttcggttgggatggtgactctgaggcttgagccatgcactgactgcctcagctggaggcacccacagtgataaactacttgataaactacatgatacggcagtcttctctacagactctgttccctttcctgtcccacttccccactcctctgccactgtttcctgggattgcctcccacataagccatgtgcaccccaatttttgtctcagggtcatcttctgggggagcctagactaagacaaacagaagaaaagtgtcatccataaatcgcaaatacttactttggtattgtgaataagcagtgaggaagtctaaccaccaaattggctactgataggcctcatctcaccaaaaggaggcttgcctcacacagagggggagctcagccagggcctccatcactgtccctgctgtttgggagccaaagcagaggaatgtggatatgcccgtagacacagtgacatcagtggcagctcaatgtcctcagtataacatcccatctaattggagctacagaatcctgtccagcagcagaagaaccattttagaaacatactttttcctgatgtgattcaaacctttgctgtatgcaaacatatccctacagttggattaaatgtcttcctttggctggatgctggggcccagtgattacttaaggatgggcactgcaacctgaatttaaccagctgaagaacgagcttggagccagatcaaaacttcttggaaactggattcccaaaaggtcatgtttcttctttaagtaataacttggttccaccagacctcagcggtcagccttccaaaccacatggtcttcaaagcctgggaatgagcactcgtttctccccaaccactgaacagccatgccaatggttctggaagaaagtcctggctaaagtggttctttttgcctctagggacgcagctgctgccctcctaaagggggatgcaaaagaggactaaggactcctggcctgagtttggagactacatcaggggccaagtctccccaaaccccctaatttttccaggcctggaccagcagtccccaaggtcccttctggctccaaaattccaaagttgtagatatgcgatagaatacataggtttttgcttcttaacataagtatcatttgcaatactgtagatgaaaaaagatgtcctatgtatcaatcttttggaacatgagcatttattaaaggcctagattaggaaaatcttgcactatagtcaaatttgtacatctagtgtccttaaagcatttttattaagagtctttgtttattaattatcacaagtagctgagccattgtgctttattttcacaagggagtcaacaaccagcagacatctctgcagggattcaaactgactcatagtttcactttaaagagtgaaactacatttagagtttcatagagtaattttcatttttttcaattttgaaaaaattgaattttatttatcatttcatagaataattttcatcaaagtactgagacttctctaaactaataaatgtctttctcccctaaacaagagaataatttgtgcatcttctgatggctgccccccaattactagagccaagccacatggaaacccaatcctggtgaatggtgaaggaagcagatttattgactgttgtctgagaaaacccagagactctggtttctcaagtttaatgtgcttgtgaaaaaaaatttgttgatgtcatggtgttaacataaaatcaagtatcgttgtctatatatgtctgacgttcataaaataacttaaccattcatgtgaggctacagcaccctacaacccagggagcattttatttcagaagagtgcctcatcttcacttactgctagagtgaatatagtattagatactgacttataacttccaaactacactgatttcaataggccttatgcctattgaggaattaacacctctttcccaactgtctatttaactgctgccctaggaaaaaagagaagctttagctgtccacttagagctacagctcttatccagagtgcttgaacaggtgaggaggttttatttcattcatgctcatctgcactcttcattcccacaactgtgtcctagggaagggcctgccaggccaggaagatagagttctaggttctcttttggatcttcaaaagagagaagcagaatatcttcctctttaggcaaagatggactgggaaagattgcccagaactccaatgcagacatacttcaagcctctaaaatgcaggcattacctggaaggccaggataaggatatcaccccagccacagcagtagaatgagatgctggacagaaatggtttgaagaaagaaaggcagagttactccaaaaggttttaagtagaaaggcctggcaagcaaggcactggttcagaactctcaccccacagaagcccaaaagtaagaaacgctggggagaggtaagaggaagcatagatactgtgactctgaagctttgcagaataagcaagattgtgctcttggaaaacatctctgggtagaaaatataaaaactaaagaaggaaaaacatgtacacccgtttctcctataaacggaaatgccaaaatcctaaagaaaatactagcaaactaaattccacaacattaagagattcacataccataactcatatattttgttccaagaatgcaaaataaagtgaatagcaggaaaccccactgttatactcatttagtaagtactattttttaaaagcacatcataatctcaactgatgccaaaatgtcttttggaaacattcaacacatattccattggggggaaaaccctctcagtgtaatagaaagatagttctgtaacatgatgaagaaaatccacttcaaagcaccagaatccctggattttttttcttaatgacaactcattttaaatatcaaaaacactatgaacatcacattttactactgatcaaagaaacacatgacaaagagatgaatttgtaaatgcttttacataaatgtgtattttgttaatcaaatagcatatacatacgtgtaaaaaataacatgtgtggctttaagatttgttttaaattacagacaaatatttgtagttatctagcaaatatgtattgttgttaaagaagtaaatgagcaaaactgactctagaaggtttacaaaacctgaacagaccacagaagaaattggcaaagtagtcaaggaattatttctcagaaagaagctagtctcaggtatctttgacaataaaatccatcaaacgttcgtggtgctaattaccttcatactaataaaactgttcttgagcaattaaaaaaatggaaagcatcccagttctgagtctcacacacaaaaaatcacacaccaccaaaaatttacaaattaattcatgagtgaatagacatcaaaaattctcaacatattggcaaattgtttctaactatgaattaaagtaataatttatgacagccagacaggatgtagtctaagaatgtaataatattaattttaggatatctattaacatttttgttatatttacaggctaaaggaagaaaacatgattattttattaaattcttagcttgatgtttgacatggtaggaaattcataaaatactcataaatactgaatgaagaatgaatttcaaacagctgataaacaaccatttctgataaagtaggaagataaaaactcaacagcagtgactggtagccttttggggattgcagacctttttacaagtttgatgaacattgtgaacccgctctccataaagcataaaaaaatgaaattgattttcatcaaattgggaagtcacagattgcatgaagcccatccataaaccccaagtttagaaattactattaaatgacagaaagaaaacaaagatgtcttctactactttcatgattcaacattggtctggcattctctccagtgcaataggaaataaaaattaccaatattagatagcagaaaacaaaactatgatgactttagattcctgagttaagataataaaatcaactgaaaagattattagaaataagtttggtaggatggcctatcacaaaagagtaatacataagcaaaaatttcatatatacagcaataatcactcagaaaatataaagaaaaaattatatttgcaatagccgcaaaagtacacacagcactgaacatacacttggcatataacccaacaattctactcctaagtatttatttctctaataaagacctatgtccacacacacagacacacacaaaaaacattcatgatcaccaaaaactggaaacaacacaattgtccaccagctcaccagctggtgaacgagtataagtgcaccaatgtcaatgaatcttaacagcattatgctgcgggaaaaaagactcaaaaggttacatacttcccacttacatgacattctggagaaggcaaaactataaggacaaaacacatatcagtggttgcaagagaatgggctgaggagaagattgatataaagagacataagggaattttttggtctgatggaaatattctatatcttgatttggtggtagctacacaactgcatgcttttgtcaaaattcatagaactatatgcctttaaaggctaaattttactgtatgtaatatacatacacacatacacatttacacacacacacacacacatatatatatattttatatatatatatatatatatatatatatatatatatatatatacatacacacacatacataatgccctggaataacttaactacaaatgtatgaaactcatctgaataaaattaactagttttgctaggagacataaagactgaataagtgcggaaacatattctgtgtatagatgggaaaacttcacacttttatagaagttggttttccccaaattaatacatatatttaacagatttccaatcatcttaatgagattttttgcaaacttgatgaagttattctaaagttcatctggaagagtaagtgcataaaatatagccaagaaaactccaactgtaattatagcagtggtgctaacactggaataagcaaacagattaatgaaacacaatagaaaatgctgaaatttaatatgacatgacaatggtacatttaatatcaaagaaagatcctttaaggaatattagattaacaaattatgtagcacatgctggttaatcatttgagaaaaaactaaattagattcatacatcatactacatacaagaataaattctcaatgggcaggagtttaaaggttaagtaaaagaagctacacaattactagaataaattatagatgaatattttataacattaggacaagaaaggccagaaaccttaaaggcctgaaatatatgattgcataaatattttgtttgttttattttattttttaaactttattattatcatagtttaagttttagggtacatgtgcacaacgtgcaggtttgttacatatgtatacatgtgccaagttggtgtgctgcacccattaactcatcatttagcattaggtatatctcctaatgctatccctcccccatcccccaccccacaacagtccccagagtgtgatgttccccttcctgtgtccatgtgttctcattgttcaattcccacctatgagtgagaacatgcggtgtttggttttttgtccttgcgatagtttgctcagaatgatggtttccagcttcatccatgtccctacaaaggaaatgaactcatcattttttatggctgcatagtattccatggtgtatatgtgccacattttcttaatccagtctatcgtttttggacatttggcttggttccaagtctttgctattgtgaatagtgccacaataaacatatgtgtgcatgtgtctttatagcagcatgatttataatcctttgggtatatacccagtaatgggatggctgggtcaaatggtatttctagttctagatccctgaggaatcgccacactgacttccacaatggttgaactagtttacagtcccaccaacagtgtaaaagtgttcctatttctccacatcctctccagcacctgttgtttcctgactttttaatgattgccattctaactggtgtgagatggtatctcattgtggttttgatttgcatttctctgatggccagtgatgatgagcattttttcatatgttttttggctgcataaatgtcttcttttgagaagtgtctgttcatatccttcgcccactttttgatggggttgtttgtttttttcttgtaaatttgtttgagttcattgtagattctggatattagccctttgtcagacgagtaggttgcaaaaattttctcccattttgtaggttgcctgttcactctgatggtagtttcttttgctgtgcagaagctgtttagtttaattagatcccatttgtcaattttgtcttttgttgccattgcttttggtgttttagacatgaagtccttgctcatgcgtatgtcctgaatggtattgcctaggttttcttctagggtttttatggttttaggtctaacatgtaagtctttaatccatatgactgcataaatattaagaacttatgttaatcaaaaccataaaattaaaagaatagttaagaagacatagtgcttaaatatataatgggtgaagaattaagatctttataactctgtattagttaattctcacactgctataaagaaaaaaccttagactgggtaatttataaagaaaagaggtttaattggctcacagttctgcaggctctacaggaagcatggctgaagaggcctcaggaaacttacaatcatagcagaaggcaaaggggaagcaggcatgtcttacatggctggagcaggaggaagagagtgagggaggaggtgccacacacttttaaacaatcagatctcaagacaactcactcactatcatgagaacagcaccaaagaggaaatctgcccccacgatccaatcactttccaccaggccccacctccaatattggggattacaatttgacatgagatttgggcagggacacagacccaaaccatatcaaactccaacagatatagggtaatgtacaaagcaggcaagtcaccaaaaaaaaaaaaaaaaaaaaaaaagagaaaatgtaaatggacaataagcatatgaaaagatattcaactttaattgtattacaatttttatttaatataacaccttgcccagaacttgccatatggttagcacattcattttttttaattcaacaaatgtttattgagtgtgtcagtgtgcctggcactattgaagcacagagaaaatggccatgaacaagggagagtttatcatttgctcaatcagtaaaaatgcaaattaaattaatgagatgccacttttgcctaataaattggatggttaaaaagaaggataattggttcactcttgtaatgccaacactttaggaggccaaggcaagcatatcgcttgggcccaggtgtttgagaccagcttgggcgatgtagcaagacccctctctacaaaaaaatacaaaaattagccagccatagtggtgagcacctgtggtcccagctactccggaggctaaggtgggaggatcacttaagcccaggaaatggaggttgcagtgagctgatattgtgccactgcactccaccttgggtgataaagtgagactctgtatcaagaaacgaaaagaatgacatttagtgttggtaagggttcaggaaaacaggcagcctgccaccataaaatagtgggagcacatattagagtctgataacttggtaatccaaaggaatcaaagtgtgcataccctttgatctggcaattgtactttcaattatttatccaaagaaaaacctggagaagcacccaggggtatattacaatgtagttcatcaagcattgtgtttttattgtagggaaatgacaacctgaatgcccaacaataagggattcttggagatacggggagatggagttcagataacagatgggacataggcattggaacagcaaagatagattggtccagatacaagtgatacagggcaggtgagccccaaaattagggcttaacccaagagggttcttggttttgcccaggaaagaattcaagggtgagtggaggatgctaaacagaaactataatcgaagcggcagtgtatagcagcagcagaggtactgctccttgcacagcaaggctaccccataggcagtgtgcccagagcagcagctcagaggcacttctgcagtcatatttacataaatatagtaattatacttttaattacatgtaagttaaggggcagtttatgaagaaatttatatgaaggtggcaacttgtcagattgttgctatgaaaaggggtggtaacctccgggtgttgccgtggcagtggtaaactgacatagcacactggtggggtgtcttatggaaagctgcttctatcctggccctgttttaactagtcctcagtttagtccagtgtctgagcccagcctccagagttgagtcccacctcctacctcacaattaagtgggtaaatttcatgtcaggaaggtgaggagattttgttttatgttccatatgtttattacctctctgtccccctaccccccaccccctccccatctgtctttctgaggcaaacgtgtcttctgaaagtgaggggatagtggaattggaagttcaacattgtagagagggtttaaaatagctactgcatcaaatgcaaagaaaacaatgtggagaaatattggaattcccaggcagcactgaaagcatagatgaggtcagatcatgaacatttacctgatgtataaagaacctgtacaagaatatagcaatcttgaacacagttaaatgcaaaataaaaaatccgttttattcaaagaaaatattcctaccagatctattcataaatctacatcatttggcataattacacagtatggttcaagtggttctgagatttacggtggaacttcccatttcagaggtttgtagcttagccattaatcttccctgaactaaaatctacatatgaatttcaaaccattgaggggatggggcatagaatggaaactaactccatccataataagagcaaaaaatgtgaagttaaaacttaaaaagttaaaactgcagatctccaagaaatctagcagttcactggaagaaagatggtgtaaagatgaattcttccaaaattaggttagaggtttaatgcaatgcaaatcaaaatctgaaccagacatcttttaacttttcaaaaagagtctaaaaatcaaaaccatctgatagaatagtcaaaaatagtttagaaatgtttagaaaaaataaaagaggtgtgaagaggatccatttattaagatattactcatattttttaaaggtacagtaattaaatttgtgagctactaatataagatgtaacagaatagtccagaagaacagcctaaaatatattaaatttaactcaccattaatctcgtgattcccactcactttccacactaggtcaaaaaaagacagctttttaataaatagtgtttggacaatagttagcttgttcttttgggaggggaatagggatgtaagaaaagacaggttcttaattttcaccccaatgaaggtatgaatggaccctcctggtttgcaggcccagcaatagataagagacaatatttaaaaggagacagagagatgttgaacttctcttgtgagaggtggtagcccaagctctggagtttgaatccctgctcattccccacttcttcaacaattattgagctgttcaaggaggtgcaatgcagtatggataagagaaaaaagctccctgagctcgtggaacttaccttctgttggaggagacagtggtaaacatgtagacacatgaaggggaagatgcacaatagtgataagtgctaagaagatgacgtagggcagagggcagagtcctggatagtcatgaactctctgaccaagggtcttgaactgagacccaaatggcaagcaggaaaaagatctaaaggaagggctttccaggcagaggaacacatgcaagtccctaaggtggagatgaccttgacaagtccaagggacagatagagccaaggtggctagagcaatgtggccaagggaaaagcggcgagagaggtgagggcaggggctagagcaagcagagccaggtgggccatgcagaaagcttcggtttatattctggtgaggtagaaagcacctggaaaggttgaagtggacaagtgacaagcaggaccttacattatgaagatcaccctggctgccatgtgccaccttctttccaagcaaatgtggaaagtgatttcaggtctcactggacttcttcagagccaagcacatgccctgattaccaccagtcattagaaatgtttccaatcaatattaggaactattgtctgaggaacagtcagtataaaaaagcaaaaaaaaaaaaaaagatcaatggctatgattacctcttaggccaagaaaggaactcctcctgcctgctttacacctgccagagtaggtttggtcaaaggtgatgcccccatttccccgcttagtttcctttgccaggccctgatatggccaacatcagacaatactaggtaccatcaaagaagaacaagaaaatgacctcagggaaacatggagatcattggaactaaactacaaataatatacttttaaaatttattttttagtcaccatgaaaaaaggaaaatatttcttttatagatggccttggccatcaagacctggatgacttaagaacccaaaccttcctagaggtcagttctcctctaatctctgttatgtgtaaatgtttcagtgcattacatatgctaatttattaagttcatgttccaatttctttccacagttctgtgccaccctcttgcatcaagtcactcttcagggacatgagtctgttcatggagaatgtattttgacgggttttagcggcattgctggagtgccttatgtttcatgagaactgaaatatattagcattgaatttttctagcagatttctgtcaaatatttagaaggacatatggagtttctttcctaccattgaaaaggagaaaaatacatgaaatcaaggcatttggacaaactttcttgcttgctctggtagtttgatggaagcatttcttaaagccaagacagcatctgtaatacgacacagaggagtgatgagcggactgggagtctggattccacttggaacaggttttcttatagagcacatcctttctcgcttgtggtcattggcagctcagttctaggtgggctctggaagccttagaatgggcacttgtgctggacagatctccagctctgtggtgtggcttggtctttggctttccaaatcaatgcacttattctagttggtgtcagttggtagaggctgcagaatgacctgaggactccctgtcgttagactcctctcttcctgatctgttgttcactggtctgattgtgcactcagattctgtttcaccatcacttcccacagtccactgggtccagggaattatgcacatggaagaagtgctggtgtgacaagtgcggaggagcatgggtttgggaaaccaccatctggtctcaagtcctagctccacatcttcttcactgagccacagttttcttgtctctaaagatgggattaaaatatcaaccatgtcaggttgctgtcatggttgaataaaataatgagaagcctagaatcaacctggcacaggatggacccacattaactatgaggtgcttccctccttgcttcttctcttccctccccaaagagtctctcgcgaacaacattcagcacggggagaagccatggccacatatttattttatgcaacttgaactgctaaaaggtctttcacctctccctgtaatttctcttttcacccctttgtgctcaaacatgtctttagatgacccctgttaacgtttcctgttacctggatgtccactgtccctaatagttccccctaaggaacatttgtaagtcacagggctgaaaggaggactggagggccccatactgtcaccaacttcttgattgtactgcagccaattatgaagatcgtatgtagcccttcagccctcccctcaggaaacttgacaccaaaaataatgaatttaaaagaaaaactgaacaaatgactcaggtgctattccacttgggcatttgatagtcaccgactttcatgatgcatgagaaaaggagctctgaaatgttatatttttctttatttcaataacctagtgaacccttccttctctcctggtatttaaatctttaatgcatcaatttcttccagatcacccagctggaaagcacagcagcaccttgccagctccctcttcttcactgcagccaccatgttctctcagctgtttccagaatattgcaccttatatgcttttatccctactatggctgccccacctcaggtccttgcgacctttgattggagctgcagttactctttcctacacttactttctgcctccagttctccccagccctcaatctgttcatgtggcagtcagaattacctttctgaagcacaggtctctcctgccagcatgttaaaagcctgggctttaaaaccaggcagaccctaatacaaatcccggcttcttcaaggaaaaccttgtcacctctcttaagcctcagttcctcatctatcagttggagtgatcacagtatctgcgtcctagggtggtgaggagggtgaaatgaggcaaggcaaatgatgcacttatcccagagcctagcacacagtgagcactcagtgagttactgttaacagcagcagcaagaacctgcagtggcacctcgttgccagcagtacaaaccccagactcctgaggctggcattcggggcactgtaagacctcccctctgcctcccttttcctacctgtctcccacagcctgccctgggctgcagtgccattgactcagcagctttcttgtgcttccaaaccttaccccaaagtaaaatgctagcagcacccggttgttctctctgtaggtccgcagcctgttgctcacagtgcaggacagatcttaccttctgctacctgctgttgtctcctgactgcttccccctctgctctctgagggtagggaccatggattacttgtttctgcatcccctgcagggcccaatgcagtgccttggcatagagtggatgcttccagaaggaattaaattagtgatgggagggaatcattgatgatgtttgagggcctggttttttcagggtcccctcgaggctatgacataccttgttttcattgcatatcagtgtgtatggtttggtctgctcccagtaaagggaaaacaacagaatgaaaaaccgggaaacaacagaataatggaaatgtactctctctctctctctctccctctatgtgtgtgtgtgtgccagtgtaggttgcttactctgatttcttggactatcctgtattctgatattattactccctttttggtggtatgatcccatctttatgaaattgtagtggcaggcaataatagattatagaggcttttttctttttaaaatattattatttggcaaaagaaaaaacaagaaacaaagagcagcaaagtttaaccttttggaataatggtaaaaggcactctttgaaatacgaaatagttaaagaaaaatgtttcaagactgcagtacataatgagaggcagctaaaccaccaggcactcaccagcattgtgcccatctccagccaggaagtgtgcctgcagagcaggtgggaggtgcttgaggagaggcgcacaactctggacccagacactgggtggacacctgacacatgccttctaatttaatcttcttgaaagcttcttgagctagatgatgttatatccattttacaatggaggtgcagaggggttaagtatttgcccaaagtcacacagacaatgtaagctgaatttccctggccttatgggcctgtatgtgcaaataaggaggtttcattaggatcagtccacagtaggagaccacagcacccccaattgtctccctctgttattttggggagtcttggaggagggatctgccatgtattcatgaacagccctcttggaggtgcccactcagggcccccatggatatctagagctgacagagccctgagggacaggcctcaccaggccgcagctgtccccttttcacagaggggctccagatcagcaagacaagggccactgtgtggctttgctgggaccaggcacttgtgcatttatgggccctttcctccataaaacatatttaaaaataatattttacaactgtattggcataaatatactaagattatatattaaaacatgttcctggtgcaaagattcatttttttcttataattttaaaagaaattaaaatattttcatgggcccctaaaggaatgatgggccctaggccaggtgcctgctatccctaaagggtaaggaggcccttcacaagaccctaaagtggcagtcccctcgccactgcccctgtttcttggctgaccatgaacctggattatactgtacgcttccctatctctctaaagtgtgagtaccagtgtcccttcagcttctgcctgttttgcctttttgctcttgttcttgttataggtgttggaacagcccctgaggtggagacaggaaaatctctcttctgctccaggcacatgtacacatccttttatcctcaaagcctttctgcccaccttatattatatcaagacttatatcacacacaggtcagctcatcacacacagccagaagctgactctctgaacccagctaagacagacacacagacacacatgctccagggtcaagctggggctggaatccccgctctttaattccaaagtggtctctctccacgaagccagacatccgattattagagcacactcttgctgctcacacattcacaagagtaagatattctggtaaagagcattcctgattattccagcttgaaatgaatttgcaattttctgtgcaacacaaagcttagaaatgaatgatgacactgggaaaatctcaggagaatttacaaagattgctaacgagcagatatagctactgtttagaatgaaaatattttctcctttagaattctacaggctcagctctcccctggcaacaccttgcattctccatgtctttgaaaaacagttgatagggaagagtacatagagtagaaatttgtttatagcaacacatttttatacggagagaaagcatataaacacaagacagagagattgctaaggtaaagtgtatttgggtcctgagacaaaaaaatacaagtcttactctgcctacagtccctagaggaaaaaaacgatagagttgagatgaattgcgcagggcacgagttggtcatattcactgggaccactgaaatggccactgaggcagggctgcaaccttggcacggtaaatgactgtcgtaaaggcctgcttcagcactgtgtcatttgtgagttgggctgggagcctgtcttcacggaggttgacagtagtttcgctacctcattaatgagcaattgaggaaactccatctcaggctgagaggagtcagatcttaccttcctgttcctctgtccttgtggctctgtggtgggcttgcaacaccagtgtgcttctcctcatcttctgtgccccaagtggtggactgtttcagctctggtggttgtgaagctgaccttgtagatttggtgttctgcatggggctgtgacacagactgaaccctagaagtggacacctgggctctcagaggtgagcatcagtcagcaggacaccaagagcatggctgcctcagagcacagatacacatcctgtggtgggttaacagctcaaagttcaacacatgctacctgcactaaggcatattggcatacacttggcattttaaaaaaagagaattttgcatgtatctggcacctaataaatgtgttatttaatttgtatttctttgctcactagaaggttgtgttacatgggtttaccagccattttcattccatcatctgggtcccttagctgcaagtgtcttgagactcaccttcctgttctgcaaagcctcctattgtgtcagctgactctctccatgctttcacttctccctcatttgctaccataaaacccatatttgatttcccttatgattaatatctggagaaagtcagctaccacaatggcatgctctgtctgggctctcaactcgtgctttgtgccattcagctcatccctctggggctgtaagcaatagaaataggtaggatcctttagcttttcatttctcccacatacagggctccctgtcagccacctctgaatctccaccagtttttcatctgatcaaacccccatccagtgctaaatataagttttttaacatagttgtaggaggtgcttttcacttttctctagactggacagggaacaggacatttacattacaagtcagtgttagccctgtaggaaagctgatctttcactgaccagtgagcacagtaaggaacagggaggttaagtgccctgcccctgtcatatagctattgaaatccaagttatctcaacttccagtaggtgcatggtccacacccaccctcaggtgcaagcaaacagcccattcctaaggaacagacaagaaacacttgattccctacaggtgggaaattgctgtggattccagtttgcctttcccagtggaaagcaaaatggggacatcaaccaatgaagagatcttgtccagttttcatataatttttgttcagtcacttcttcttttttttttttttgttttttttaggcggaatttcgctcttgttgcccaggctggagtgcaatggcgggtctcagctcactgcaacctccacctcccaggttcaagcaattctgctgctgcagcctcccaagtagctgggattacaggtgcctgccgccacacctggctaatttttgcattttagtagagacagggtttcactgtgttggccaggctggtctcaaactcctgacctcagatgatccacccgccttggcctcccaaagtgctgggattacaggcatgagccaccacgcccagcccgttcagtcacttctgccagctggaagctggttcccttctgaaatggtccaggtctttaagcagacctcaggtgttccaggtgaagctgtggcgctctcctcagaccagctgcctgggcctcctcactctgacttaagggaagatgcaaatgccttcaggggccaagacagtaagtcaacgtgacaagtggacggggtagggccaaaggcatgcgtgagggcaggaactacatccctcttgttcactgctttatcccagcacctggaacagagctggcacaccataggttcccaataaaaatgtagaatgaaccgtggggaatgtagagaactgggaagtgcatatctcacaggaggtattccaggccaaaaaccatgggtaatatttgcctttgagcttgcaactctcatgactgaataaacaaggctgtttatagatggaataaaacaatgatggtcaaacagtattgatggccaacttacccttttgattgtatgttcagttggagtcagaatacagatcactctttctgtttaagcatctcttaagtcctttccattaataccttggacctttaatgcactgtgctgtttggaaatttgtgtaaatttttactttcccttccctcatgctatggtctaacttttttttctgaatcccttggtcatatatctttcttttcaaaagatctgcaaaggcactgtgtctaccaaataaggggcaatttttctaaacacgttttattcctaataaaagggtaacaaatctgctctcatgcatacaatgttgccctttctaaaacagacctaagaagtggtagctggttcttgccaaaattattttgagcccaatttgtctccaaaatctgccacatcaagctacaaggtcctgaaaagtgggggacatcctctgcacatttttcctaaggtgaagagttggctctggctgttctcttggacattgcccttattctagtgggtctgcatcaccttccctctatctcgttcccctgggaccccagattctacctttttggtatgtagcaaagccccctgaaccaacagaaacatggctattgggtcagtcaagcagctattgtggaacagacaggctaaggctaaggaggagccctctggcacatgtgtcctcaccccagaacggcttgacaggtgtgagaccatgtgcctcagtgtagaagcccagagtcagcttctggactgcagactcagccactaatttgtcatttagcccctttgcttctctagtgaagtgggagggccatcggaaaccttctctagtgagacaaaacctaaaatagaattcactcggaggaacacattttgcaaaatcaagtcatagctatcattaatattttggtcaagattatatgggtcagataggtaccttgggaaggcatatcttaccaaacattttactggtcacacgaaatatgcctgtgagcagtattcaacttctaatttacaaatgatgtgatgagataaacaaaattgtttgcagatggaaaccatgactgccaagcaacagtgatctccagcttattgcatgatgctatatgttcagatgaactcaaaaatgcagataattctttggggttgttgtgcctctgcttcattaatgacattggcccaaatccgggttgattgtaattttgagccatgaacataaaagctggaagtgacctgtgtcagtcaggaacacgttcagccacagataacagaaaacctggccaacagtggcttcaacagataggggatctttttttcacataacatgatattcagaggcaggtgatgactcccagtggttcacccaatccagtactctctgagtccaagctccttcagtctttctgccccatctcacttggaggtttggcattcatcttcaattctgttggctcataagctgcaagtctatgtttaaggcagaaacaagcgggggtggaagaaaggggcattagatgcaccagttcccctgattaggaaaacaaaagcttatctagaaactcctcaggctttccctgtggactcactagtcaagattgtgtcatatgactacacctagctgcaagggaagtgggaaaatttattattttcctgttcacccccatggtagaagcaagcaagagagaatgggcttgcaaataggtgtgtgagttaatacactgtctatcaagaaaccacagagaaattctttctagtactctcattgtacagatgacaaaaatgagttccagaaatgagaaataacttgaccaaggtcccataactgggtgaatttagagcctgaactggagcccaggtctcttaaatgccagtccagaaagctacccactggaccacacttcagtctgagactgaagttttgctgatgaagtagaatattattcagcaaataaggtcagagatattaaactaccagcagtgagcagaggacatacagtttccactctagcactccttcctccttccctcaccaagaatctgaaataattacaagtcacggaaactaggcaaagtcaaatcaggcctcccctcagttctcttctgctgtgtctagtttaattttctcattcttcagcacattggtgtttgtgtgtggaattacagaatcaacctcatgatgatgagtgtcatgataacatagaatttctgtgtcattgttaatgtgctgttcttgtcttctgtccccttctgttatcggaccaaacagaagttttctgctgtttctctctgcaacatctccacagaagtcctgaaagtcatcaatgccacagaggagttgatagcaggatctacagggccctgggagtccccacaagtccctcctgacagacagaaggggatgtttcctcgtgggacagaccaagtgagactggatgagcagctgacttccctggaagaaaatgtaagagggtatggaggtgccctgtctagggtgaatgtatgtgaagaagaagctgatgaaattgtagcttatcgtgaagagtgcaaggacacacacatacacacacacaccactaccactatagcaaatacattctcaggaaggaccttaggttggattccccagaagcagaccctagatgaggatttgtgtgcatgtgacttattagggaatgctcccaagggaggctggtaagggaatggggaaagtaagggaaagggaagaatccaagcaaggacatgatcttacacaaagaggagcttcagcctgatcctgcagggagctctggagtagaagttgcatctcagagttgtcctgacctaaggcaaaagaactggcccgtcctacaaccagcaggcacttcagtctctttgcacacaggcagtgtctccagcagcccaaaggcagtcccctgtgtagatatgggctgctgggaatagaagcacactgaggcttagtgggcagggagaggagtatagagaaactataaaggagatccaaggggatccaggtgggagtattgccagtgccactacagggaatgaagtggttgccagaagaactgaagttactacaactggtcttctctgcttctctaatttaagataccaacaaaatctggccaggcactgtggctcacatctataatcccagcactttgggaggctgaggcaggcagatcacttgaggtcgggagtttgagaccagcctggccaacatggtgaaaccctatctctacaaaaatacaaaaattagctgggtgtcatggcaggcgcctgtaatcccagctacttgggaggctgacccaggaaatcgcttgaacacaggaggcgaaggctgtagtgagccaaggtggtgccattgcactccagcctgggcaacagagcaagaccctgtctcaaaaaaaaaaaaaaaaaaagataccaacacaatcatatttaatttatgtttttgatgaatcacccaagcctccttgtgccattagcaacaagaagcccactatctgtcttctgagcctatcacacgccactccaaaattgtccaagcactctgggaactgagtaagactctactgcattaccttatgaccacatttagacctcagactgccatggttcccgctccccaattcctatgctccccaataaggatgctaaccagccattgctagtggatctgccaatcaagaggaaaatgcctaacatcaactacatttaaaattacatttcttctttggaaataaaacatttagcataatgcttgaaaaaaagtacacaataaatgttggctgttcttattagtatttgaaaggcatgtcatcagctaactcctaaaatgatcccattaaaattcactaaagaatgggttgttaaaagtggttccaactttaaaaacactcttagctctttctctcatcctggaacaagtatgcatttgctgctttcaagagaaagacacttgagaaagaaaggaaataaaacaagtcctattggtgattttgctttactgaaaaatcatccatttttactgaactgtaagcagagtggcccagaagactcatctgcctcatttcatcccgtttttacttgctgctttttctgaggaccctgacttaggtagctgggctttcccaggtgccaggtccttttctgcctgaaggaagccatgcctcagagtcagggtcacagggaaaggaggtgagatctaccagatgtctggaaaggaggaaggggatgaatggggaaggtactcacaatccatttcaacatttagaagggttaaacactatcagccaagtcagctgtttccctgtggaaacctgtacatctctgaaggcaaaatcaatgtactggagggaggagaagacagtgcttacatttacctttctccagattcaataccatttagtttgtactcctaaaagctattcgcaaatataaatatagtcatgtgctacataataaggttttggtcaatggcgaatcacatatacaacagtggtggtctcataagattataatgctgtatttttactgtaccgtttctatgtttagatacacaaataattaccatggtgttacaattgcctacagtattcagtacagtaacatgctgtagcctaggagcaataggctaggtgtgtagtaggttataccatctaggtttgcataagtacactctatgatgttcacacaattttgcatttctaataatacatcctcattatttagcaaagcatgactatgtttaggttaaaggactttgtaatttcccccttccattcaaagagaagaaaaaattcttggctgtcaagtaagaggcacctggcctggaggaggggtgggtgttgactgatgactttggagttcaggaaagctcttactgtcccttgaggagttgtgtgtttggtttggcctaacaggtatatttgctagtaatggatttttcagtcctcctgatttgtgatgaaaaaaacagtgtaataaattcttacaggtaaatattcatgatcactgagtatttcaggaaatagctgatgataagaatttcccaatactccagaccaagggtgacactgagaaatttggacattaacactcaagctgtagtcaccatcatcagttggcatggccctagccatgaagttgatatcaaatcaagttaggtgatgccagctcctgcagagtcaactgtgcttttgaggtgctctaatgaatgctgttcccagaaatcaggaattgttattggagagtgtttttttttttaagtagaaatggggtcttgctatgttgcccagactggtatcaaactcctggcctcaagggttcttcctgccttggcctcccacagggctgggattacagacatgagccattatgcccagcctgaagtattttttgataaaagttaaaacaacaagaaataaaaattttttgaatgcaggctgggtgtggtggctcacacctgtaatcccagcactttgggaggccaagatgggaggattgcttgaggccaggagtttgaggtcagcctggtcaatatggtgagatcccatctctatgaataaaattatatatatatgcatgcttgtttcactttaaaagttgaagactctcttcctttgggctcccataaaacctatgcatgtatctgtctgttcacttttcacactttccatcttttctgttcactcatccatctcccattaggctggcactattgacatttggattaggtaattctttgtgtgggggctgtcctgtgcacaggatacttggcagcacccctggtctctacccactagctgccagcagcagcaccctcccagtgtgacagtcaaaaatgtctctagacattgtcaaatattaggcgtttggggcagggcaaaatcacccccagactgggaatgagatatataaattcctgtagaacagggtttaccaccttttatttctgtagcctagccccagtccaccacccagagcctgacacagaggaagcacttagtgaatgttcagctgatgtgtgactacaccagaggaatgaagccccttttaaaaagaactgcttgacttctcatgcacagggtctctgttctttaaatgtgtctctaacacagctgagtcctgagatggccctgatcctgggcacacacaattgaaagggttaaagacatggttcactagcaaacaaatgtattttttacaagtatggtaccaaaaaacagtgtgtgaaatatctggtttaaatgacaatggtcagttctcatagcacacttaaaacaaagatatcctgcccttttatctttacctccaaggagcatgttgaaaagaatgcaatggccttattggagttttcatcttgtaagatcctttaattgtatgttttttttcctttgggttcattaacagtttctatttaaaatacatccacttacagactgaagatgtcagaagccccagcagggaccatggctggaaggcccagtctgtagatgactgctcccctcttctgcacccctcatgcctctcctgttcccaaacagttaactgccttcttccttctccttcccttcccccatccttcagctttttaaatttcacctcagaagaaaccccatctatattcttttgaactcatgtgcttttgagtcagggaagggatgacttttcttcgtctctttaattcaacagatcacagagccatgggcgcgttgccttgctctgctgctcccggatggaattcagctgagcagtgggagaagccagggcagttcttaaactgtcctctgggtgcagctgatctcattaaatcatggcttttgttggtctgcagaataaagaacagtcctgcactcctccgctgttctccattgtgctggggaacctagggactgtcagaaatagaaacggtgacactattctcgccttctgaacattggttaccacagggcaggactcggggggagaaaaagaacatttggctgagaatgttcacctttaaaaatacttctgaagactcccagctctgcccagttacactaggcttcgcctgtgtggcttctgtaatggggagggagagaaaggatctccccaggacctcagattggctttactgtggcatctctttccttgagggacacaataggtcctgagcaaaatgggaaaaaaaggaaaaaaaaataaaaatacttctgaaggtttcagagctacataagataaagaaacatcagcatttacatatccaatctcctgttttcacaaactgccttaacccccttaattagcagatggcatgggtatttttttatttttatttttatttattattatactttaagttttagggtacatgtgcacaatgtgcaggttagttacatatgtatacatgtgccatgctggtgcgctgcacccactaactcgtcatctagcattaggtatatctcccaatgctatccctcccccctccccccaccccacaacagtcctcagagtgtgacattccccttcctgtgtccatgtgttctcattgttcaattcccatctatgagtgagaatatgcagtgtttggttttttgttcttgccatagtttactgagaatgatgatttccaatttcatccatgtccctacaaaggacatgaactcatcattttttatggctgcatagtattccatggtatatatgtgccacattttcttaatccagtctatcattgttggacatttgggttggttccaagtccttgctattgtgaatagtgccacaacaaacatacgtgtgcatgtgtctttatagcagcatgattcataatcctttgggtatatacccagtaatgggatggctgggtcaaatggtatttctagttctagatccttgaggaatcgccacactgacttccacaatggttgaactagtttacagtcccaccaacagtgtaaaagtgttcctatttctccacatcctctccagcacctgttgtttcctgactttttaatgattgccattctaactggtgtgagatggtatctcattgtggttttgatttgcatttctctgatggccagtgatgatgagcattttttcatgtgtttttggctgcataaatgtcttcttttgagaagtgtctgttcatgtcctttgcccactttttgatggggttgtttgtttttttcttgtaaatttgtttgagttcattgtagattctggatattagccctttgtcagatgagtaggttgcgaaaattttctcccattttgtaggttgcctgttcactctgatggtagtttcttttgctgtgcagaagctctttagtttaattagatcccatttgtcaattttggcttttgttgccattgcttttggtgttttagacatgaagtccttgcccatgcctatgtcctgaatggtaatgcctaggttttcttctagggtttttatggttttaggtctaacgtttaagtctttaatccatcttgaattgatttttgtataaggtgtaaggaagggatccagtttcagctttctacatatggctagccagttttcccagcaccatttattaaataaggaatcctttccccattgcttgtttttctcaggtttgtcaaagatcagatagttgtagatatgcggcattatttctgagggctctgttgtgttccattgatctatatctctgttttggtaccagtaccatgctgttttggttactgtagccttgggtctacagctcccagcgtgagcgatgcagaagacgggtgatttctgcatttccgtctgaggtaccgggttcatctcactagggagtgccagacagtgggcgcaggtcagtgggtgcgcacactgtgcacgagctgaagcagggcgaggcattgcctcactcgggaagcgcaaggggtcagggagttccctttcctagtcaaagaaagtggtgacagacggcacctggaaaatcgggtcactcccacccgaatactgcgcttttccgatgggcttaaaaaagagggcatgggtatttgagaattatcttgtctctcagctttgacactcctcacctgctatctggcattagtgctgtgaaatcagctcttgtctcccctaaaggcagaaacaacctaggactaatcccaccctccacagcagcacgcaatgggggctcagttccttgggctgaatgccttggtctgtaggtattttaaattcttgctgtgaagagctccactgtacctattggggtctggctggaagaggagagtttcatgaaaggggctgttaactcaggtgtgggcaaggttaagggatgctgagggtggaacagtagcaataaaaggaagctgttaccagccctagacagtggtatctccactggtcaaacccatcccagacagccaggaagccctggtgatgaagtccaaattggtcggcctcccagggaacagggcaggacaaagaaggatagaaaatggccctagaaggtcaacagagaaggactagcatagcattctcagacctgtggtgtgaatagtaggactgccaccttgaggatgtatgcagggttgtaagtaacccataatccccagcctcagagggaatggagagcaaacccaacttcccttttagctccaccccacattgcccatggagtatacaaccagtggcagcagacacagtagacctgcactacagggagcccagctctgccactgaatccagatccatgcagaggatgttggtcctctttcttaaagttctcctacaacccttacagcactaaagaggatgtagcactagaacttgtggagacaaccatggttactcaggtggttctgtgccctcagagagcaaggaaagaaatacattagtcccctaaagtataattcatggaagccacatccaacaagatgctctaaggtcaaataagtctgggaagcttgcacactctttctaggaaaattgagatacatattagtacattaaagcctctgtgaagacctgcagtaaagaaatctgtttaacactctttattctagagaatttaatcacaaataggtgtttcattaaggaaacacctattcttatgccttgaaccactctgagaaagccttgttgaaccaagagccagtgaatgcaatcacaggcatcaatgactagagtttgaaggggtcatagattactcagacatggtaaccacagttctcaccaaaagtggaccttaacttgccaagcaagtccaagtgaatatttttcaaatgggttatgttttataaagctagaataacattttcatcatatagcatgttaccttttgttatttcaagccagccacagagccaatatcatatccatctataaccatagtaactctagtacctttatgttaaaatctgaaatgcaaaatgttataacattccaactgagattatcacagcatcatagggcaaggaggataaaggcaagggaactagcttcagccctcctgagatcacttctaggctccaccagtccccagctgtgagacctcagaaagtcactaaaccttcctagagcaaaaaaattctcatcttgaacacagtgattataatagtctctacctcaagggttgctatgagcatatataagtcacataaaacccttggcttagccactggctcaataaattaatgctgtcatcatcatcatcatcatcatccccaccatcatcatcattatcctcctccagtcctttaggcaccatcactttggctgtaaattcctgttcagctggtatcagtgctaaaccactaaatctcttctgcctcctggtgccaggaaagtaggcttttagtgaacacagagtaaaacatgaacattctggccttgctgagggcttggagctttttcatcttgctttgtcttggcaggaaaaaaaaaaaaaaaaaggaagattagtgaatgaacatgttgaagatgtaaatagcaatcaggttgatgcacatcccagggtgtgatgacattgagttttgcgtgtttctgctaaaatcaaggttccaagaccttagttatgtcaagttatgtttaaccactgccatgcttaaattatttcgtttcacttaaataactccaaatgttgtctcattgtgtaaaactgtagatttatattttaaattatcttattaaaataaatttacttttttggtgtagatagggaaaagtattaaaaaagtatgataaacttcaaacctctctctctgtttctcccccttttccccacccccaattatttttttaccctctaaagggaagtttttcaacttgagaaattttgtgatacattatttgaataatttcttcactcaaatacctttgaaatacttatcatttctttcatttgacaataatcatttcttgctttaaaaacaaaaataaatggctaagattaaattgtgaagatctcttagaaacagaatttctctgtatgaaacagaattacatattcagcatataataaagaaatataaaacaaaagataaactgaagtgtggcaattcccatcagacatttgattcatggcccctgtatgactggtgaatcatttgatgtgacatcttctgtaccagtcactgctgaaagctcccacagcccaggtaattatgcctgatgatgatgcgcaaatttgctttcatcaaacctgtacctgcctttgctccaccttgaaatgttttgtaaaattgccagttttaaaacagatgagtgaatcatgccaaggaattgacagagtgggaacatctcaggcttctttccctcaccaacacagcatcactaagtgtaaaaaaaaaaaaaaaaaagtgcatgactagtgtacctgagctcttgactcatcttcaactctgctatatttttaactcaaattaaggaaactgttaaagtcttggccatatgtttcattcaaatcaactctaaattgctgtgattacaggtttaggattttatatatgttgattaaacctcaagaacctctctttaagtaattactttctttagatacatctcatttcttatgttgttggttgcttcatcacagtattgattaggatgggggggtatttgtttcattcaccctggcccacatcccttagtctgaattatttcaaggatttcaccttgctcacttttatgggaataaccttataaacctgtaagtaaaaaatgtttctttttcttaaatttctttatcagacttgctctcttatttttaacagctctcaacaattgtcctaattgacagataaatagatacatgcttctcttaacatcacactattttctaagaaatatttttctattacaaacttcaggtttattttaattcccttaacctcgttgaagcatgcagaagctaattaatcagagagaattcactcaaaatttgtaattattttaaattatttcccctctttcttgttttctgatttttttctcaattactaaatgccaaccaaaaattgtattggcaaaactccatcatgagtctctttgtttcttctttatagtcatttttatagtcactggaccaatacacaattcgcatagctgatgtcatgtattttgtactatttgaacaaaagcaactttgaaatgctttttcttacaggaaagtttgtgggagagggaaggtgtggttgacagtgaggggtgtcaagacctcacacatttaagtgtgaagaacgtttataaatgttataaaaataacatcccccctgcaatgtgaagtccagttatctcactcccctgaattgctggggtcccctcaagggacccccaaccagtcccaagtctgcagacatgaactcaaatgtagcactgtctctacaggtatacctggcagcaggcactgtgtatggactggagacccagctgactgagctagaagatgccgcccgctgcatccacagtggcactgatgagacccatctggcggatctggaggaccaggtggccacggctgcagcccaagtccaccatgctgaactccaggtgagaactctcctctctgcccacatgggtcctgcagggtgaaacagggagccccatgttctacaagaatcactttaaagccattgtatctatcagctcccatcatctccagcatgtttgcgtggatacagtccttccagatggattccaccaaattctccctttaaaagtgtagtcctcttctctgccaaattaaagtctcgataatatattggatgccctttaaaccttataccagtttcctctttgagaagtttcctgacccatacataggtctctctactatacaggtttccattccactccaagaccatccttttctgacccttgtcacactgttgattacttattaagtaatattattaagtaatattccccattatagactgaaagctccatgagaatagaactatagctgtgtggcttaacatgtaactccagtgcctagcacaatacctggcacagatttagcacacaataaaaatggggtgaacaaatgaaggaaattggaagcatagatttctcaggacaatatttttcatgaggaacagggaggatttagatacggctatttcagaactgattgacatagtctctataactttgtgactatggctgtttgaagttttcacagatattcccgtagcctttgactctgtaaaaaattgaccatggattaagccactgattttcaaactagggtctacagatatattcttgggacccatgacaatttttttctttaaaagggctccatgtaggccaggcatagtggctcacgcctgtaatcccagcactttgggaggccgaggcgggtggatcacaggtcaggagatcgagaccatcctggctaacacagtgaaaccccatctctactaaaaatacaaaaaaattagccgggagtggtggcgggcgcctgtagtcccagctacttgggagactgaggcaggagaatggcatgaacccgggaggcagagcttgcagtgagccaagattgcaccactgcactccagcctggggcaacagagtgagactccatctccaaaaaaaaaaaaaaaaaaaagggctccatgtgttactcaagtttgagagacactcgtctctgcagcttgagttcagtatagacccctggtttgctgattttttttttttttttttgagacagagtcttactctgtcacccaggctggagtacagtggcatgatcttggctcactgcaacattcacctccctggttcaagcaattccccgcctcagcctcctgagtagctgggattacaagtgcacgccaccacacccagctaatttttttttttttttttttgtatttttagtagagacgggggtttcaccatgttggccagactggtctcgaactcctgacctcaggcgatccacccgccttggcctcccaaactgctgggattacaggtgtgagccactgcaatagatcctgcatcttaaaactgaatcattgggagaactgtggtcgtcaataaaaccatatctagatagagacataaatcaaagaaaatgactgaagtgagtctcaatcattttagagggtttttttttcggccaagatttaggatgcacccagaaaaaaagagacagaaaccacagtaggatctgtggctcacactttttccaaacaggattttgagggtttcaatatttaaaggggaaaagtgggcaggagcggaaatagatggagggaaagaggaagggtttggtgacattcttgtgaatctgcccattgcacatgaaaaggaggggtaaagggaatggtcaactatgtattcatcttgcactcagtaaatctgtgctttacataagataaagtaaaagtaaacagaagagaggaagcagtcaaatatgcatttattttcaggtgggtgaggggacaatttctagtctcctcttgtcctgtaacccatgaagataagctattaatttacattgtgagggtgacggaagctgtgaagacatgtggccttctatctgtagctatcagtttaggaacaaaagaaggaaaggcagttttgggggacagggaggagggggttgtgactcagcttccaaacttctcccttttggcatagtgaattgggggtcccgagattttattttcatttcacagagacaatgacactctcaggtggtaattattttaaaagtaaatattttcactttattgagtcaaaaatacaactcctgacatcattaaccactctagagaatgaaagggcacaattctccactctgtggatgggtcaatgctgtgaactagaaatgagcttatcagatagatggccctgttgactattatcagtaagaatggctgaacagcaattctcctaaaaaaaaattattttccataaatttcacccaagacttaatcaatttattgtcaaagatatattaagtagaatcaaatcacttgttttctgttacattgtgtagcaaatacttcttgaatgattttgcaggaagtaatatttatgggtgtttgggaggattttattggataattattccccctttattggatagttattcccccttccacatttttctagacttaaattattgtagccatgttttatggcagaaaactctagagttccaaatgtccattttccatgtgtttaaatgtgtgcctattaatttttcatttatttttaaatattacaataatgttatcaataattcccaatgttctgtgagcgttattttgtactaggtatttgtccttaatggtttaccacattattgtatttatttttttcagcaaccccataagtgagctactgctactatcctccttttatatctgaggaaacttacccaaggtcaaatacctagaaagtgataaaaccgggattttaatccaaatttcgtgacctcatagcccacactctttttcttcttttgagatagagtctcactctgtcgcccaggctgggatgcaatggcacaatcttggctcactgcaacctccgcctcctgggttcaagtgattctcttgcctcagcctcccgagtagctgggattacaggcacgcaccaccacgtccagctaatttttgtatttttagtagagagagggtttcatcatattggtcaggctggtctcaaactcctgacctcaagtaatccaccagccttggcctcccaaagtgctgggattacaggcatgatccagcgccaaacagctcacattcttaaccagtctgtgctgtgtggtttcctgggaaatgtgttggtcctgccctcaggcatacacgcacttgcctaggtgtccttaacttgcatggcatgggaggttgttgaccctgccttcagctttgtggattatctcaactgcaccgccaggcatgcggaaattctccccaccaggctaactggtgccagagaatgaagcctccaactccctgttgtctgttctcacccaaagtctagtttcacagaggatttcttgcaggatggtaggagggtccccattgaggggggcacatatgctaaattgtgttcttggtaatattaggacagagtctaaggatgctatcaacttacttagagtctacttttgagacagagtgccgttatccagtgctgaaagagactgcagaatgacccttgtggagcatgctaagggtgctgtccactgcatcatgcaagttgtctctatgagagttcctggagaaagcttctcttaactcctagtatcaggaaaagctgttcttctgagtacttggtcttcgatcttgtggacatggagctcttggctttggctcccaggaaactcagagctgaattggtcatccccttctagcaaatgtatagctccttggacatgcagttctagaagtgggacataattatatagagagagaagatacaggcaaaatcagccctcagtagcctcctctttctttgtcctttgtcctatggactgaaacctgaaaaattagccctttcttattccagaacctgatagtccacaaatgaagaggtcagcagcttgctttcccattgaccttgtctttcccagggccctctgagcaaggccctccatcaaaactgcttccagggaagaatgtgagcatctaatccacaccagttgcttatgactggtaaaagcttagcctgcaacttttctcagaggcttgtgtaatttgttggttcataaaccaaaagaatgcagttcttaatgtgaaatttgaagattaagaacagaaaggcatctggggaccaggaagggaaggactcaagtggtgccttctggggctggctactgggtagcttgtaattctcttaccagctgccacagacttggccttcacctacctcctcctccttttctgaccatgactgccacccctcaggggtaggggatgcatcttccaaatttgctgacccttcaatctttctgtgtacctcctatagctcctatcacagtagactttgttcaaagaagccctcagtaaatgacagcagaattcaaatttgtcttgagtagcacagaattgtggagggctgagaggcaatggagacctcatgtgtggagcacacacacacattggctagggtctaccatcagcttattgtctgattccctaacaacactcagaatgtaccatctcagcagaatcttgacctcttcccttgactctgctagcctttccctgccttttccagcgtcccccataccgggtgttggcacatcctctcagactgtggcaatgtgacgagagcatggccactgacatgaattccatgcactgcccagattggctgtgagatgatgggtgtatcacttgtccctttgagccagtttccttatctgtgaaaccaagataatggtacttacttcatagaattatttaaaacacttagcatggttcctggcacataataatgcccttttctaagagcagggacaatatcttcatttctggagacaggggaggaccagggttctctctgggcactaagtgggttcttactttccatttctgcattcagactctgctgaaagaaaatctgagctctctcttgaccttcccatgttacaaattaggaaaatgatgcccagagaggggagagagtttctcaaggctggttggcttcttaatggaggagatggacttgaaccagggaccgctaggcctcccttctaaaacctggtgctgtggttttggattcatgaagttatggaagaagaaagcaggacatataaatgactataacaggacatataaatcctatgacttccctgaccacttctcacccccatgctgagccaggtggccccgggccagggtccccatcgtgtccccaggctttcatttatccccaggcatactctgacaggattgttgacatgctctagagctaacaaactagaaatttaaacttataaagaaaggcctgtgttttattttcttgctacacactagatagaggagtgtttggtagaagttgaatgaatgaatgaatgaatgagcatacatcaaagcagatttgtctttataaattcttaacacttttaagaaatattttccccttccgtattttctccctgccaatcttgtctttctgttgctttaagatttcagatattgagagccggatttcagccctgaccattgcaggattaaacatagcaccatgtgtgcgcttcacaagaagacgggatcagaagcaaaggacccaggtgtgtttgtccctttctccctctgttggaatgttacatggcttggaaaatttagaagacaaaatatctttggctctgcaaaggtatattgctcattgtgttctgtttgtaggtacaaaccatagatacatcaaggcagcaaaggaggaaactgcctgctccaccggtgaaaggtatgctaaattaaaaccacaaagctaccaaaaaattaagcctgaatcatttactttgggtaacaaagagacctgagtttgagaattagatctaatggagtgttctcacacagaattgctcttgtctatcttgatttgggtccccccagaagcaaaccctgggacaaggataggagtgaaagtagcttgtttggaaggtgcactgctagagaagaagataaatgattcagagaaagaaattaagtcagtcaatacagggtacttgaattaggagttatttctttgggcaaataaagctaagtcctcctggtgacctctgggagacaatgttggctgcacctcagagttttctgcccaaagggcagggagatgggatatttgttctaaaactcccatccatctctggctgagagttacttctagaggtattaactccctggtacttctgacctgccccatgcatgagccaagacagagtggtggtacttgctgtaggatctgttggaatatgctggaatggtgactgtcaaagagaagtgaacagaacaccaaaagtatctgccacagtgtccaatctagaaatgatctggcaatgccagtcatgtcgcctttatctaatggacattttcaacaaatgccccaggttcagaagccacaaaagggtgataccaaactagaaatttagatttacaaattagaggaggagaaagtccaaaaatgtgcatttgggccttggttctgctattgatcatttaacaaacatttattgaatgtttataatctacaaaactgtatgcagttaaaatttatcacagattcacagtcctttatttgaaacccttgggtccctatgtgcttcataatttcttgggcattagaaaggtaatatagtacacgtgctgtatatttctttacaccccccatggcatctaggcagcatctgaaaatcaaacaaacacatgaatatccttacagcagagcacaaaaacatttgcactccatgagatggacaaggacattaaatggcctcatgtcagttcaggtcaggttttataatcagattcttttggctccaaagttgtaaaaatttgcaagttttagaaccttttctatttcaggactgcacataagtatttatgaactgtactgggttatctctgagctatcgttccacagaaagctatcaatgatgccctgacttatttgtccatcataaaaataaacacaaaacaaaaagatcccatagtcaatcaaacacagtacaggaatgagattccaagtctagaacaaaagtctgagtaatctggccaccttgttttttccttaacaatcaatcagtccatcttctgggtaacattttttcccatttatttccttttagctgaaaaaattgagacatcttcagtgactaccattaaaacatttaaccacaacttcattctccaaggctcctcaacaaacaggactaaggaaaggaaaggcaccaccaaggatttgatggtaaatgtcatctctgtcttaatgttcaacgctttcactgttgatggtacctccactctgcagcctttccttctgtagctcccgcatcagaacccccaaaaagtatccttcctccgtggtcttatggtctgttggatttgactggggggtggacttagcagtaaaccaagagcagagtgcttggttgaataaggccatgaagcacacacacaccgccggtcaccctcctcaactgttactctagaaatcactattactaataactttctacgcaagtatagaggaaataagtcgtaacatggtaagtgtactggaaattgcacttggacataccaaaatgtagcttaacccaaagcatccggcttacacccagaagatttcatcatgacctaatcactttgagccaactctggccccaaaccttgctaaaaatattatcaactatcttaaaccatttaccttagacaaaagtataggcgatagaaatttttaccctggcacaatagacatagcaccgtaagggaaagatgaaagaactgtatcaagcactaaaaagcaaagacaagcccttataccttctgcataatgtattaactagaaataactatacacagagaactttagccaagtcccccgaaaccagatgaactacccaagaacagctgaaagagcacactcacctatgtggcaaaatagtgggaagatgcatgagtagcggtcacaagcctaccaagcctgttgatagctggttgtccaagatagaatcttagttcagctttaaacttacccacagaattacttaatctccctgtaagtttaactgttagtctaaagagggacagctctttagaccctaggaaacaaccttcctacagagagtaaaaaatattaccaccatagttggcccaaaagcagccaccgattaagaaagcgtttaagctcaacagctaactatcttaaattctaatcagtctactgaactcctaacatcacattggactaatctattacttaatagaagcaataatgttaatgtaagtaacatgaagacattctccattgcataagcttacatcagaccagaataacccactgacagttaacagcctaatattaataaccaatataataagcaccctattatttacactgttaacccaacacaggtatgctctaaggagagattacaaaaagtaaaaggaattcagcaaatcttaccccgcttgtttaccaaaaacatcacctctagcattaccagtattagagtcactgcctgcccagtgacatatgttcaacagccgcggtatcctgaccgtgcaaaggtagcataatcacttgttccctaaatagggacttgtatgaatggccatatgaaggttcagctgtctcttacttttaatcagtgaaattgacctattcgtgaagaggcggatataaacaaataagacgagaaaaccctatggagctttaattcattaatgcaaataaaaactcaaacaagcctacaggccctagcctactattcctgcattaaaaaatttggtaggggtgaacttggagcataattcaacctccaaacaacctaaactaagatcgcactagtcttagtgagttaatacacattgacccaataatttgatcaacggaataagttaccttagggatagcagcgcaatcccattctagaatcagtattgacaatagagtttacaacctcgatgttggatcaggacatcctaacagtgtagccgctattaagggttcgtttagcagtagggacgggggttctacaactaagtgagtaacatcctacctgctatatacctctttaatatgtgggtatatcctctcaactgtatctctagctccttggaggaagcaggtttgatataagagaaatgaaaatatgtaaatggaagattaaggtctggttgaggtgtaacaatttttattctgttttcagtccatattcactcttccttaaatttttcattagccattaatgctgtgttcctgaaaaaagtcagcagctactcctaaatgtagcaaaggaagagacagtaaataatttgcatgaactctagaaattatacagaaaggactgttggctcttttgcttaaaaactgtcaatcgagaaaaataacgagacaagtccctatcattttatgaggtttatttgccaaagttaaggatgtgcacacaggagacaggtctatgcctttctccgaaggtgattttgagggctccaaatttaaaagggaaagggcaggctattgagaagtacacaattttcatgtaagaggagggtagggaaaaatagtcattcatgcctttgtctggctcagtgaatctgcatttttttttacatcaggtgacacagacaaatggggcagaggaataatgcagggaatctgcatttttacagcagataatatagaaagagtggggcaggagaacaatcagatattcatttgtgtctggggggggtgggggcggggtgactgcacctgtaaagataagctatcaatttgcattgctatggtgaaattttaacagaaacaccttagggtacagatcttggagctcactaggaatttccatgtgggcaaaatatgggggaggcatatagcttttcatcttgtagccatcttatttaggaactgaaaggagaggcaggcttgcatgacccagttctcagcttgacttttccctttagcttagcaatttgggaacccccccagatttattttcctttcacaaaaccaacatacatgtcaaaattttggcaaatgcttgatgctgcttacatagaaaattatcatctaactaagctgcctcagtgataccagttaagcggagggcagatcatgtctgagatgacaagactaaaacaaggacaaatttattttgttaccttttatccttcacccattcctcccttcctcttcctccctatcattgtccctgtctcatgaggatagaagcaccacgtaatggcataatggtggatacatccttttgaaataaaagttactctcaggcattacatggcaatagctctactcactgccttctcttcattggtcagccattaaccctgaccttttaaagtctaattcccttgcttctgaccattagttcacagagcggaaaaagatgcattatcacactaaaagggcagaccactagtgtcagggaaggaattggttacaaataagaaagttaaaaataaattgtctttcatagagacaggacatgaattggtggctgccagaggttgtgggaagggggaacaggaagaaactccttaatgagtaaggggttttactttacagtgacagaaatttattgaaactagataaaggtggtagttgtacaacctcgtgaacatactaagtgccaccaaattgttcactttagaatggtttattttatgttatgtggctttcacctcaatatgttttttaaataaaataaaaataaattaccttaaagtaacacagaaaggttaaaaacgaaagaacagacaatatttactaaacaaataaaagcaaaatagggcagaaataattactttcaaagaaaggagaattccagataaaaagcattgagagaaaacaaggaggaaagatgtttaaattttgataaaataaagtagttaagtcatgagcctttcttgattgatttggcagatagtagagcaacacaatttatggtgcaacggttggtgactttaaaactcccttatcagcctttgacagcccaaataacccataaataaatacaaattagagaatagtgtaactgttaagctttaattaagatgtttatctaactatgctttatagatcattcactgtctttccaggcatcaatggaccatttataaaaattgactttataccaaatcacaaagaatacctcaataaattccaaaaagtaaacaaaccctctatgataacaatgccaaacataatctagggcagtgctgtctaatagaactttgtgtaatgagggtaatggtctatatctgcagtgaccagtacagtggccactagccacgtgtggctactgagcacttgaaatgtggctactgcattgagggaactgatttttaaattttagttaatctgaatgtaaatagccacatgtagctagtggccaccatgttggacagggccaatctagaaaatcagaacaaaagttaaaaaacagaaaccctacttagaagttaaaaagcacttgtactcatatacacaactgtccatacacatacacatgcaacacacacacttcaaaataactactgaattagaaaaatccacagggcacttacttacaaaatgaaaacattacatatatcaaagcaaataggatacatataaaactacactgcgtcaaatttataatattaaatattttgttccttgttaaagaaaattcccgacatcaaaaataaacccaaaaaacatttaattaagaccagaaattatagaaatgatctctctacatctacatctagaagttatttgaaaaaaaaaatattttgtaagtcacataaaaaaactgcaaactagattatataaaaggatgtcaattttttatatatacaatgtgatgtaaaactattctgataaatttagaatcaatactagtcaaatcagaatcaaatcagaaaaatagcaaaaactaacttaagaaataaaaagaaacttaaaatttattaaacctttcaaaaacattctgtggccaaatgattttgctgattttttttttaaggaacaattcccataccatataaaatattccaggtcatcaaaatattgaaaactaaaagattcatgttgtgaagctatcataacctcaatcatgaaagcctgctccgtggctggtaagcatgtatacatgttctgtgcccatcacacacaggcacatacagacacacaaaaatcgttacaccagttgtacttcttcagagatgaagaatatgaaataaaatattagccaattaaagagaagtgcattcagtaataaattacagtaggccaagcaaggtggctcacacctataattccagcactttgggagaccaaagtgggaggatcacttgaggccaggagttcaagaccagcctgggcaacatagtgagacctgtctttacaaaaaataaaaagttagccagtcatggtggcatatgcctgtagtcccagctactggagaggctaaggcggggatcccctgagcccagaagtttgaggttgcagtgagctatgattgcaccactgcactccagcctgagcaacagagtgagaccctgtctctaagaatgaatgaaaaaataacaggtaggttttgtgggaatgcaaggatagcttaaatactgtgatatcaatcccatttatgctggagattgcagttttttgaatttttgcatgagtgaaaaatcagaccttggtgatgaccttgagcagtaggatataaataactctcatatgcttagcattccaataatggaacactaggcataagtggattttaataaatcacatcaacagttcaataagaaaagtcatttcttcccaaattaatttgtagcttaatccaattttcataaaaaactcggtgaaattttccttgaattaaagttcatataataataaatcagaaagaatagacaaaagcactttgcaaaattacaaagattttcctcccagattttaagacaaattaaaagctgaaatgaaactgatcattaatgaaataaatagcccagaaatagatacaaccacatatgagaatgtgttatattatctttataaaagatttagaaactagtaaagaaggtatggattattaaacaagaacactgtgcttggaatactggacattgggatggtagtgggaaagaaggcacatttgatcattaccttattccaaataccaaaattaatttcaggtggattaagaagcatgcatttaaaaatgacatcagtttctaaatgttgtgaaacatctaactggtcaaaaagcatgaatagcttttgatattaaaaagcagtaaacattatttttcattgcttcttctcactcttcccaagtggctgatgggagtgtgttcaatgtctcacctcaggagcctgctctggagtcagctgtgatgtactgacaccatggaattccactgccagtgacccactgcctccggccgtacacgacagtgccttgacccaacagccatcgagtactgtatgtatttccacctgaggagaaggcctggggaggccacagtgcaccattgcacagggctgtcctgatacctcatccagaaagccgtctcagacttcagcactgcggtcttgcccactctctgccttaggctcccaggggaatccaagacagaaaatgaagacactggcttccaacagcagcgctccatgtttaagatacatattttccctgtttgctttgctactgtatgttgactttaagatctttttttaaatacatttgattcagctagtattccatgtcaacaatttgtccaaaggaaaactgctggagggaggtggagggaggaaggtgggaattattatttaatacatcattaatgcttattaatctctcacaagcatctttgtcttgcaaatcctaagggaaaagcaagtccctgcagtgagcactagggacagtctaatttggggattgctcaaccatcaagactgcaggtctcccttcagccacctccttcctgctaaaagcttagcctaccacactaccagtcattcccatcgctttgcaatcacaagccacaggatgagaagttctgactcactcatgccatgcccagggctatctgaaacaatgtctcattaagaatttagggttcttccatgggcttactgacagttgcccagatctgaaggggaaagggtcttgagaaagaccatcactggctcaactttagggcactgtccagagtcaacatgatgtggtttagcagtgatcacatctaaacaaagtttaggtaaatgaattatcgcagagaaaaaccacatgagaaaatttttgtactccaaatttacttcccaataaatattcagcaaagtagtaaaatgaccttaaagataaaaatgattagggaatagccttagaaaatttataggtataaaaaattcaaggacaaactgtgcatttaatggacacaagaattgactctaactccatgtctgtggtttctttgaacccatatcaaatgtatgactatttagagtgtttataagagataatggaactgaactttcactcaattaattgggcattaacaaccttcttttatgtttgttcctgatatagtctgaatcttaggaagaaggtaaaagaaaggaggcaagagaatagttatgatgaatatgtgttaagtgcctgctctgaaggaggcaatgttcttctcatttgaatccttatggcaaccttattcaataggttttcccatatttcagatttaataactgaaggccagagagattaatttgccaaagccacacctttatgctaattatgattggaatgcatcacaaaagcctaactctgttgttttcaacctctacgttattttgctgctatgtgcatttccagatctgattttctgctaacttgtgtgctatgatccactcctgatgggggtctacattaatcttccagtactccttgctgatgctgtgttatgtgtcatctaacagaaatgactcctttgaaataagtaaatctttggctttttgttctgttggtgtgattcaaagcaaaacaaacaaacaaaaacaaattttaagaacacaacaaaaaagatttgacttccgaatagaatgttttctttaagaggcatgaaaagcaactattgttgtgttacagtgttaaaaatattcagttttctttgacaaaaatgtgtactgtgtaagccttgcaaacaaaaaacaacaaaaaagaagcagcagcagcagcctgctgtgtggcatctgaacttttataaaggtttccttgtgccaaataagtgcaaagatttaatttactattaaaaaccataagcatatgttatagttccagaagaattattttgtcatcaagtgattttgatctttagtgtcaatatttatatttagattaatttttataaatgaaaatattttaatggtttaagaaaatgaggacaacaggataatatctttgatgacttctgaaagttatgcttcccttcatgttatatgcacattgccaagaattactgtcaagagaaatgataagtaaaagtcatttatgaaaataaa

SEQ ID NO: 677 - DNA, 10057 bp, Homo sapiens
aaagcccgaggatcctttcagcagcacagagcagagaccgcgctccccaggagggggatcggctggatgaggagggaccggctggggctgagcacgtcctccaacaggcgctgaccggtgtgaacaaaagtcagtaactcgggggccacaacggcgggagacgcgcgcggccgcggggacccaggtctgggcggggtcgccatatcggttccgggggcctcgagggaggtttgttcccgtttccgcgaggccctagggggcacttcttccttccaacgctgtcgactgcccagcaggggaaatcgcccttctcagtctttctcatttgaatacatgaaaatgcgagttgattttggcaaggcgatgctctcccgtggccagagggacggttttgtcgcccgcgggcgaggccgggtggggagcagctccggctccgacatccggctgcgggtgagctaggtccgcgcccggagcagctcagaaacccggcggcgctcaggcaggagtaggggaaaagacaaacccagtggctgtttttgtttgtttgcttcaataaaataagtgaaagccctgggtatgtttatgcgttgcttttacacacaaagacacacagacacaagcacacgcacacacagccggggttgaggcccgttacgggttaggactctgtacagaactgcctgcaaaggcccgtcaagtggtcccagggcccctacctactacagagttgtgaattaatcccttaaagatttaatgatggaaccaagggagagaggaaggaagatgaggaagaaaaataaaaggaaggcagcgaaggaacggagttcgaaccctggccaggcccatacttctctctcgcgggggaccgcagtctcgcggctccctggccccttccccagctcggcgcacacatccacctgcgaaggccaggcacacgcacgtgtgaccccttgtttccagcgtcccaggccttcctcacttctaagctgagccgtgtcccagttggggtcggctttgaaccgcgttaacgaccacaggtcttagtttcattgcatccgattctcccctgcagaaggaggacttaagcttcttatctgggtggggggtgggggcccgcggaggaactcgaaccactccacaccaagcatggctgggttgctgaagccgtcacctgacaacaaccccgtccagggaagggtaggcaaggaaagggggcaggcgagggacagccacagagggaagccctggagagactcgaatgggcaccgcagagccccgccggcccaggccctgctgtctgccaaccctgcggtcctgctaaataggaaggaccctgtcgccgcgagaggccgccgtctgggcccggggcccgaggcccgaggccgcggcctctccttccacctttcgccgtcgtctccctctgcttctacctgcctggtgaatatctgaggaaggggctcccagccagatcctgctgggaagtgtaagctgaggcagccaagcgtggtcaaaggaccgagtgccgctcaggtactgcgggactgcgccgggagcaggccccacgggtgtagcaagggcagcttccgggaagggcggagccgcttcctccgctggcggctacccggagtacccgcgcaccctacagtcctcactgccgcggatcccccacttgaggagcccgccctccccgcgacctggaccgccccaagctgtcgcagacccgtcttaaacacaggcaagtttaacccgggacaccgcaggagccgccacgtgcctgccctcgcgggtaccctgccccgagtccacccatcctccccacagctgaagacaggcctggtttcctccaacgagcagcacaatccttgcaaagcacagtttccaatggtgtaggtgcctatttgggaaaagaggttggaaaagagcaggctgcagccgctggacctggctaccgactggccagcaactcccagacagcagcattactttatgtatgtatgtatgcatttccaagtcaaagacccaacacgaccctgctgattcgcttttaaacctcagggaaagtgactggctggcatctgggtacactagaacctcacctcctaaatttgttaggtatcttgcaatgcggccactgagatggagagaggctgggagctggacgaacggccatctctccttccatcttggcctcggctctaagaacctaaatccctgactgggatgcgtgcggagttcaatccagtatcgcctggcggtgctccccggaggcgcctgcgggaaaattcagctttccctctccacgacaggaggcgctgttttcgtggaaatcccccggctgcgaacctgggatccctgacctggatcaagtctccgaagctggcagagtccattctgcatcaccggtcttgggctttgaagaagcctaggagaaattccgcttcggccatcacgctatgaaaagtggatttttttttcttaagtcaattttttttttttgaaaatatgagacttagtaggtttgggaagtgggctaaaagaacatttgatattgtaattgaccccccctttaaggtgacagtgtttttcccctacttaaagcgccaacttttttgtgcactataaaagctattactatccataaattgttactctcggtagaaaataacctagtcttgctcggtgttattgaagagccaagagggtattggagaatcacctccagaaggaacaaggaagctcattagcactgaaagtcccccggatcaggcccaggaagctaagcatccgtatactttacaaatggaactaaagtcagctactaatgggaactttgcacaaaagaattagtttctgacacacaattcgcagatacatttacacaaactgatgggacaacttgcagtcacaggagcaggctgcattagggagggttcctgccctactgagttccaggtggatttaatttcactcattcctttccttatgatgtgacgtttctacccccccaccctttttgtaaaaaaaaaaaaaaaaaatgtaatccaatgcttttatctttttttatttccttaactgcacatcttcaccctctctgctcccctgctgacttaagagatttgtttggttcagggatttaaagtgattctcttgccagatttcaagtaaaagagatttaaaagaacaaagcacagggaaaaaggtatctgtttggaagacaagttaaaacacatttcttaaaatgagattaataacattttaaaaactttgcaaaacaagaagattttgcggattcttaattactttagattttattttattgttacttaaggaaacctagtggttctacaggcagtacaacaaacacatggtcacagacactcagaaacacacacagtcacacatgctcagaaatatacaaacggtcacacactcaaaacacacgcaccatctcccaatctatcaccaactaattgcctatcacccggtcacttcagttgttctctctcccaggacaagtgggcaaccaccacccagggcctcatgagagtaaagagactttgcgttgggaagactctcccaccgacgtccaggaccgattaggaaccaagcgagcccctgagatctcagcccggaccctccgggtcacagacaggaccaagcgccgctgcgggcagtctcgggcttctgcctggcatctctttcgcagtgcagatgcgttcccgcgcccaggcccttgctctcccagctaacgcgcgtgttatgggagatgtcccctccccctgaccttttcctatcagaaaccagacggtcgtctccagctcactccctgaagcggctgaaggggggcgggaggaggagcccggcagggggaggacggcccgacttgggtccgcctgccctatcacacagacatctgctctcagtttcttcctctttgtggtcgctacagatgacaaggggagaggagcggaccgaggcggaacaaaaaaaaaaagttatgtcataaagatataaaccggtgctgtgactcacctgctcttagccgcaggtacgagtttcgtggcagcgcctccgctctgctagcccggggcccgggtcggcctaacgtcacttggctcggctgactcagatgacccggtttctagtgacgaagcaaaagtggggctttttcccttttctagtctgaagctctcaggaggaaagaaaaaaaaaagtctgtattctccagtctcccggggttgaactttgggtcaggaatcaggagggaggaagcaaagagcaggaggggcgcgagactgggccgcagcccgcgctcggaaggtggcgtgtacctctggggagggaccccggggtcagttatcccacaaggtctctaagcccagtctccgacgccaccgcccccggccttctccggctgcgaggttccgatccagagccctagcccgcccgcccgcctggccccgcctattttttctttttccaaagggggttacaccccctccctccccatttccctctttccctagcctccgggcctaaaccaattacactgctttgcaaacaaagtgagggccccgcttgggggaggggtcgcgggggaggggtcgcgcgcagcggtgaagcggcggggcgggaggcgcggcggccggactggcgggcggccgccttgcaggtgcacctcgggctttgtaggtgcgagcgtctttgtgcggcggacaaatggggagaggacgaggaggtgggcactcaagcgacgtaagatccacatcagctcaactgcacttgcctcgcagaggcagcccgctcacttcccgcggaggcgctccccggcgccgcgctccgcggcagccgcctgcccccggcgctgcccccgcccgccgcgccgccgccgccgccgcgcacgccgcgccccgcagctctgggcttcctcttcgcccgggtggcgttgggcccgcgcgggcgctcgggtgactgcagctgctcagctcccctcccccgccccgcgccgcgcggccgcccgtcgcttcgcacagggctggatggttgtattgggcagggtggctccaggatgttaggaactgtgaagatggaagggcatgaaaccagcgactggaacagctactacgcagacacgcaggaggtgagaggcaaggcgaggcgggcggccggtggggcgccgctggagcccgtgccgggggaggccggggagcggtgggcgccaggcaaggcaggcaggcgggccgggggcgccttctcggtgccaccgctgcccgcccgccggtgtggccccggccgggccttggccgggcctggaagcgggacctgctgccctgctctgtcccgactctcgcagccggagagggagttttaggaaactccgggctttgaaaacagcggctctaggaagcgcttgcctcttcccagcagcgagcgggagcaggagccgggcccggggtgcagcgggcgggcgagcgccggtgcgagttggaagcaactctgagaaagccggagcatacccacaaggcgacctcttcgtcccaccgtttaattcgcagacgtcttctgattaaagcgctctgccgccaagttgggtgtctcaataatgaaacgatttctaaattttgtaaaacttgttcttcaaaagccctatttggggagaagtgtgctccttctctaaaaccgctgggtggcgctagtgcgaccaaaatcttcttcacaactctgggccgagaacctgtttctcttcattgtccccttggtggcacgttcatgggggttatttttacaatgtgcacaaaaggattacagggaaaaccagttacagggaggactaccacctattaaaagtatttttctggaaacagctggcgattaccctccaaaagtttaattaccattattgaaaacgcgtattggaactgccttggataatcttgggaagagggaaagaaaataaagccccaaggtaaaaaatacttttaagacgtggacagaaaaatataggatcacgtaatattttgatggtaactgacttatttagatttatgtattcacaagtttacctctgagtttatttgcataccatagtttactgggtgttcctatttaaatctatttgttctcatattttcaaattgagtcatacttgctgattaaaataaacttaaggacatcattattccttattaaattaccagaggagtgctttttaatatgcctaggttttgtatgtttaaaatactgtacctaatgcattcccacatcgctattgataaggattttcgcttgttgatgattttaaaaggagctcagaggtcttccagagatttaattctgacgcagtcatctcgaccccaccattcaattaagacccctagcgaaagtactttcttacatgttaaagctgagaattaggaaatacaatagcattaagagaaaataagtagaatttgattttcgaattttaaattattcaagactactcacggaatctcaaagccaggcgttgaaatcatcggcagcaacatcagcatgtgaaaaaaaaaaaagatttattttgacaaactgtgtcaccaaatttttcaaacaggggactgtaaagtggtgacaaaattaatgcgagtttctaaatagcttgcaaaggtgtacatgtaaagtcatgttaaaataaaatgcatatagcactttgagattattatagcaccccctcccagccctttctgttatggatctacttttagttttatttttccaaaacttatttaactctgagtttgcttcccttttaacattacagttgctacaagcaggtagaaaacactacttctaaatacaataaacaacaaaaagtcaccataggcaaaaacccctaggacaataaagccacttgttgggaaacagatgattcagggggtcccatgtccataggtgatttgctctatcaacgatttccccccaaagggcgctttgccgaggctggttggggtggagacttgggataccgcctggcgtggatggaggaggcgatgagggggccctggaagccagcccctgagcctggcgtgtaaggcgattacacatcttcctggggtcatattttctgtgagcgtttatctttcatgcctgccgcgctaggattttccccctgccgtgcaagacatctttgctcggtctggggagggcgcttagccatttgccccgggtgggggcgtcccgtgttctgcaaagtgctctgcacttgcccccgggttaggtcccggacggccgccctccagtgcccaccactaaccccgccctccggggcttcttcactcgctgtctccactccaggcctactcctccgtcccggtcagcaacatgaactcaggcctgggctccatgaactccatgaacacctacatgaccatgaacaccatgactacgagcggcaacatgaccccggcgtccttcaacatgtcctatgccaacccgggcctaggggccggcctgagtcccggcgcagtagccggcatgccggggggctcggcgggcgccatgaacagcatgactgcggccggcgtgacggccatgggtacggcgctgagcccgagcggcatgggcgccatgggtgcgcagcaggcggcctccatgaatggcctgggcccctacgcggccgccatgaacccgtgcatgagccccatggcgtacgcgccgtccaacctgggccgcagccgcgcgggcggcggcggcgacgccaagacgttcaagcgcagctacccgcacgccaagccgccctactcgtacatctcgctcatcaccatggccatccagcaggcgcccagcaagatgctcacgctgagcgagatctaccagtggatcatggacctcttcccctattaccggcagaaccagcagcgctggcagaactccatccgccactcgctgtccttcaatgactgcttcgtcaaggtggcacgctccccggacaagccgggcaagggctcctactggacgctgcacccggactccggcaacatgttcgagaacggctgctacttgcgccgccagaagcgcttcaagtgcgagaagcagccgggggccggcggcgggggcgggagcggaagcgggggcagcggcgccaagggcggccctgagagccgcaaggacccctctggcgcctctaaccccagcgccgactcgcccctccatcggggtgtgcacgggaagaccggccagctagagggcgcgccggcccccgggcccgccgccagcccccagactctggaccacagtggggcgacggcgacagggggcgcctcggagttgaagactccagcctcctcaactgcgccccccataagctccgggcccggggcgctggcctctgtgcccgcctctcacccggcacacggcttggcaccccacgagtcccagctgcacctgaaaggggacccccactactccttcaaccacccgttctccatcaacaacctcatgtcctcctcggagcagcagcataagctggacttcaaggcatacgaacaggcactgcaatactcgccttacggctctacgttgcccgccagcctgcctctaggcagcgcctcggtgaccaccaggagccccatcgagccctcagccctggagccggcgtactaccaaggtgtgtattccagacccgtcctaaacacttcctagctcccgggactggggggtttgtctggcatagccatgctggtagcaagagagaaaaaatcaacagcaaacaaaaccacacaaaccaaaccgtcaacagcataataaaatcccaacaactatttttatttcatttttcatgcacaacctttcccccagtgcaaaagactgttactttattattgtattcaaaattcattgtgtatattactacaaagacaaccccaaaccaatttttttcctgcgaagtttaatgatccacaagtgtatatatgaaattctcctccttccttgcccccctctctttcttccctctttcccctccagacattctagtttgtggagggttatttaaaaaaacaaaaaaggaagatggtcaagtttgtaaaatatttgtttgtgctttttccccctccttacctgaccccctacgagtttacaggtctgtggcaatactcttaaccataagaattgaaatggtgaagaaacaagtatacactagaggctcttaaaagtattgaaagacaatactgctgttatatagcaagacataaacagattataaacatcagagccatttgcttctcagtttacatttctgatacatgcagatagcagatgtctttaaatgaaatacatgtatattgtgtatggacttaattatgcacatgctcagatgtgtagacatcctccgtatatttacataacatatagaggtaatagataggtgatatacatgatacattctcaagagttgcttgaccgaaagttacaaggaccccaacccctttgtcctctctacccacagatggccctgggaatcaattcctcaggaattgccctcaagaactctgcttcttgctttgcagagtgccatggtcatgtcattctgaggtcacataacacataaaattagtttctatgagtgtataccatttaaagaatttttttttcagtaaaagggaatattacaatgttggaggagagataagttatagggagctggatttcaaaacgtggtccaagattcaaaaatcctattgatagtggccattttaatcattgccatcgtgtgcttgtttcatccagtgttatgcactttccacagttggacatggtgttagtatagccagacgggtttcattattatttctctttgctttctcaatgttaatttattgcatggtttattctttttctttacagctgaaattgctttaaatgatggttaaaattacaaattaaattgttaatttttatcaatgtgattgtaattaaaaatattttgatttaaataacaaaaataataccagattttaagccgtggaaaatgttcttgatcatttgcagttaaggactttaaataaatcaaatgttaacaaaa

SEQ ID NO: 678 - DNA, 18142 bp, Homo sapiens
cagagcgcgagcttagcactccccagccccagtcccagctctgccaggaaaggggagacttcaccgtggcactgggaattggattctaaactttaggatcaagcaatggaaggacctggaataagacaccttcttgacccccctgaagggctctgagcagctgggcttgcctttctctttgctcccccagtcctccccttacttctcggtctcccactccccatcactcctttccctgcctcctcctgcctgtctccatcttcctccctctctttcttctctcgccccattaatccccgcttgtcactatcacctccttcctccagtctttcccccttcgctgccccttctttcctctgacatttccttctcctcttactgccactgtctcccacctttctcctcccccacatttctccctatccctacctcctcttccccttcatctttctccttcccccttatttttctatctccttcctcagtcccactcctctttccaccctccttttgcccgtcacttctccttctccctcactgccccctccctctctctcccctccccaggtcctgccccacccagctgtgtttgcttttctcccggatccggatggaggggttgccctgcccgtgcccagccctgccccacttctggcagcttaggtctcacttaatggctgagggctccaggactcaggcccctgggaaagggcccccactcagcatccagttcctgcgagcccagtatgaaggcttgaagaggcagcagaggacccaggcccacctcctggtgcttccaaaaggtaggaatggacaggtgctggggaaggagagacttaccatgggagacctgagtggcagagctgcagggaggcagagccagggctttgccagccctccctcccagtggggaagagcaggggaggcgggctcagggcagctctgctcagctgtcccacctgctaagggagccaggggcctcagccaagcacctggctgccagcactgttcctggcctctgctctgatgttctaatcttgctagactggtcagcctggtgagccaggcttggcccccctgctagcccaggtatggcgataggagctctgcttcctggctgggtctaactaaggcacctcctacaaaccagagaaattcactctggaggtagaagacatggcgttcccaacagcctgggaactgtctgggccagaggacgcctagggctcagagacccatgaggcatcccaggctcatccagcctcaaacatcaggcagggaggtgtgattggacacagaaaccccctcatggggagaaacctcctccctttaggaactcagatttcattccaggagggagttagaggcacagggctcagaaagcaagggcatgtcaaatcccagcccttcctcctctaacagaggaacaggttgagggagaagggaagataccctgaaaggtcaaagctgggctctgtgggattctgtggttatttgtagagttcagtagactctttgggctgccctttgccaggccagactgggcaggaatcaggggccagagggacctctctgtctagggcaggaagtgtgctgccttttgggaacaaaagtggcacctctgagctgaaggagcccatctcccattacctgggctgttgccaaccaatggaatcctcgttcctggcaggagtgaactggcacagccaaacagtcaccatctctgcagggcataaactgaaaggttcctaaagctctatcccacccttgagggtatttattcattcagttattcaacaaacatttatcaatttaaatccctatcaaatggaaacacaatgcttaatacacctgcaattcagactcacaaatctaattgcttagtggggatgatccaaagacatctcaaattcaacatgcccccagagaattcactataccctgtgctcgtcctttctcctgctcttggtaactcggtaccccctttcccatcattactaggtgctaaattatggttcatgcaaggagtgcccaggtgtggctttctccgagaagacttctgacctcccagctaggtcagggtcattcagggcactttcagcagtttgcagttccacatttttttttttttgagacagattctcactctgttgcccaggctggagtgcagtggggtgcaatctcggctcactgaaacctctgcctcccgggttcaggcaattctccctgcctcagcctcctgagtagctggattacaggcacctgccaccatgctcggttaatttttgtattttttttagtagagatggggtttcaccatgttggccaggctgctcttgaactcctgacctcaggtgatccacccacctcgaccttcaaaagtgctgggcgtgaaccaccatacttggctgagttccacattctttatctaactgtgagaggcagcatactgtgtaatggagtggtcatgtactgggtcttggagcacagcctgagtttgagtcccagctctgccatttacttaatatgcagctttaaacaagttacataaattttctggggctcagtttcctcacctgtcaattgggaataactgtagtacccaaatcatagggttattgtaggaataaaatgaactaatatgtataaagctcatcaaggccttatgcactgactggctgaggacaagatcacgtatgtcacatgtatctaagtaggaaggccacttgaaacactagcactgaatgtgaaggagtaggtaattatccagggagaaatcagagtaaggtgacaaaaataaggtgaaaatggcactaaggaggcaaaagagcaattaattgtcccctatactttagcaacaggatagatggtggtatctttccttgagaatacaggagaaaaaggctttttgtggagaaaaaggctttttgtagagagagatgaacttgtttttgaatatactgcattggagatagttgcctgtagaccttccatccagcctggatctcatttgggctggagagctagatttggggttattcatctatagatggtagctgaagccatgggcatggataaaactgtggcaaatccatgtgtaaattgataagaaactgggatgaaaattagagttctggaatactcaaatatttaaggaacaagaggaggaaatgaagccagggaagatggagagagcagtcaaaatttgaggacaggcatatcattcagccataaaaaggaaagaaattctgccatacactacaacatggataaaacttgaggacattatgctgagtgaagtcagtcagtcccaaaaagacaaatactgtataatcccatttacatgaggtatgtagagtagtcatatttaaagagacagaaggaaagcagaatggtggttgccagaggctggggcatggggaagtggggcgttattgtttaatgcttatagagtgtcagagaaactgaagaattctggagattggttccacaatgtgaatgtactgaacactactaaactgtgcacttaaaaatggttaagatggtacattttatgttctatgtattttaccacaattaaacatattttaagtggtataagaaaatcaagagcaattaatgtcatgaagccaagctggtagagggattttagaggaccgtgatcctcagtgcccagtgcagcaaaaagacccaggaagagagagtgagcattgagactgggctcctactaaagctagaagtcaatgtctcaagacattgggttgcgtttagaagctcagaaattctaggagctgatcaatgaaaggaagggctccgaaattagctttcttcaccctgtcttagcattatgcgatggatccagcttctggaaatgcagttacaagtagcagcgtgccttccctgatgcaacgtaagtacccaggggaccttgagctactttcagaagtctgtggagccccaattactcccagtgattggtgtccaaaaggaatatgcttttgtcacagtcagacactgtgtgactcgcctcatgtagaaaaagggattagggtcgggacttatatctgggctggatgttttatattacatttcattgaacattcctggcagccttgtaaggtagctccctttttaagatctccatttatagatgaggaaatggaggcctagggtctcctagtgagtcagtggtgaactcaggaccagacctcatgtcttcctgactctggcttgatgagagaggttccaccaaaggtctcaggcagttagggtgaatttcgattcttctttcctccctgagtctctctaccactctcttcgctcttctctccacccgcttccttcatccccactgaagagagaaatcaaggaggggctcaaaataccccttctccaacttgtatcttctggcaaagtgaatcaagggtggagaatgaagaaggtattatagataacgagtacatttccttccagtccctgacttaccaaaaccaaaacaaaacagataaaaaacatgatacgaaatttccctgtactcttcagtcaattaccctaattctctttctcttgtacagtgaagggcaggcaccatcccaagatgtgcagggtactgccacagaaggctcatggtgattctcagcagaggctgctctggggtggggtccctgtgtatctcccagcctaactctttttcctttcctctgaaccacaggctgggactgacagctgaacaggcctgtccaccttcagtcctttccttctaaactaatgctaggataccagtttctaggttctcccattgtgtctccctccttccttgttctcaaataagtacataacatgttggatatttataaaagtttcctttggctggccgcggtggctcacgcctgtaatccaagcactttgggaggccgaggcgggcggatcacaaggtcaggaaatcgagaccatcctggctaacacagtgaaaccccgtctctactaaaaatacaaaaaaaagtagctgggcgtggtggctggcacctatagacccagctactcgggaggctgaggcaggagaatcgcttgaacccgggatgcagagggcggaggttgcagtgagccaagatcgcgccattgcactccagcctgggtgacagagcaagactccatctcaaaaaaaaaaaaaaaaaaaaagtgttttcttcatttcatgctggaaaataatactaaggaattaaccagttacaaagccggaacaaatcttgagtcacactagagttagtgttgacaggagagtaattgttggctgagatggctgcagctggtcttctgtttctttgggatccctgaattggagctcaggggcttctttctgactttattcttccaacatcatctccccactcttgctctgcacattgtcacctccagggcctcctgtgataacaggtgccggaacagataagtgaacctaagtgacacctctgaggagctccaagctggtcacacacctgctttctataaggaaaatgcctttcagtcattccaatacctctcactgccaccaagagttaacaatgaactgtcatattccactaggtggtttaaaaaaaagtccccaagaaagaaaagagacattggtctgcctctttcaccctaaagccagttctgaggagccgtaaatgctgcagatgtcctcccagagcagtgcctgtggactaggagaaggataatgattggttctctaaagggagctgcttcaaaacacaactcctccctcttctgccttgggtggtaaactcactatcagaatcccaggacacagccgagcgcagtggctcacgcctgtaatcccaacactttgggagtctgaggcgggcggatcacttgaggtcaggagttcaagaccagcctggccaacatggtgaaaatcatgtctctactaaaaatacaaaaagtagtcaggcatggtggcaggtgccttgtaatcccagctactcaggaggctgaggcaggagaatcgcttgaacccaggaggtggaggttgcagtgagccaagattgcaccactgtactccagcctgggcaacagagtgagactctgtctcaaaaaaacaaacaaacaaacaaacaaaaagaatcccagaacacaaaaccccgtaagttaagaataatcttttccactggtgagaatatgtgaacccacatgtgtgtgagtctgtgtgtgctcttgttccttgcctttcttttagccccaaacgctagttccctatctcctcccagagtttactcctccacttcagtgtttgaccctctattatgcttgagattttccattgcattgattgccacccgaaattttattataaatatgcaattttgtctctactcaaccaggacacaccccggaaggtgtgggttttgtctcaatgttcattgctgtattcccaggacctagaataaataatgcctggcacatattaagtgctcaataaatatgtgttgaatgaatgaataattgtgtgtgtgtgagtatatatgggtgaggtgtaaaagggcatgtgtgtgagcatgcaagtgagatcttgtgtgtgtacacatgtacacacatgaaatgtaccaggaaccttctggggatggccttccttcagcttgaaagcaatgagaccccctaagtgagagccgcccctgtcccttccagtgatgaccctgctggtgcattctcttttcaggaggaaacacacctgctcctgcagaatcgatggtcaatgctgtttggattaacaaggagagaagaagctcactgtccctggaagaggcagattctgaggtggaggggaggctggaggaggctgcccagggctgccttcaggcccccaagtctccatggcacacgcacctggagatgcattgtttggtccaaacctccccccaggacaccagtcatcaagtacatcataggggcaagcttgtgggatctgatcaaaggctccctcctgaaggagacacacacttgtttgaaaccaatcagatgactcagcaaggaaccggaatcccagaggctgcccagcttccatgccaggtgggcaatacccaaacaaaggcagtggaatctggcttaaaattcagcactcaatgtcctctttccataaagaacccacacaggtctggcaaaccagcttactatccatttccccagaggaaaacacccaggatctcccaagctgcccggaacctgggcttatatggctcagcgtgaagctttctattctgccagatgtcttgaccttgaggccacctatggccttatagaagaaccaaggaggcagagccacaacgaggtctctagctatgagcaagaactggactaacctaattataggaattgtgggagacgaacttcacaatggtaacatggttttacccttccaataagaagagacttcccaggccaaattgcccacagtttaggatgaagaggactgtctggtcagtgcagccccattctgacattactatgaggtcctggatatccattccttggggaggaccagtaagacatctgctccatccctggaactggataattttggaacataaaccagggacctagccaacagaatgccttagcaatgcccaggggtcaatgggcgtggcattcttgttttcaatgtcttctgatgatttctcatatattctggagaagacaagctctgagaattcagatgctttttctggtggctatgtctggggggccatctcacttagaagtcacaacactcattggcagtgatcacatcatttcaatttgggcttcccaaagtatggtcacccagggtatgaaggtgagatcaatgctacctaccattttgtgtctttaaggggtctttagaaagggctaatcatctgtcactgctcactgagacatgtacattccagcatcatcacagagttatctccttccttccttccttccttccttccttccttccttctgtctctccctccctccctcccttcctcccttctttccttctttctttcctctcttccttcttgccttctttcctgccttcctgcctatcttttctctctctctctctctgcaaattaagttcttattaaaaactgccaatcattgacgatatataatgatgagatcctgaacaaaagaggcaaagaaatgctcctacttgaaaaatacacattccctatagactgcctcctgtttagtccaacttagatcactcagatccttcctgggatcaaatatatttttaaacctaagacaaagcgaagcaggtgtcacttgggtgatagggaaaaaagcttgtatttcctggttaatgtttagcttttgtaatgctatttaaacacacctaaggtgcctttccctcatctcaggtgctttctctgtaaagtttcactcccacctttcttttctctgcatggccgtccagtcttgcccatctacatccagagctgttaactagtagtgtcattacctgtgaaaaacatgtagaagcttccttgaaccacccagaaatccactcaaatttggggattgtcattccttttgtgaataattaatacaattcagttgttttttaaatattctaataaaaaaggaaattttctcaaaaaaatttgtcctttgcttttgtttttaaagaagtgtcccacaagtaacgtatctttctataggtttgcttttgtttcctgtttttggagatggagtcttgctctgttacccaggctggagtgcagtggtgcaatcccggctcactgcaacctctgcctcccaggttcaagccattctcttgcctcagcctcccaagtagctgggattatgggcgtgtaccactaccccagttaattttttgtatttttagtagaaacggggtttcaccatgttggccaggctggtctcggactcctgacctcgggtgatctgcctgccttggcctcccaaagtgctgggattacaggtgtgagccaccacacccagccaataattacatctttttttttttttttttttgagatggagtcttgctctgcctctcaggctggagtacagtggcacaatctcagctcactgcaacctccaccacccagctttaagcgattctcccacctcagcctccccggtagctggggttacaggtgtgcaccatcatgcctggctaatttttgtggtttttttgtagagacagggtttcaccatgttgcctgccttggcctcccaaagtgctgggattacaggtgtgagccaccacacccggccctttttttttttttttttttttttttgagacagagttttgctcttgttgcccaggctggagtgtaacagtgtgatctcagctcaccgcaacctctgcctcccaggttcaagtgattctcctgcctgagcctaccgagtagctgggattacaggcatgcgccaccacgcccggctaattttgtatttttagtagagatggggtttctccatgttggccaggctggcctcaaactcccgacctcaggtgatccgctttcctcggcctcccaagatgctgggattacaggcataagccaccgcacccaacaaaatataacccctccacgaccgtggcagaactcaaacctgcaatcttttgatccgaagtcagacgccttatccattaggccacacggccagctggttggccaagtctttgttcaaaatgccaagagcctggatggcctccaccgataacattagcagaaagttttcctcttctcttcctaagatagagaaaaaccagctcacattgtaaatcctgcatcaggcaggccacctttacctagggttccccaggcttccacttcccagtgtggactccccatgtggctgcctggcacacaccatgcctcagtctcccctggcagaggaggacggatcaggctctagtctgggcactgccattggtagaggtgtgacctttgttgggtgaattaaagccagagatttcagagccaaatctcagagccacagatttcccagtttaactgaaggcgataatcttccctggggtggtgagggacgcagaggagagacgttttccctaagctaggaacagaaaagttcttttccaagaaccaattcagctggatcgaacagcctcttccccactaggggacaggctgccctcacactatctcagtcagattccctaacttttcagtcacttcctgacattaaagccattcatttcagttgttaaagcttggaactgttcaaatgttaaagttcatctcatagtcaagtcagagtctaccaggctccacctcctcccagcacagccttgattgatgcctttaaggctggagggagaggctcattcccgcacccttctgtctgtgtttacacagatttttgacaacggggtaggaaggatggagaggaagcacagatagctctttatgtgactggctatggtgtagttttggtctctcgccttggccatttacgctggcctggcttgtcatctataggcttggtatggacaggtggtggccccagtgggctcctgctgaggagggactcatcccaagcatcccgctagcgtgtttgagggtctcttgggaagatggctatgcctggtcaagctgcctccaccccattgcatcaggagcccattctttttaccctttgccccaagttcatctacctctgctagcccagctcggcctgtagacacataggcaggaggcattttctgcacctatgtgaggtgatcatccctgcaccttctctttctggccattctatactgtcttgtttccactgaagtctcccctttctgctgagcaatcatctagtggggggataatgtgtcagtcctccttcttgcagacactactttatttatttatttatttgtttgtttatttttgaggcggagttttgctcttgttccccaggctggagtgcaatggaactatcgcggctcactacaacctccgactcctgggttcaagcgattctcctgcctcagccacccgagtgactgggattacaggtgcatgccaccatgcccagctaatttttatattttcagtggagacggggtttcgccatgttggtcaggctggtctcgaactcctgacctcaggtgatccacctgccttggcctcccaaagtgctgggattacaggcataagccacctctcctggccgacactaccatctttaaaagaaaggttctgctgggtgcagtggctcacgcctgtaatcccagcactttggggggccaaggcaggtggatcacccgaggttaggagttccagaccagcctgaccaacatgatgaaaccccatccctaccgaaaatacaaaaattagccgggcttggtggctcacgcctgtaatcccagctacttaggaggctgagtcgaggagaatcagttgaacccgggaggcggaggttgtggtgagtcaagatcctgccactgcactccagcctgggcgacagagcaagactctgtctcaaaaaaaaaaaaaaaaaagaagaaaggttctttgccctccctctttcccctttggctttgagaagaactagtcaagtagggcatgtgtgtatgtggtgttttctttcttttctttttctttttcttttttttttttttttttttttgagacagggtttcattctgttacccaggctggagtgcagtggtgcgatcacaactcactgcagcctcaacctcccaggctcaagcgatcctcccacctcagcctcctgagtagctggaactatccatgcataccaccacagccagctaatgtttgtatttttttttttttttgagacagagtctcgttctgttgcccaggctggagttcagtggcgcaatctcggctcactgcaagctccacctcccaggttcatgccattctcctgcctcagcctctgaagttgctgggactacaggcgcccaccaccacgcccggctaattttttgtatttttagtaaatacgaggtttcatcatgttagccaggatggtgttgatctcctgacctcgtgatctgctcgcctcggcctcccaaagtgttgagattacaggcgtgagccaccgcgcccagccacgtttgtattttttgtagagacagggtcttaatatgttgcccaggctggtctcgaattccttagctcaagtgatccacctgtctcagcctcttaaagagctgggattacagacgagagccatagcatccggccttagtcaggtgtttaattccatggagaggagaagagggaatgagctccatacaaacactgaatgtccctattgtggctcagaaaacagtgcccccaagagaaggcctcagaagcaaaaacttttctctgaccttctcctgccctcctgtctctcagtgccattctcccccagggctagccatagaaactagaatgcctcttttctaaggtgggtcatagaaaccagaatcctggcctggtgcggtggctcacgcctgtaatcccagcactctgggaggccgagctgggtggatcacctgaggtcaggagtttgagcagcctggccaacatggttataactccatcccaactaaaaatacaaaaaaatacaagacaaaactccagccactttctaagtccagaacttctttcctgagtctttttttttttccctcagtggcgccatcctggcccactgcaacctccacctccctggtttaagcaattctcctgcctcagcctcctgagtagctgggactatatgcatgtgccaccacgcctggctaatttttgtgttattagtagagatggggtttcaccatgttggccaggctggtcttgaattcctggcctcctgatccgcccaccttggcctcccaaagtgccaggattacaggcgtgagccaccgcgcccggccgtttcctgagcatcttgattccaggcagaatatgtagagaaaatattgcaacttgcctgtggctgtctcctcgccctccctctaggcactcaggctcctagggggatagcaacttaagaccctaccttaggaaaggacttattccaaggtccctgctcactcacaaactaggacttcattagtacctgtgtgtgcatgtgtgtgtggagggagattaaccacagcggccaagggggaggttggaggggatgagtagagagaagggaactaagaagtccagctccttacctctttggggagctagagtcaaattccctcggagtgtcacacccatccaggacatgtccccatggtggtgggagaaactgcctcagagaggggttgggtcatggccactacttaatgctgtgaaaggaaatgaaaactcaggacctcggccgggcgccgtggctcacacctgtaatcccagcactttgggaggccgagatgggcggatcacgaggtaaggagatcgagaccatcctggctaacacggtgaaaccccgtctctaataaaaatacaaaaaattagccgggcgtggtggcgggcgcctgtagtcccagctactagggaggctgaggcaggagaatggcctgcagtgagctgagattgcgccactgcactccagcctgggcgacagagccagactcttctcaaaaaaaaaaaaaaaacaaacaaacaaaaaaacggctaaaagctgagtcatacaatgaaactgcctttccttttgttcctaaacagatagcacagataaaaggttaaatatctccacaggcagctactccactttcgccttatcttatgtaaacactgagttactgattgcaaaacaaatccataattgactattcccctaccttctccttttcccttgcaacttgtggatttccagaccctccctttttcccctccagcagcttttcccctttaaatagtgaagtcctggaagtcatctttggagaaaggcacagaccacacggactgtgtctgtgattccgtatttttccttctgggcatatccttaaccttggaaaaattaactcataaattgattcaggcccgtctcagagcaatacttgatgtctggtccctgttttgatctttcatatttgaaaaacattaatttttacttggctttcttgggttttgagagaagcatctgcaattctttttttttttttttttattgtatttgaaagttttattttaggctgcagaaacaaaaacaagcaaacaaacaacaaataacttgaacaattcttttagtctggaaaaactataaatcttctccagtggcacctccagcctcaggttcttcctgagaggatgcttcttctgttcatcttatttgtttaaaaatccctgcgccccagcttgtgagtagggtgccccatattgaaggtaaaaagtctaacaaggtgatatcacttgcttaaggtggcacagctagcaaattgcacaagggaacagcaaactcagacagccacaagccatataccagagtctgaactcttttttattactattattattattgaaacggagtcttgctgtggtctgtggtccaggctggagtgcagtggcgagatcttggctcactacaacttccgcctcccaggttcaagcaattctcctgcctcagcctcctgagtagctgagattacaggcacgaactaccacgcccggctaatttttgtatttttagtagagatggggtttcaccatattggccagctggtctcaaactcctgacctcaggtgatctgtccgcctcagcttcccaaagtgctgggattataggtgtgaaccactgcacctggcctttttttttttttttttttttttttttgagtctaaactcttaacaacgttaaactgtctcctcctgactccctcccttcacttatttttataacatcatagctgggaaatccaccctccaaatatttttcaactgaaactgccaatggtgaaattgctgcttctaactggaggccagagagaatcctaagacttttcctaaattcttcataaaacctcacctttccccagcctctcaggcactggttgaccctccacattcttcacaaacttcagaccacttccttattgagaaagactcagtcatgacttccagcattttctgtctgcacataaattctgaaagctttcgccagctgtgactgtgtttctcccacagctaatgaacaacacacttcctagaaacagaaagttcaaggaactgaacttgtaatattttttcttggccttgtgtttgtgacaattacattaaatttccccctccaattccatccaataagatgatacacccgctgaagttgccttcagtctcttcccagtaattaaccatgatttattccgtgttattaatccttgtatttctcctctgtctgctcactgataactcccccatcctgtgtgaatccaccccctgaattcctcaaatccaggatcataattaagacttggaagcacacaagcccccgagccctggctgagaaataggagaaggaggaaaaagctggtcatagcaaatgctgtcttctgccaacccaaaccccaaatgtttttaagggggggcgagctggctctcaaaatcagtatcagccccagatccagattagcacattttctcccaatgcaggaactgcttctctttacaagaagtgcaggtgtgatgggcatggtggctcacacctgtaatcccagcactttgggaggcagaggcgggtggatcacctgaagtcaggagttcaagagcagcctagcaaacatggtgaaaccccgtctctactaaaaatatgaaattagccgggtatggtggtgtgtgcctgtaatcccagctactcaggaggctaaggcaagaaaatagcttgaacctgagaggtggaggttgcagtgggccaagatcttgccactgcactccagtctgggcaacagagcaggactccaccaccaaaaaaaaaaaaaaaaaaaagggaaatgcaggtgctctcgtggtgggagggttctaagagcgagacctgtctctctcttgccatgggtccctttctctgccagcttcagattgcacttgctggattctcccccaagactggagccttgctctccttttaaagcactgttcatgataccagtggctgcattcacaacctgagggctgtggggatgccccccacaaatcccagtatcctctctgctgagcattgccacaaattaacaagatcaatgagaagacccctgaccagtcaggtaccactaccagtccccaaagggtgcgtgtgcagaggaaattccaaacaagtgtgtactatggcaaaaccctgatgagtccagccagtcttagatggcctacaaggcctctttttgtttctctagcctcaggcccagaccaaggtggccctatcttctgagacggtgtttctcaacattgattgcataagagaatcatcaggaagcttggaaaatattcaattaaatgacaatctctgaagtagggcttgagcactggcattgtttctgttgatcaaggcataaaccatgtaaagtgtgggaagtgtgttaatcttgagtatagcttatgtgttaattattatgtattatatatgtattagtccattttcatactgctatgaagaaatacccaagagtgggtaatttataaagagaaagaggtttaatagacttatagtaccatatggctgggaaagtctcacaatcatggcagaaggtaaaggaagaacaaaggcacgtcttacatggcagcaggcaagacagcaagtggaggggaactgccctttataaaaccatcagatgtcgtgagacttactcactatcatgagaacagcacaagaaaaacccacccccatgattcaattacctcccactggctcacttccatgacacgtggggattatgggagctacaattcaagatgagatttggggctgggcatggtggctcacaggtgtaatcccagcactttgggaggccaaggcaggcagatcacttgaggtcaggagttcaagaccagcctggccaacatggtgaaaccctctctctactaaaaatacaaaaattagccaggcgtggtggcctgtacctgtagtcctagctactcgggaggctgaggcaggataatcgcttgaacccaggaggcggaggttgcagtgaaccgagatcacgccactgcactccagcctgggcaacagagtgatacagtaagactccatctaaaaaaaaaaaaaaagttgacatttgggtgaggacacagtcaaaccatatctgtatctatatctacatctatatctgcttattttcacagatacagatacatacacacacagatcaagatatacattttgagcattctagaaagtcgccttcagtctcttcccaataattaactacaatttatttttccattctcctgtttctacttttttgctatatgcatacagtaagcattgttcattttacacatcctttcgtggacatttgcttccatttctctttaaacctccccacccctctttttttacagatgcctgtctgggtgagctggtttcaagcatgggtattttttgaaagctccctctggtgattctagaattctaagattcagcattgagacccactgccttaggaccacactgattataaactgaggcacaaatgtgctcaatggatagaggcttctctgtgaggctgagtacagaacttgtgggaatcttcatgtctctcctcctttgggtgccactcttatattccacttgagttcccatggtggggagaaggggttggggagggtcctatgggggaggcagccccatgcgtattttatcacaccagctctgtgagtagaaggcaaggaagtcacccagatgagtctttgaaaaagactgtaggccagaagaccctttttgttcctcctaccaacaggtaggccctgccgtatccttgagaaccatctcagaggaccctcttttgggatgcagcttcctcatcccaaagctttggaaaaccctgagcttccccactagggctgacctgtctgcctttcatcattacatagaaccagaagtgtgctgatgacttcatgtcttggagtttctctaatttcagcattattcttgagatggactggaagtcatatgaagaccagagagaat

SEQ ID NO: 679 - DNA, 14242 bp, Homo sapiens
gtgtgaagtaagcaatctattttcacttgctattaacagcaaacgtacaactttatctcttatttgacttcattatttggctttcaaattaacaacatgaaaactatacagaaattagtctgtgccctataagacagagatttagataatttgttcaaaacatgagatgatattcagatattctctcaaaggcaggactccaacaccgcaggtggaaaaccaacaaaaggaagaaaacagaaaggtaaataatgactcttttctgtactttttaatatgaggtatccatagactgacatctggttacactgttacatttaaaaatcactcaacaaataatgagggttacttgttttgctcagatttggaccggggtaccagtagctgatttgttcacatatattactgacatgctgactgggatctgggtataaagctcttgaaaatagactacgataataaaaatcaactttagaggaaagaaaaaatttttaagtcttttaaaaagtaagctctcatttaaaaaatactagaaagtcagatgtaaaaacagatctaaaattatttcttttatagacagactatgaatgtgcttactttagagaacatttttatatttcactctgaaaagcagcttatacccaaatttgacacatacgtataaccttaaaaatctgaaataatttgctataatggtcttaattgcttcattgttgtttactagaatcttctaaaattgaaaaaatgagaaaataatcttgtgaaagggctaccagaaaatatcgaagtactcactaacctttataatatttcaactagtacattaaaaatacttgttataccatttaacgtaagtgttagcatttaattgatagtttgaaaaatttaaatcagcatcatttaaatacaacatatgtagataggttagatactttcaaagttataattgttactatgttagaatttaataaatattccatttcaaatcaaaataataatgacttttatatgtattttaaaggtggacttgagaattggccacgtaatacctcgaacacattatcttcacagctatgcagttttaaatgtaatataaaaatcattttatgtatgtacagcttacttgaatcagataaaagttcaaaaattatacatcatatttaaacaaaaatgatcttaatgttgttatacaagttaattcaataagttatttagactaaataaaatgtagaaaaaagcattgaaagtttacattgcaaaaaaagtcagatacttcaaaattagacaatatatgcaatttgcaatttttttttagtttttagaaactactatttggccctcactttagtagccaaagaggttaatatattacaataagatcctctgctttcacttgcactagaaaaatgtggcaagttgacttcatatacaaaagcaacagaatattctgttttctcttgggtaaaaactggtcatatttcttgaaatgttttatttaatcattacagtaactatgaaaagaaatggcctactttaaaaaaatctataaatacactaagtatctatcccagggcatatttctaaaagtacaaggtaatttttactcatgtttctgtttctagggattttcagtgtctgtaatagggcagagaaccttttatttgagtcgcaccagtttacttttctatttcccagaacaagttgtccaagttgattatcatacatacgagttagtgttctttcttttttaaatatcatgtttaagctcacagatacagttcttgctagtaaaattcaaaactgtatagcaatgctgcaagttaaacataataaaagatgattcatatttgtatataactcttccaacataataaatttaaggtacataacagactgcataaaatagtaatttcatcaatttcacctagtctaagcaattaaatgatttcacaactatgagcttcatattttatgcttatatgaatcctgtccttgcatgttttaaattctaacatgcttatttgtctcattttgcctaacattctaattcatgaagatataagatcaataaattggatagttatacatatagttatgagtatgcaactactagaaaatgtaatttatatacagcatataaacatatttgagtacctatcaagtcaatttctacacagatgaacaaggatttagggaaacattctcaattatgttaattctataaagataagcaactgtgactttcagtcaaaatgcacagatacagaagttactccctctttctctaaacatacagaatttgatgtaatcgtaagtttaaaaaagacaaattttaaaacaacatcactaaattttagagtaaaaaagcgaagttttctcctggctcacacggtgaaaccccatctctactaaaaatataaaaagttagtcgggtgtggtggcgggcgcctgtagtcccagctactctggaggctgaggcaggagaatggcgtgaacccggaaggcggagcttgcagtgagccgagatggtgccactgcactccagcctgggcgacagagagagactccgtctcaaaaaaaaaaaaaaaagagaagttttcaggtgccagaaatgatgaggaaacatacttaaagccaaagtgaagagtagtaattaaagctaattacactgggcaaatactttaccttaaagctgaggtttagagtttgttgcattatagggaactaaaactgagtttcctagatgaaacagttaactaggaataatacaacataatctgtatacaaagacaggaataactctgttgacttgcccaggattatagcaggaagtgagatatccacttaggctataaaaatcactagagaaaaattaggcctacataatactacctgggctacaaggggcaaactccatggggcgttggtagtgacaatcaaaaaaatagcctcaatgtatccataattgatcaggacactcagagcattcttgtataactccccaatgaagctaggctactgacgaatttcactaaatacacttgcccacatttaacagagtggtcaccagtccgtggccacagcaaacataggaatttactcctaagaaactagaaataacctaataatgtaaaggatctttcacataaatattctctaaatgttcaaaagaaatacaggcataggatccataaaccaagacaaacacagtataacctttatagctcactttaaacatcgtttacataatacgcattgccatgatgtataacactgaaaggaaacctgattctatttccatgttttgcctttaatatcaataatgtatacagatattaaaaaaaggatattttgttttttgcttgtaaattcattaagattaataaaaaggacatattaatatattttaaagggctccttaaagtaccttttattcaaatataaaagtgtggtgcatgttcagggaatgatattacatggataaaaatccaggaaaaaaacaacctttatagaggtcagactcaaatatcctgctttccaaaatcagtggcagtaaaatgcaccttctcaaaggcacttcacaggaaaattcaccttcccagaggcctgtgtacactgtgctccaatagcaatttgaaatagtctatttcttaaaaatttttaaactatgatgctttagaaaaaggcttttgattactttatttctaatttttttaaaaaagaggctgggtgcactagctcatgcctataatcccagcactttgggaggcggaggtgggaagattgcttgagcccaggagttagagatcagcctgagcaacacagcaagacctcatctttacaaaaaattttaaaaaatcagccaagcacagtggcatgcaactgtagtcccagctactcgggaggctgagggagaaggatcacttgagcctgggaggtagaggctgcagtgagccgcaattgagccactatactctagcctgggtgatagagtgagatcctatctcaaaaataaaacaaaacaacacgcccaaaaaaggacaaagatctttccagtcataaaaacattagagggagttgtttcaggatttgttccaaaccatgcaaccaaagagaaagttcaagatgttgtagttcttgaggaatgtgaaaattaaagattgttaaaagctactgaaccattgtataaatataggacttaatttttatggatagaaaatcaaaatctgttttgtttgatgccactttctctttctctcgcctctgagcttctaacattgttactctttctttttccctatatttacacgggtgcaacccagtttaaaaaataataatgtggcaactagcacttcagctatatatgctgtatttttaagaattcatagtcaaggtggaaggatcccttgaggctaggagttcaagaccagcctggacaaaagagcgagatcctttctctattaattgattaattaattaatttttaaaaaacaattcatagtgacaagctagtacaagagaaggaaacagaaatttggttagatgactatgagttgaagcagaagaaaatataagaatatcaatctccatatagtaccaaatataaaatgcaatatttcttagactttctgtaaacatcagtctgtgagatccaaattatttttcttcttttatagtgtaaagtgatcaatttggtctgattatattaaagatcctaataaagcttcaaacaacaacattattttagatcctatatgctatattatctcctgctaaattttttcttttaaatagatatagtatgtatattagtaacataatacagtatttgatatagataaacattatttgtgtatatttcactaggataaccaatttctactcaatagacaataggggaaaaagaacagatttgcaatcaagtagatatgtctaaacgtaggatctgccaccttttagttgtgtggccttaggcaagtcactttaaaattccccttatttggacgttgcttttcttggactggactgtttctttaattttcttaatgtctgaaaggccatgaaaataatacaaagaaaatggagaaaataaagttcttaaagaaattatttaaaaaaaaagcaagaccgtaaatacatgagtttctaggttgaaaagaccaactatatgtttaccaaataaatgcatcaagacctaccccagatcacattgttgtgaaatttcagaacaccaggaatatgaaaaaaaggtcaagaatttcatgaaaggaaatataaaaacagatctacaaaatatcagaaaacacagggcagaatattcagaggtaacaaaactagaagatgtagtaacaaaactttcaaaattttgagggaatataatttccaactgaaacttatatccacagaaaatatagtattcaagtataggacagaataaaaatattttcagtaatgaaaattatcattgcatttatgttttgaaaaggagctatggtacactcccaaatcaaggagataaaccaagaaaggtgaggaattggaaatcaaaaatagagaatataaaagaggaagaaaattctaacacaatcaggttacattagagtttccaggaaaggagcctcaaaagatgaataaaatgaaataaaaatatatatattctatatttaaatatgtcaagaggatatgttcaattcacttcagttttagaatgaattagtgatgtatgtacaaaattaagcaggtgaaaaactttggtaattaatattttcttaaaattaaatgttatatgtttcttgatctatgtggtagttacatggatgtatttactttgtgaaaaatcaccataatatacatttatgttctgggggactttctgtatatataaatatgtcaataagaagttttcttaaatatattcattttctatctctatccattgaaaaaacttagaaataatttaaaaaattatttgagaaaggaaatacagctacagtaccttaggtgactcacatataaataatatttgggtagtcacaataatgtaaacacaaaatattgattaaccaaaatttgtgatataactgtattaaaagggggaaggtgagggaagaatgggggtgtgagagaagattaaatccacatcttccatagaagaaattcaataaaataactaaaaccaaaaaagcagccgggtgcggtggctcacacctgtaatcccagcactttgggaggctgaggcgggtggatcacttgaggttaggagttcaagaccagcctggccaacatggtaaaaccccatctctattaaaaatacaaaaattagctgtgcgtggtggcaggcgcctgtaattccagctactcaggaggctgaggcaaggagaaatcacttgaaccagggaggaggaggttgcagtgaactgagatcacaccattgcactccagcctgggtgacaacagcgaaactctgtctcaaaaaaaataaaataaaataaaactgaagaagcaaaaatacctacacatgcaaattacctagaaacaggagtttagatgcaacatatagctaaggagctgaaaatgactgcctttatgactgtctttaaggaatggagaattggaaaggggatgtggtacggcaggtaagggtcagatatatatctttagaagccttgacatgacttgacttgttaacctgtgtacatgcattattaatttgagggaaaaaataacatttttaaaaagcttatttaaaaagcttatggctatattaaatgcgacatggtatcttcaacactttggggaataatttattttcagcatcaatatagtaatactagaaagagcttatagattagggagtcataaataccactaaaccacaaaatgaacactaggaagctatacaagataaattactaagccaacctactttaacatcaaattttctctatactgaaaagaagactagttcttatcagatgtatataataaaacatgggtgataattctgctttcacaaagttgccacatggtaaaaagtttccacattacttcccaatagttttacatgtctttaagtatctatacctggataagcatcaaatattttatacaatatttggccaggcatggtggtttgtacctgtaatcccagcactttgggaggctgaggcgggcagatcacttgaggtcaggagttcaagatgagcctggccaacatggtgaaaccttgtctctaccagaaatacaaaaattatctgggcatggtgatgggcacctgtagtctcaggaactcgggaggctgacgcaggagaatcgcttcgaacccaggaggtggagattgcagtgagctgagatcatgacactgcactccagcctgggtaacagagcgagaccctgtctcaaaaaaaaaattatatatatatatatataataatattaaacacgaaagacaaaaacaactttttaacacctaaaactggcaattctttctatagtatcgtctaatattcctcctgactaatcttcctttcataattgttccaggtttagtatcattcatagctcatttttttccttggatcttatagaaacactagctttggttagctctactctgaaggtagagaaactgttccttgccagtaaagtagaatatagacaataaaaatatgcagaggaagaggcgtatggaatctccttccagcttagaagtcccctatttacataaattgtactgactgaacttttttacctttactatagcaaatcagtggcaaaaacaaaagattaccggctatttgaattaagtatttaaaataggtgaaataaatagtagaatgctttaagtgcatttcagcaacaaaaacttgctcttaaatgtttcccaccggtacttaaaatgctcagcaatatagtcatgtggcaataaagtaatacagcaaatgtttccgaataaacttttaatatctataaaacaccttttcctgacacaaacagatttcaaggtcttatcccttgtgatctggctcttttcccaaccacttaactgacctaattgcctcttttcagaactcaccctaaatgatctaacaccactgaaaaaccttcatagcatagtaaagctatgctatgtcatagtgaagttactatgctctagtatgctatactgtcgtataaagagttgagtccttcaaactatactgccagaatctgaatctcaactctaccactagctgacaacatggttcaattactaaagctgagatcgtaatttcattatctatagaatagagatcatgacaatacttgttcttataagaacataaaacacacttagtgcctggcacatattaagagctcaagtaaatctaagatatcaagatctcaacataagaactcaagtaaatataagactcatcaaggtgctgggaaagaataaagaccctctactttctcctctaagtattaactctatgaggtaccagaatgaataaaaacccttgatctcatggagttaatactgggaggagaaagtagacaattaagttaatataaataagtaaaatacatggtatgttaaatagtgaaaaatgctaagaaaaataaagctgggaagggtcagagagttgaaagaaggtatagttcaaaatagggtgacaaagaacatcctaactcaggagtgacatttcagtaaggactgggttggggaaaaacgtcacatactacatgggaaagaacacttcaaatagaagagaaggcaagtgccaaggccctaaagccagatggtgccagatttgtgtgagaacagcaaggacagtgagactgaagcagagaaagggagagttgtaggaggtgaggtcggaggggtaacagaaggggtgaagtcattgtggagctttgtaggctctagtttttcctctaagagataatgccaaaggaggattttaggcacaggaatgacatggtctgacctacattttaactctgaattctgtgttaagaaaagaccagaggttttgtggtgggggcaggatggggggtagttggtgcaaaaaggaaacaaggagaacacttaggagactatcgttaacaatcaagatgaaaaataacagggacttgaccagttgcggtggctcatgcctgtaatcccagcactttgggaagccaagatgggcggatcatgaggtcaagagttcaagaccaacctgaccaatatggtgaaaccctatctctactgaaaatacaaaaattagccaggcatggtggcatgtgcctgtagtcccagctactcgggaggctgaggcagaagaatcgattgaacctgggagatggagggtgcagtgagccaagattgtgccactgcactccagcctaggcaacagagggagactctgtctcaaaaataaaaaattaacaaaaataacagggacttgaaccagggagatggtaagaggtggctagatccaaatacattttgaaagagatgttgacaagatttgctgtgcttgcatatgaaatgtagaaaaaaaaagtcaagaatgacttccagccaggcgcggtggctcacagctgtaatcccagcactttgggaggccgaagagggcggatcgcctgagatcaggagtttgcgaccagcctggccaacatggtgaaaccctgtcgttaataaaaatacaaaaattagctgggcgtggtggcacatgcctgtagtcccagccactcgggaggctgaggcaggagaattgcttgaacccggacggcggaggttgcagtgagccgagaccacaccactgcactccggcctaggggacagagtgagactcggtctcaaaaaacaaacaaaaaaagacttctgagtctctggtctgagcaactggaaaaatagagttgccagaagagagatggggcagtttacgggttcacaggaagattatgagctcattttggatagaggcattcaaatgcagctgtcaggtaggcagttttttaagagcaacctaaactggagatacaaatttgggtcatcagcttacaaacagcatttaatgccatgagactaaaaaatgatgatggataaaaatgagactcagtctaaaatcttccaatatttacaggtgggggagataaggagtagccaggaaaaagaaaatagtgataaaggaagagccaaaaaggtaagagaaaaaaaacaggagaaatacttttcttcaaagtgtctcaagaaatgattgtgttaagtgctgatgggttaaaatcatcaagtcctattgcttctagtttcaaaaatatatcctgatggttcccatttactccatctctatcattaaagtctcttctgtgaactactcccaccccctccccaggaaactattctctatatagaaagcaacaacatcttttaaaaatataaatcagggccaggcatggtggcttatgcctgtaatcttagcactctgggaggacaaggcgaacagatggcttgagcccaggagttcaagaccggcctggacaacatagggacacccctgtatcagtttaaaatttttttaaattacatatcaaaatgaaaaaatatatacaaatcatgtcaatatcctatttatcttttaactgtcttctactgcacctagaataaaatctaaactccttcctttggcccacaagtcctttatgatgtggtccatgcctacctttctacttcattcttcccatgttactcctctcattcctttctatctacattcactttgttcttatgcaataactctgttcctaaaacatatcagtctcattcactgccttggcaacccaactcctagacctacaatacactccctcggctcttcatctgcctggcttctcaacattcagtctcacatctcaaatatctgcttagagaccctgcctgattattgtatcaaaacctaaaattatcccgtttatcttttaaattgtatattgtccttctcaccctaaattataaattcctcaaggacagaaaatgttaaatatatattacagcatttaaaacttatatacatataagacttcaatgactatttcacaaaataccagtcctttaaaaccaaaggaatattaccaggacattggtttaaccttttacccaaaacaggcatcatttctgtaacatgcctgcctggagtcatcattccagaacatcttgaaaatgtccagtgatggcaaactcagcacctcatgaagcagctcatttcatcttgggaaagcaatatttgtttgaaaagtcttctttatattgaatcaaacctctttccatgtaatttccacccactgccctttggagttatgccaagtaagtctaatctcacttgcatacacagacctttgtttagaagacagctgtatacacaccctacatcttctcttttacaggacaaatattaccatttatttcaatgagtctccatttggtatggttttccaatctcatcctttccatgctagtctggtaattcctaacttaagaacttccatctcaaaatatgctcagaagtttattgagttccccttacccttgcaatttgctctgaatagcatagagttggcagagtttagtctatccatacatcagactattatttataaaagcatagtgactattctgatggttctgacagaaagcttaattaggctgggagcggtggctcacacctgtaatcccagcactttgggaggccaaggtgggcggatcacgaggtcaggagtttgagaccagcctggccaatatggtgaaaccctgtctctaccaaaaatacaaaaattagccgggcatggtggcaggcacctgtaatcccagctactcaggaggctgaggcaggagaatcacttaaacccgggaggcagaagttgcagtgagctgaggtcgcaccactgcatgccagccggggcatcagagcaagactccatctccaaaaaaaaaaaaaagaaagcttaattaattaaaatctccaatactttcatagacactattgtgaacccaagggtcttctactctgtagatacgaaaatatttttcttatagctagatgaaatattttaaatctattcctgttaaatatatttttgttatttttagtataaagttccacactattttaatatttgaatccctaccctgtacttcaacatactaaagattcctccaaattttacaccatctacacatttgttaagtatgcctcctatgacaacatccagattaatagaaatatttccataaacatatcaaacactgagtcctacagcataacagcatcacattcagagaccttttttttctggttgatattaatattatatgtggtccaatgagctatctgtactccctaacagcctcttcttatcttcaaaaatgtcttgaaagacatttctaaaatcaagttgctctgtgataatagcattttactgctttttattcccttcattttatatgtatgtatgtcatttcatatatatctatatcattaaatataaattatgtacatcaatttgattcttacagataactaccaacacagcatgtgataagtgtcaatatcattattactcctaaaataagattgtatataaatatattctcatgtttataaaagtatcacctaacacaaattgatataaattttgttctaagacagtctggatatctttgcaaaagaatgctaagaatgagaaatcagcataatcaaaccaatgttttcacatatatgcaacagctagaaaaaacattatgccaagtaatacgttaattcagaggcttcggaaaatttaaaataaattcaatattatccatatagcttaacgttctcatataaaatctgtactgtcactacaatggttttaactgaatgatgcatatttagcaaaatgagtattttttaatattacattggccaaattaaccggaaacagtatctttagtaacaagggcatttttggcatctgaagactaatcctataggttgaaggtatagtcaaaagcattctttattacaaaaaaaaactatcatgtgacaaatatttttgaccaactgtgtctgcatcactgctttctcagctattgcacacaactaaatagcactcacatgcaaagtaacttacaaattattttatatttctttccctatttaaatggtttttatgaggaaactcattggttttttctaactttttaacctcatttgagaaaactaggagaacttttgctgggatatagacagttatgtgaagtcaactgctactggggaaaaataccaaatttctacttgttcaacacaaaaatttttgcttcttaggaggaaagggaagatgaaagaccgacttcaagaactaaagcagagaacaaaggaaattgaactctctagagacagtcatgtatcaactacagaaacagaggaacaaggggtgtttctacagcaagctgttatttatgaaagagagcctgtagctgagagacacctacatgaaatccaaaaactacaggaaagtattaacaatttggcagataatgttcaaaaatttgggcagcaacagaaaagtctggtggcttcaatgagaaggtttagtctacttaagagagagtctaccattacaaaggagataaaaattcaggcagaatacatcaacagaagtttgaatgatttagttaaagaagttaaaaagtcagaggttgaaaatggtccatcttcagtggtcacaaggatacttaaatctcagcatgctgcaatgttccgccattttcagcaaatcatgtttatatacaatgacacaatagcagcaaagcaagagaagtgcaagacatttattttacgtcagcttgaagttgctggaaaagagatgtctgaagaagatgtaaatgatatgcttcatcaaggaaaatgggaagtttttaatgaaagcttacttacagaaatcaatatcactaaagcacaactttcagagattgaacagagacacaaggaacttgttaatttggagaaccaaataaaggatttaagggatcttttcattcagatatctcttttagtagaggaacaaggagagagcatcaacaatattgaaatgacagtgaatagtacaaaagagtatgttaacaatactaaagagaaatttggactagctgtaaaatacaaaaaaagaaatccttgcagagtactgtgttgttggtgctgtccatgctgtagctcaaaataaagaagctattttaaaa

SEQ ID NO: 680 - DNA, 14646 bp, Homo sapiens
atcattcggccctcagactgggctgggcaggtctgagagttagggaaagtccgttcccactgccctcggggagagaagaaaggagggggcaagggagaagctgctggtcggactcacaatgaaaacgctccttcttttgctgctggtgctcctggagctgggagaggcccaaggatcccttcacaggtgagaagacgtccccgcactgtgttcagctgggtagtcccatgccctgcaactcagggctgctctggggtaggaaagctgatggggaggtgaagaggaggagaagctgagggcttgcgtcaatgcatggaagagactcatccagtgaccgcctgtgtatggccttaatctccagtcctcaacaagtcatcctcctgcctccacctccacggaggtgccttcccaagtcccaggggtcttcttgtgttgcaaaagagcaggaacctgcagttgtggtttgtagctcaaagcgccccaggacttccccaggggactgaccatcactgtccccaagagtttttctgtccctttaaatcagcccttcgtgatgttcatgtaaaactgtagaccgccccacatctcccattttcctagatctcaaagacctcagctccaggaggggagccatttccactctaagattctaagactctatagggcagagatgaggccgggcaggctgagtggcagagaggacgctgatcccacctgtatcctgcgtgctgtcttgcagatccccccctcccaccccatcttctctagttggcccctgagaaaatgggacgagaatggggggaagagggaggcagaagtacatctcctgcttacatgggggtttgtctccagggtgcccctcaggaggcatccgtccctcaagaagaagctgcgggcacggagccagctctctgagttctggaaatcccataatttggacatgatccagttcaccgagtcctgctcaatggaccagagtgccaaggaacccctcatcaactacttggatgtgaggcctcctggggtcagggctggggagaggtgggagcgggaggaaggcccagcattagggcatggccagtgccacatcagtagcaccgaaggccattgtggatttcttcacttggatgatgatccatggggactgattccctgggtccccatggagttggctaagcaggcccccatgtacccaaatgtcagagttctctgcagaaggaaagggctgggagtgaaagcatcatcccacactgaaggcccctgcttctgctctcagctgggcagcttactggctgtgtacccttaggcaagttacttaacctctcccagccccagttccctggtctgtaaaacagatggttcttcctccactgcctctcctacaatgtatttataagaatcaggttagtgcaagtaaaatcaaatgaagtagccagaggcttggtttgatttcctccttcatggccatttctctgctccttttaccttttattttccagcgttgccacttcctaggctctgtaaactccagtctgtattaccccaggctctggcccctgggagctttcccctggcttcctggtgagcacccttgtccctccccaccacccacaccctctttccttctcactcttccttgcagatggaatacttcggcactatctccattggctccccaccacagaacttcactgtcatcttcgacactggctcctccaacctctgggtcccctctgtgtactgcactagcccagcctgcagtaagtggggccaggagcaccagcagagaatgtctgggggctagtcctgggaggccaagcctggtactctggggaaggggggcttaggttccagaaactggccatccctgccacaccagcttccactctccatctttgagtcagccgtggaactgcttatagcagagatagagcaaagccaaggaagaactaaaatgtggctgctgtccaagagagtaactttcatactgatcagaattaatagaaagaaagccattgaaaagagaaatctttgacataatgactcacttcctttggaacacccaaaggaatgtaggggaagtttaatttaattggttatttctgagcagggaggtgagtcgggttctagtgtagatagtctgcttgtttcaaggaggcttggtagccttatctcctggtgcacacaggtggggctggtggggcacaatggcatgggtgggtccatttgtccagaggtaactcagaagtttcagtgaggattggaaaagaagagctacagaaagatgtcttgttcgatacaggacaagtcccagagacagaatgtctctggaaaccccaaggctagagatgtccatcggttgggagaaaagttgggagtaatttcctggggcaattgtttatccctgagtttcttttgaagccaacctctgacccacaatgggtggcagggactgtggctggcgcctgataaatgacacttatcttggtgtgcctcatgaggtcattgtggacaatcaggtttgctcagggatagctatttggtccccagttaggccacatctgtagctagagggaaatgtagttgttcattagggaggggcatcaccaggcttctaggggcccccactcagtgttgagagctgagggaagagaccctgccgctgtggggctgggtggcattagggcagggatgcagccagtgagccgatggcataagcaagagcagtgcacttctttccagagacgcacagcaggttccagccttcccagtccagcacatacagccagccaggtcaatctttctccattcagtatggaaccgggagcttgtccgggatcattggagccgaccaagtctctgtgagtgcaagtccttcattttttctctcttggacagaaacttgggagacttattcagaggtcttacatttcaaatctgcctcaggaatgggtggaaacaggggttagcactaacttctaggagaaagggcaagcaacactccccacctgagatggtggcagtgggtcagtctccacagcacgctgggccctgggggagagcagcacagggggactctggcaggaagcagtgcccagtgcacaaagcctggtggcagggtgcacagctggatctccagtctctagggcattgaggagataaaaccacgtctccgtcttgaaggataaagaagtccacaccagggggagagatttggactcagtaacataagggggcaaggtctgaaatgggagtccaatcacagaggcaaggcagaagcccagttgtccaaaggccaaggtccaaactgaactcagtgctgagctcatgagctgttcctcaaactccctctgacctctgaccctctgactccctctgaagtcctatgggtcctagaactatgggaatcagacaaatgtggggacagagagccaggtactttttcaggcttatagacagcaatatatgcctgggccttgggagaaagagaggttgacctactcctggtgaacgttggtccctggggtattcccgaggccagcagggcacagccttcatcaacatcccttagagtgggtggagtaggacatattatcaactgaaagaatgccagaagcagaaaaacaccatctatgtaaaaatatcatacagataaaacaatgtactgtattttctattggaactatgtatgcgtgtgtatacacacattacatatataatatataatatataatatccatatatgaatatatgtaatatacagtatatttgtatatataatatatatccatctgtatatattatatagatacaatatgtaacatattaaagtatataataattgcataattatatcatataatacatgttatatattatataattaatataatatgtaatacattacattaatatatgttatataatatataatatattatagaatataattgatataatgtattatattaataatatagtatgtgttatataatatattaatatgttgtatgtaataatatattacataatatattatgttaatctattatataatagattaacctattatataatagattaacataatatattacataatatgttaatctattatataatagattaacacaatatatatgtaatgtgtatatattatgttatatataagattctatatatattatgacatatacatatatattatatatctaattacatataatatatatataaaagttaaaatgactattttgaaggctacatccctaactgatcatcacagtaacctctgagatgcagggaagggactgaaattagcatagaaaggggaattcaagcctatagcttgtcacgtatctgttggctcacctggctggtgtagggcagcagccaagcccacagcaatgtcagctgcattgctccttccctcagtttttctggctccaggaccaggtgtgcacttacctctaacaaatcatcagcttttgctgcataacatccccatcattgaggctggagacttggggacagtgagagaacaatgtgggttccagtccaccctcaccctcatgggttccaactggccctttttctcccacttgacatctatcttccctttctgctgtgcaaactgtagactgctgctgcagcatcaggacagaaacagtatcctaaagtacactgtttaactagcacccacagttgcatataatcaatatctatatccacatcattatagctatatctataatctatagtacctcctaatggttctgcttctcttatcaaaccctgactgacataataaagatatgacatgtgaaaatttgtagatgaagctgatgcagcccttaaagggaccatttagcctaaaatgcatgcgttgttaatagaaatgctaatgatcaattatctaagctcctatttcaagaaatgaataacaagaaaatgagcaaaccgtaaacaaacaatagcaaatcaaacccaaagaaatcaaaaggaaggaaataataaagagtagaatgggacacaaatgaaatagagaaatcacacagtacagaaaattaacaaagccaagaatgaactctttgcaaagagtaataaaattggttagcctctcacatgactaaataagaaaaaagaaagaaaatacaacttaacaatgttagaaatgagaaagagaacattagtaaagttatcaagaataattttatattgataaattttacaattttcagaaaatcaacaaatgccttgagaaatacagcataccaaaactgatgcaaaaacaaaaaatagaaaatgtgaatcttttaaagatatactctgttattaaaaaatctttccacaaagaaaactccacgaagaaaagcctcactgataaattctctcaacactaaaaaaaatcagtctttcacaaactcttccagatatttgacaaagtaaaaacactttataactcattttatgaaaccagcataactttaataatgaaacttgaaaaggacattataacaaaagaaaatataaaattacagaccaatctcttctctcatgaatatagatgcaaaagttctaaatgaaatactagcaaataaaatcttttggtatataaaaagatcataccaagggtcatctttccaggaatttatcatttaacagaataaaaggagaaaaatcatatgaccaatatgattatattagtaggttaataacattcaatatctattcatgacttcaagaaaaactcttagcaaactaggagtagaaagtaactcccttaatctgataaaaatgaaggacttcatctaaaagaagcccacagcaaactttatacttaatggtgaattgtcgagagacttctccataagatcaagaatgagacaaggacactcaatctcaccacttctattcaacattgtactgaaaatcctagccagtgcaacaaggcaagaaaaaagaaataaagaacattaagatggaaaaggaagaaataactctgtcaatattaatgtatgacaagattccataagtagaaaatccaaaaatatctacagaaaggatattgggattaatatgtgaacttagcgaagttgctggatatgaggtcaacataaaaaaaatcatctggggccaggcacagtggctcacgcctgtaatcccagcactttgggaggccgaggcaggtggatcatgaggtcaggagtttgagaccagcctgaccaacatttctctactaaaaatacaaaaattagccaggcgtggtggcacacgcctgtagtcccagctactcaggaggctgaggcagaagaactgcttgaacccaggaggtggaggttgcagtgagccaagatcatgccatggcactccagcctgagtgacagagtgagactctgtctcaaaaaaaatcatttggatttatatatacaggttatggatccttatcccaaatgcttgggaccggaagccttttagatttcaaattttttcagattttgaaatatttgcattatacttaccagtttagtatcccaaatctgaaaatccataatctgtaatgctccaatgagcattttctttgagcctcatgttggcactcaaaaagttttggattttgaagcacttcagtttcagattttcagatttgtgatgctcaacctgtagcaagtaaaacaaatggcaaatagatttttaatgacactatttataatactatcaaaaccatcagctactttgatgtaaatttaacaaaaaatgtgcgagaactctactctgataatagcaaacattactaaataaaagtaaaagacttgcataaaaatcacaaacattaatgaataaaattaaaagaagacctgtattgaaaactaaaccatgctcatagattgaatgactctgtttcattaaaaagtcaaattttttcaaattggtctatacaaccaattttattccaatcaaaacaacagcattttttcttagacattagcaaactgattctaacatttatatggatatgtaatacaccaatacaatcttgctgaagaaaaacactggtaaatattaagatttattataaagttacagtaatgtagacgtgtggtgttggcacagaatttaaaaaataaacaaatgtaacagaacagaaaatacaaaactatcaacacagtcatctgacttgcgttgaacaagatactgcagtatgtggaggaaatgatggtatatttattaaatagtgccaggtcatatgaatatccagatagaaaaaaataaatcttaattcctaccttacacattatcacatttcatataggttccagatcgcaatgtgaaaagtaaacaataaagcttttagaagaaaacatgagaaaatgttttcatgaccttaaggtaggcaaaattttctgaaacaagttacaaaaaaacagtgtacaataagcacatgatgagtgacagaagccagataccaaagagttcatatgggatgattccatttatataaaatccaaaaaataggcaaaaccaatatatgttattagaagtcaggagactggctcttcttgaggaggggcgcaatgattggcaggtgcatgagggcttctgaggtttggaatgtcctgttttttgggaatatagcaagcatctttgtgctcatttagtcaaggaaagttgggaaggagaggcattagcttcaagacagaggaaaatccaggagtcaaaccctttgccagcaatcccctgtgccattctcctgttctcctgtgggctttctcctaccaggtggaaggactaaccgtggttggccagcagtttggagaaagtgtcacagagccaggccagacctttgtggatgcagagtttgatggaattctgggcctgggatacccctccttggctgtgggaggagtgactccagtatttgacaacatgatggctcagaacctggtggacttgccgatgttttctgtctacatgagcaggtaaggcccatcaagtctgtgaggttaaagtcagttataactacagggagacaacacatacacttgacttagcagtcaaaagacctggtttaggtagcttggtccattaccagctgtgtgatcttagtcaaaacatttaacctctctgaatattgaggaaatgggatttgcttcatcaagtagctgtaaaaacactttgtaaactctaccacactggcttaaatttaaggaatctctgggattggttcttcattgatgctgtcactaaatatcaagctcctattatatgctgattatgatgctcacactggggacccagtgaaacaagaaagacagtacctgcaggaggaggaggcagaaaaaaatgaaaagctgacaataaaataattgcatgctgatggatgaataaacaaaatgtggcatatccaaataatcaaatattattcagccttaaaaaggaagaaaattctgagacatgctacaacatagaagaaacttgaggacataatgctaagtgaaataagctagtcacaaaaagacaaatactgtatgattccacttaggtgaggtacctagactagtcaaattcataggcagaaagtagactgccagttgccagagcctggggaggggaagtgaggaattcttaaaccgttgttgatggcctaatgggtataaagttccagttctgtaaaatgaaaggtctggattttacaacagtgtgaacatacttaacactactgaattgtagactcaaaaatgggtaagatagtacattttatgtgacatatttttacaacaatttttaaaattgcacattgtttttggaaaaggtcatgaggctcacctgtttctaggcactcttgcccggcatccttggagggtcatctcctcttcctccttacacaggaaggtgatttctgaccttgctgactttttccagctcagacctggcctgcgttcacactgtttcagcataagcccattcctctcattcccctctcccacatggagggtcctggattttccctatcaagctatgtttcctctccagcatgacagcactcaggaccaggcctaggaagagctgtgagtaagagaggcaagttgtctagacacctctgcttccccttgcagaacttccttctcccgtcgcctgggaaaagtgggctgtaatggagaatatcaaggcttggcagtcagactggcctggatttgaatcctgccacttacattgcttcatctcactgaggctcagtttcttccacggaccactaggttgatgtgagttaaataagtttagacagataaaatccccactacacggccttgcaccaaggtaatcaacaaatgtgagttcctttccccactccctctgtaaaaccactgtcctaaaattcctacaggtattcactcctctccctctttaccaccctgatttcagttttgtatctttctgatccttttcctcctcaaaatgaatctgtcttaggtcctatttctccagagtcctgctaggttccagaacataatctgagaaatcaataccaatgaaaataagttttcaggctctagtaagtcatgatacattcatattagcctctttgccttaacataaggagtgaataacacaaaaacgccaggcactgtcacaaccatagtggggaagatactttgggaaaaggtgtctttgggggttgcttcaagccacacagtgtatacccacccaggatggtcctggccttggttctgaatgacagacctgctggccccatttcccacctccttaacctttttatccaagaagcagaaacacattcacaaatggtcaaggggagttgtttctaaccttgtgtcaaaaaggcccagaccaattcacttgcagtagtcagagtcccggtctcaaagcccagactgatgtttctgcctacctgtgtgcttggcatgagaccaagaagcaaagggtcctagctgaggctcacccctagagttttgcagtggcccttcctggacagtttgtctttctctccatgtagtaacccagaaggtggtgcggggagcgagctgatttttggaggctacgaccactcccatttctctgggagcctgaattgggtcccagtcaccaagcaagcttactggcagattgcactggataagtgagtattccccatgaagtagtgacagtactaggggtaaactgaaaagaggcacaactcaaaccgatttaactgaaaaaccactggtcactagcagaggatgccagaagcttactgtggttggaggtatggaggtgctgagcaagtgtgcaggaagggacctctgtaaccagggcagcagacacagcttccttccttgtacacatggcgtgcttttaactcaacatacagtcaataccagtgcacagcctgctcccctttgttcttttaacattaacacacaaggcaagggatgagtaacatggggggttgcacaggtgaattgggctcagatcttgtcctcaaaaaacttgtacagaagatgagatgcacccaaaccactatcctgtaaaatggaaggtggtcagtgctccaagagaggtgccaccaatgtggtccagcagacaggcatgaccgcttctatctgaatgctccagtgcatcatggagggggttacattgaaactgagccaggaaatatatacaatatctgggcacgaagcaattggggaagtgggactacatgcctgcctcatacctagcgccgtgctagacaatgcaggaattggaaaagtgtagttcaagtttcaattcagctaggattgagttcctgcaaggtaccaggcattaggaatgcaaaaaataaaaggcctcaatgctcactgtctattcagagtttttcaaactgtaggaattcacctatttatgggtcatgacatcattttagaagatcctgacctgaccaggtgtggtggctcacacctgtaatcccaggactttgggaggccgaggcaggtggatcacaaggtcaagagattgagacacctacattttttagacgaattggaatacagtagaaaataccagagtgcacttcaattgcatgaatgtgtgtgtgtgtgcactgggtcaagaagtaaacagatttcttcctatggatctcagtagaaaacaattgaggaacactcatatggtgggtggaaatcattgatgtgctccaggcatttgagaggccaaaaaagagtgggagtttcctaggagccgggggagggaaggtgggccgaccacaaccctgtcccctcagcatccaggtgggaggcactgttatgttctgctccgagggctgccaggccattgtggacacagggacttccctcatcactggcccttccgacaagattaagcagctgcaaaacgccattggggcagcccccgtggatggagaagtgagtgcctgcctgcgcaagggagtggtggggacaggagagccaggccttctcttgggaggtggcaaggctctaaacggatcctccgtattgggttttagtatgctgtggagtgtgccaaccttaacgtcatgccggatgtcaccttcaccattaacggagtcccctataccctcagcccaactgcctacaccctactggtaagaactgtttccttattctgcaggccacagggccctccccacatgcctgccacttccccttttcaatcgcctgcactttgcccgcctttaccctaagccccgccccacgttgttctgctctcatgtggcattccctctgggagggacacagctgcctgtggtggaaagaccacggggcttgctctaatttccagttctgccatgaagcagtagtgaacttcaggcaagccatttaaggaagtcttctgatattgccatgtagggcttttccactgacaaagtttaatctcctcaaccaccaggtcagactggagctattactatctcattttataggtgagaatatcaagactcagagagtcaaataaatggttcaagatatgagctgtttgcagggaggagtggagaataagattatatttgttctaacttcaaattaacattcctcctctagcaagaaaatgtcttttgttgcagtaaattctcaagtttgtagggtgaagtagaaagggaactcccagaccttttggacacctatgagcacctcacaccacagttggtctgaattttcagcattctaggtattcggcaccacacttcaacacactaatttttccaagagtcactcacagcatcagggtgactgcatcagaagaggggtgctaaggtatagactgagggcttcagccctacccctaagcctctattaactccttcccaaagccaccaacagacaatccaaataaaaacaaatgtttgctttaaaacacagcttcatggtaagtcccctaagctcctgccacatagggattatggagctgccactctgaacaccacactgaggaccagtgagacatttagactgagccctgttcatcagtccacatgcccatcaacaccccagcacacccacactctcaccttcccccacgtgagttgagtccctgcccaggtggaaatcactgatgtgctccaggcgctggagagcccaaaaaagagtgggagtttcctagaagccaggggaggggaggtgcgtggttctttcccggtatggtgagtggttcttttagaagatcattttagaagatcatgacctgaccgggcatggtgactcacacctgtaatcccaggactttgggaggccgaggcgggtggatcacaaggtcttgtgctggttctttcgcagtacagtgagtggttctttcccaccagcagatttcaatcagagccaccttgatccatcaaaactgctgtaaaaattttgacttttcacgtccttcctctcaagaagtctccctgagccctctgcaaattttcccacaccctcatcagcaacttcacatttcaaatcattgttggaaagaccacacttgcctggtagagcacgtctttgccaaactaaaaattagattggagaaggtgacactcttctcttgaacaaggaatgcctacttgcctcatctaaagggggtcactcaaatgtttgtttccagaacatcaacaagaaaatagcagtggatagccactaacacagttctttctctcccttaacaaaaactaagctgagcttcactagaaactaaagaaaccagaatttaaaccaaggtcttccggtgccaacccttttgctcttctagccatgcagcaagggtttcccagttgtaaaatgatggtgacaggggtaggtgggagtatataacagatgaacagttctcaaaattgtagaacatagaccccaggcccataagaatggacttgtgcagacaaacactttattaagcaacctagggtagggacatatgaagcaggaggaagaacccaccgaccaaaatggtggaacccaccagctgtccaaggccacccagtgccagccaccaccaccacacaggcagcctccaggcagtactactaccttcttcccccgtttgtcatttgcatccttctttccaacccacaggacttcgtggatggaatgcagttctgcagcagtggctttcaaggacttgacatccaccctccagctgggcccctctggatcctgggggatgtcttcattcgacagttttactcagtctttgaccgtgggaataaccgtgtgggactggccccagcagtcccctaaggaggggccttgtgtctgtgcctgcctgtctgacagaccttgaatatgttaggctggggcattctttacacctacaaaaagttattttccagagaatgtagctgtttccagggttgcaacttgaattaagaccaaacagaacatgagaatacacacacacacacacatatacacacacacacacttcacacatacacaccactcccaccaccgtcatgatggaggaattacgttatacattcatattttgtattgatttttgattatgaaaatcaaaaattttcacatttgattatgaaaatctccaaacatatgcacaagcagagatcatggtataataaatccctttgcaactccactcagccctgacaacccatccacacacggccaggcctgtttatctacactgctgcccactcctctctccagctccacatgctgtacctggatcattctgaagcaaattccgagcattacatcattttgtccataaatatttctaacatccttaaatatacaatcggaattcaagcatctcccattgtcccacaaatgtttggctgtttttgtagttggattgtttgtattaggattcaagcaaggcccatatattgcatttatttgaaatgtctgtaagtctctttccatctacagagtttagcacatttgaacgttgctggttgaaatcccgaggtgtcatttgacatggttctctgaacttatctttcctataaaatggtagttagatctggaggtctgattttgtggcaaaaatacttcctaggtggtgctgggtacttcttgttgcatcctgtcaggaggcagataatgctggtgcctctctattggtaatgttaagactgctgggtgggtttggagttcttggctttaatcattcattacaaagttcagcatttta

SEQ ID NO: 681 - DNA, 117021 bp, Homo sapiens
ctcgggcggctgggatggagcagaagagcgcggagcaccggagggcacgcagctgacggagctgcgctgcgttcgcctcgtttgcctcgcgccctccactggagctgttcgcgcctcccggctcccaccgcagcccacccggcagaggagtcgctaccagcgcccagtgcgctctgtcagtccgcaaactccttgccgcccgccccgggctgggcaccaaataccaggctaccatggtctacaagactctcttcgctctttgcatcttaactgcaggtaattggcgccatcctcccggaagggcaggtcgcggggtgggccccagtagctagcgcgtggtcggggctgaagctaggagatccggcagtgagtcgccgcgcgcctccgggtgagtgcgcaggtgtgtgcgcacttagatttggggtgacgtgcacctttggcggtcccgaaccgtactgagggaggggacgatggggtccttcctgccgcagcccgcgcccgcacaaactccagctttgtagaacaggtggctgtcttagctgcgtgttcgaacccagagtgggcaacacggactgcgcctcaaggcttctctttcttcaccagggtttcggagcgcactctgccaaagtacgggaccagacttcttgttgccgttgggccctggaagggatgaaaaagccggggaagtgggggtgggaggttcgcatctgggaaggcttcagcagcggctgcgcgcctggcggggctggtttgctttctcgagtcttggcggtctctgatctccggcgtcccttcctagttatgcttaggatgatgtggcactaacagcagcggcccggccttggtcaggctcgcaatcgtcactgggggtagcaaggctaccttctgccccagaactccccaaaaacgtatcccatagaagaaactattaacttggctaaactagcatcctctcccctccccctgcaccacctctgaaaggcttcgtaggagccactctcgggtttcgggaccacagacggcgacgacctctggcagcggggatggggaagaggggagccagatgactgagctcggcttggcggggaccggggagagattcagaaagacgctttgaatctagagttcaggtacctattttttccagaaaacgtctcccgaaaagggacaactggctgtggatatggtgctgctgggaaaagtagcccgactgcgcggccactggcattttcagtttaaatgtgacccaaagtcacatagcgcaaaccgattctactcgtgctttagtctgtatatcctccctctgagttcgtcgggttcctacagttgtggacacgagtcgtcgcaatcccttgaaaagaagctagcggttttcaggcagctcacagtgggtaatgcagttataaggaaaagtttcccaacttgaaactatagcgtattttctctacttagtgaacgtccgtctgagaaaacctctttctcgctggtatctcggcacggtttggagacgcgtccgcggacagttcccgaatactcgcaggcggctttggctgcccagcctcgggctgagatgagagagcctaggtccggcaggtgcaataggcagcggagctcccggctggctgcgggtggtaattcctgtaatcctcaaagcaggagatgcttacgtaatgacacggaaggtacctttacttctcctcactcaaaaatcttttcttgaggttcagaaacccttgagtgagtcagtagagaggttcgtttgcaaatttgatttagtggcttgtcttgtttatttaatcatttccttttttaaacagctctggcagttgtcaaaaccgggattaaccctaacaaacagtgtattgtagcttccccacccccaccccaagaagctcttttttcttttttttttttttcttttttcttttattcagcgttacagtttagctccgctattccgggaggaatatcacccttgacccaccgctagagcgaggagactggtgggccagggaccggctgagcaccactcctacccccacgcactaattaggatcagagcccagatggtcacagccttccagctgtgaggctcgagactcaggaagacatactgcctcatttccctagttatgcttcgatatgcatatcccaagctgaaaatgatgaagctaatggacactgcattccccctgaagtttgtgcctttgaaggaatctctttaagacgtcagtttgttgttagagctactttgcaataaatcgtccgaaaaaataatataaaaattggcataaatacctcatgagattctttgcaccttaattttaaggtgttttcagaatgtaaaatatcatttttaaagaaaaaaatagacgtgttggtaaagaagaaagggatgagggctcttgaagtgaaagtgcacacacatgtgttttgggggcttatcccagaactcccctagcaaatctctagttagtttcaccaggccttgtgtcttttctgtttccttctcattttcctcctctagccataggcttcaacaatatttctgtaaaattcttaaggtgatactttcttgagccaggaacagcattaggcaggggcctgttttttggctcaacaaatcctctcaaagtatacatagtatttcctccagcacatacaatggacacttgcaaatatgtgtgcgttgtcaacaagccaacaagggtagatctctacatgtattcactcgggtatatataaatatatttatatatttttagacaaagggtctagctctgtcacctagactggagtgcaatggcgcgattccagttccactgcaacctcggcctccccatcctctcatctcaacctcctgagtagctgggactacaggttcacaccaccataggcagctaaatttttttattttttgtagatatggggggtattcctatgctgcccaggttggtcttgaactcctgaacgtaagtgatcctcccaccttggtcatccaaagtactgggatgacagatgtgagccactgtgcccagcctcacttctatttctaaaaggagagagaaatcttagatggtcttcagttctctcaaggttgattatggtagaaaactagatgtctattctataaaccattttcaaacacttcttatgccaggataaggcatattggagtactgattccagattaaaatacaaaccagagcctccaacctttatccccaaaaccaagaagggaacgagaatggcaggcccctggtagcttccacatttatccctctcctgctcccctcgggattctcttcctttgttcttgccaccatggttgttacattcaagtgttttttttttgtttgtttttttgttttttttttgagatggagtctctctctgtctcccaggctggagtgcagtggcgcgatctcagctcactgcaagctccgcctcccgggttcacgccattctcctgcctcagcctcccgagtaactgggactacaggcgcccgccaccacacccgtctaattttttttgtatttttagtagagacggggtttcaccgtgttagctaggatggtctcgatctcctgacctcgtgatccaccagcctcggactcccaaagtgctaggattacaggtgtgagccaccgcgcccgggcacgttcaagttttttatggccctatttatttaaaaactccctcagtgaagtatgagatatgttagaactttcaaaggcattttctgaatactcaagaaggacaaaaaggaaggacactaggtaagagaggcacaaacctcatggtcctatttctaccgccctgggtctgctctgtttgcccctgtctcctctcaggaccttccacccattacccaggcaccctgcgcagacgtattggtcccttggtgattaagatgtagatcaccagagagctagattcccagtctgccactcagctagggatcctatttgtgttctggatctggtagatacctcttctccaggtaactaacatctaaaatgtccttatccttgaaggaagacttacttcaccctgcacatttatgactctgtacttgatatatgtcagcttagtagccttatcacacatatattaaaatacacaaaattgtgcacacacgtaaaggaacaggaaggctgatcatgatttgttgggggtggttgtgaagagtcacttgcattccttagcctgagaaactcctattcccctgaaatctgtggtcacagtcaaagatgtgacatttccttcacatgaaaactgacctgagaaggtggatgaacactctctgttgttatctgatgcatttacagaggcagtgtttcaagatgttaagtgcgtagattctgcagctagattgcctaggtaaaaatctaagttttactacttactaattatgtgattgaggacaagtacattaaccactctgcatttttttatctacaaaatttggagaataaaaaattggagttattgaaagtgttcaatacctgaatatacctataggtatacagtgctggagacatagcaaatgctcaataagtgttagctgttgttgttgctattatttttattaatgaagtgtactatatgctgcactaattaggtcatcctctccaaaagcagagtttatgtgtttgtacttgaactatgtaaatcaaagatctcaactaatattccagtgcagtgccagctgttccagcaaaccaatgtgcaaatgaagaaaatattctgagcctactaaatgcctaatttgaaaaggttaataatgtgccaactcagatttagtgcaagagtccaaaaaatgctcagtaacaaatagatgtaaagtctcaccaaggactttatttcttccatagaaacttttgcaaactggtgtgtttcaaaaactcaactcagctaaaccttaaaggtcaggtccccagagctacaaacttgagataattcagattaataacttaggaaaaaacaggtcattttgtctgaatgctccaaaacaatagcaataatcaataattgccgtatctctaatttaacttcagcatttgaccccagtcaaattgtgcttgtgttttcatgagaaaaatattggtcaaatattatactgtttaagcagactttcttaagcaataatttaccctaaggggattataacaccccaccggaagcaatggacagcaacattttttaagtgttttcaaaatgaatttgactgtcttaaatctaaatgaaggaatcctgcaataacagttacaacagtttgcttccatttggaagtatctatcactaaaattgggcacattagtttataaatcaaacttatttgtcttgttcataagatatcaaatgaagcagtttcttggaaaaattgatgttttatgtacaagacagtggtaattctgagaagaggtgggtagatagtgaatgtctgctttatccaatgtttgctttttgcctagaaatacagagctaataggttgtcatctagttaatctgcaagccgggcaactattcagtaagattgatttgtgtatatagttcatgacatttctttttttagttacagcttaaattatttaaatgatagggttgatgtaacattgtattttctgatgtgtgaatctttaaatgttcatcataatcctttacaccagcatggccaatttctttcacttgttttaacatggcttatagatgttgggaactttgccattgtgtaagtaatagaagtctttaaaatgaaatagacaattatagaatttgtctcatctgtgcttttcattggtgcaggatggtataatgtcaattgaaaatagtcttaattttcctttggctagtattgccaaatttagcaaataaaaacaaaggttgtccagtcaaatttgaatgtaaaataaacagtgaattctaagtacattctatgcaatatttgggacttacttagaccaaatctttctttgttgtttatcttaaattcagattcaactggttgtcttgttttttaactgccaaccatacttttggcctttcatctgcagttcatttatacagtgactttgatacaggattagctttattttgaagcctgcctcatggggctttagttaccctgcaccatttcattagaaataatctgttcatgggaaaacatggagatttaagagcagctctctgggttagcaactatagggattaggatttagaggcagcattcatgccaatgagatattttgattctgattatatatccattaactgtgtattcctgaacattgatgggatttctatagcctccctaaatgactttaaccccctttgactcttcctttatataaaaaagtatatttttaatggtagcaatgatcttgctataggggctgggactcgaagccttctgtactctttttttttaaaagaaagttatgattaaaactgaaagctttgaatttcagtgctgtcttttgtgccgggatcttgagaaatctcacaaatattaattatataaggtttgcataatccctgctggataagtctattggtattacttggaagctgtggctatatagagccttaagcaacatattatatagaattttaagacagatgtttaaaaaaatcctttgatcaattgaactgtggtggatatttgtaccttttatacctaaggcaaaaaatctgtgaataccttattgttaagtggaaaaaatattaagataaattaccaggtgtgatatttagaaaacatgtctattcaatacaaaataaggtgagtggtggaatacacctttgatgataacatcttccacttacattccaaattccaacatttgattttcttttcaatgaacaaggaaataaggacctgggaactttagtgcaggtgttaaacatgaaaggaattagatgagagagggttttgtttatctgtgtgttttttttgttttgttttgttttggccatggttttaaacttggagctaccattcagacttcctagaggttagaacaccttatatttcctaatacgaagttaacaaaatacatgttaccttttatgttgtgatatttttaccaggggtagtacacaagcgtaacttcattacttacagagtttattcacccactattgtatccataatggatagttattggtcctctatcctttatgacatggttttagttttgtaggaaaagcttttgtgatctgtcttagttcatccaggctgctataacaaaacaccataaacagggtggcttataaacaatatttatttcttacagttctagagattgggaagtccaagatcagggcatctgcaggttctgcgtctggagggggctgtctttctggttcactagctgtgtcttcctcatgtggtggaaggggtaaggcagccctctggggcctcttttataagacactatcctcatgatctaaccacttcctaaagaccccacctcctaataccatctttaccttggagattaggatttcaacatatgaatttttttcagaatgcaaatattgaaaccatagcacaatcccacagatagacaggagatagatacctcaactaactggtgttgaccattatttgattggtccatactgtaggaccactccatactataggactcttgctttgtactgtaattggactcttcaggaagaacagtaacaattattttaaagattaaagggtgtctgtttatttagtatgttagttacaatgcactgtctgtatgtatttagggcgatgtttaagatcccagtcattctattgagttaatgtaatgtgtcttattaggagaggatttcagtatatctcagaattacaacatgaggtgacctcactgccacttgttcaccagagggtcctaaagaaaatctggtggattgaagatgtctttcttggccttgaaaagaggcaagttattggtagatcacacactctacttatcatgggaattcttgctattaatgaacattgccgactgaaaggcaacatcaagacatatacttttaccacattcaactagtggggaaccctggatgttttatcttaaaaattacaatgttgatggaaatgacattcaggaggagagcccagatagtctcctttttggagacctattcagataggtcagagcacaagaaaaaatattcatcatttacatgctaggaaatgttgctgggggcaggaagtgtgatatcaaattacgtgcagaaatgtggtaagaaatgcacagtaggcagggacagtggctgtttcagaatttctgcaaaaattacggaggagaagctgggggcataaagtttcatgagtccaagaaaacatcaaatggctgaatcaggggagcaggaggaggattaaaattattttggagtactaaggctcaaaccaacgctagatgctactgctagatatgaaaaattcatttgatttcatttttagagcaataagggatacctcttcaaatttatatgaatatagtatttgttttagtgtgcctccttagttctgtggaaagttacaaagtgagcctttcagatgaaatgatgtgttagactttatggtgggtaattaaggtaacctcggcatcatgaaagggggtgaagaataagaaaatgccctgtgatgtaaagatgaaagcagctacatggtttggctcagttaaggagggcaaagtggtctggggttgcttacttccaggcagccttcctagaactgctcttcaaaaacaatctgattatgagaagactctcctttagaggttcatacgaagagaaccatagccctgatatttgtcagatgatgaagggatttgtgttattttacatgagaagcaatatggtgtgctaacagaggctttagagtaagatagaccagcaaggaataccaactctgtgctctcagtttccttccttgtagggttatgacaatatacctagagtgccatgggactaaacgttcaaccagtctctatcaagtatgtataccaacaggcaaaggatttattttattttacttcatttgctttctctgtctcccactacgagattgtaaggtgcgtgagaaaagaaatgttggtggtatttttttccactgttgtatccccagcacgtagaacagagcaagaaacatagtgtgtgctttataaattttcattcagttaatttttaattgagaatctacatgtgctaaacactgtccaaggctctggatatacattaatgagcaatgacaaaactctaccctcagggaatttacattctttgaggatgataaattttgacttagtcaaagggaagtcagtagttgaatatctaatagttatctcgaactcaacatatccaaaactgagctcctagactttcttcccctagggggcttatctaaagccttctccatatcaatgaatggaaatgccacctttctatttgctcagactgcaaatcatgagtcattcttgagtcctgtttttctcttaacactcctcatcccaaccttcaagaaagtctgtctgctctagttttaaaatatgtacagaatccaaccacgttttgccacctcagtttctcccactctggttcaagccactactgtctttctctaagagcactgctgtggcctcctctcagatctacttgctttcacccctcccctcttaggtctgttttctacatagcatagcaacagcgaattcattggaactatatcagtcactgctctgttcagagccctgtaatggctcctctttgttcttagagtaaaagccaaaatcttagagtgaccatcaagacctccgtgagctggggcctcgttggttcttgaatctgatcttctacactcttctttgctcactctgcaccagccacaggactaccagaagcacatagtagctaagtcctctgtctggagtatgctttctccagatacccatatgactaattccctcacttccttaaaacttttgtcaaatgtcaccttctcaatgagacttaccctgaccgacctcttaaaattgtagtctgttccacttgccaacaccatattcccagtgcctcttatctgactcttgcctctactttttctttaaagcatatcttcctccatccctccttacccctcactaaaacatagctctaggaggacagagattttgttcctcttgtttgctgtggtatcccactgtgttagaattctttgtgggcacatgagggtactaaaaatctatttgttaaattggatgattaaaatacatttctgagggctggcaaaatgaatacttaattcagattttgccttaaatgacccaaaagtgagacattggcaaacttgcttactatcaggtgcttatgtctagtgcttccaaaaagctgtaaaaaaaaaaaaatgagtcaggcctttagtcttcattgaggattacacaagctaaacttggaaaatcagctatttttgagctatacacatacaaaatttttcttcttaaaatgtaagctttatttggtgccatagacatcatttaaaaatagctaaaactttataaactccctggacaattaagaaaatgtcacctttgagctcagctagggaagataaagataccttcaccattcgagcatttttgagaattccaaataactaaaaataacctggtgatgaaaagtgatttgagtctaagggaagcactattgaaagttacccagttaagtctgagaaatttaagtaaattaagatgatgaatggtaaagttataagttagtcactaataagctcaagaacagaatgggcatttccttgaccttagagaccctgtgctaccttcttcggttgttctgaaatatgaattgtgttttatactaagcaatggatagaagggatgcagaagtcttgcctcaaataaaacctgcaccttagctgaggtgggggaaggaagcacttgtcatctacccagcagggctgacacctcttgatgtggctggtgttaaaatccccaaggttggcatatcccccagctacatcatgaaacaaatactcatggtgcacactggcttattcaaaataataatgtttaattatttttaggctgggaaaaataatatgagcttaaaaaataacatgcttgccttgcagccttagcaatcgtggtaaaatgtaagattatatcaacttgaagagcaacctataaacaaaccaaagaagaggatgacactttgtgtttatttaaaatatttgccttgcttgttccatgatgtccatttgtccattcttgagaagggcaggctctcagccatcttgacgtcagcagccttgactgtaaacagaggtgtggccccagagagtagctctgacctgtgctggaggcccagcagagagctgcgtctggtcttgtgcttgtggtgctggaggacaggtgaccatggccccacctcttctcccatgggagtcaccatgttctccgagtgaaatgaaaagcagggcctgatctctcaccggaaggaaaagaattgcacatcagcaagagtaggcaggctttcaatgcctcccatctcaaagacaagcgtggctgctcagcaagtgaaaacggttccatcactgagaatagagtttcagattggaggggtaacagaaaagaagaaagtgtggtttttgagattcagaaatttacagccaagattttggttaaaaaaaaattaatgtcataagaaacagctgtctcttgtttcaatgacggttttttaaagccacattacacagaaatagataagaatgtatctgtcacctacccatacctgattcaaagtcctgtttgtttgcttgtttggcttaaggactgtttttaataaaaataagttagaaacaatgtaaatgtctaacaataatgagctggtcagataaaccaacataaattcaacattcatactgggcaatattaggcaactgcttaaaataatgaaatggtccatgatgtactgacatacaaaaatgaatatattgacataatatattgtaactttatatttcacagtatgttggaaaggcaagctacaaaattaaatgtatgttgtgtgcgcctgtggagaaagggtttagaaggatacaatggtatctgatgagtgaacgttgggtcacttttactttctctccctctctctttcattgcctgaacttttaataaacagcttgtattccctttacaattttaaaagttgagatattatgaatattgttaatcactttttagcaacagataatgtggctatagtgactgctagatggctattttgatcttaaaaatcttgattcgaaattcattctgctacagccctcgaaaataagattttagagaagcaaataacctcaacaatgtttaccgggcatcactgatgtaatggttagagaaggttctgggaaggaattgacttaaacaaatattccattttctaaaaccagatgctgcataaatcattgatcaggataaccaccttgcatagtattttaaggcactctgtcctaactgatcagtatttaatatactttgttagttttttagatctcctctctttgtcacatatgggagcaatttcttaaaacattattctaagctcttctaaaatgaaagtggccaacacagatatcaaaaaagaaaaacagccctcagaagaatatacaatttatttttcttttggcaacattaaatttcttatataatcttttcaacaaaataatcaataaaatgtggtgtaggtaaatgctggaggatatgttattaatactctatgacattatcagaaagcagcacaggtgtgactggggagagggctggagcagaactgactgaaagttttaggggtgatctaggccaacctctcacattatagataaaactagatacttgggagtgtcgcatttttaaatttttagttttactaggtatcacacattgtgctacattcatttcatctgccacttcatctaatcctctcacactctagaaagtacgcagtactattcccattttgccgttcaggtcactgaggttcagaagtcaagtaatgagccacaaatcacacagtagataagtaacagaactggactagacgttgaacccaggtttctaattttttacccacctctgcccccattcccttgaactaccaaatcagttgctaaattctcttgcataaatgtagtctctagaatttttcccaactttgattctcttccccatccccacagccttggttgagagccttatcatctcttatcagtaactcctaaatggtcacccgttttcttcccacagtctcttgccagtcttgggacttatttaggccatgccaaattgcctgctctcttccaaaggaagaggataatcttataggtgctgagactatggtttgtaaattttacttctgctaaaaagaatgaaggctcctgggagtagtggctaattccgggtctgggttaggaaatacataagatgaatctggaatatcttgttagaccaggtagtaaacatattctcaaagaatactaggatcccatcaaaaggactcaaaaccacttaatgaggcaccaactggccaaagctgggacaatttgagcattgatgatgattataattgtaatagtttgaaacacattaaatacgtttaaactcgtaaattcacaataatgccaaaaacaaaacaataataatacaaaattcgttgaccttcattggagaatgctaataagcaacacattattttgaaaacataatagatgagtagaagaaaaatcaagttttttaattgatttatttatctaagcctgcgtttattttgtgaagtgtaccattgagtgaccaaatattagatgatgggataattttctctagggttattccagctaataaatgaagaaggcatggaaaaaatagaatatcaccatattgcattacctactgagttagtgggcttggatgctaatcatcagtggctgccaacaccgtggagtgtgatgcactcaggtactacatctcctaatggaagaatgcaccatatcctatgaagcagtcttgccaaattgaaagaaacctacatctgatcaagtttctaattccaacaatcaagtcacaggaaatacagaggactggggaagatgttaaataacactgtggggatgatatcagcaaactccagactatggaaaactctatgggaaaaataaccaggtttcttcaataaatgaattacaaggaaaaaaaaagagattgagagaaagattgacagaggtaggaggaatttataaactagaaagagacttaagagacatagcagccaatcacaattatgaactttatttggatcctgaatcaaaccaaaactgcaataataaatgatgacatttgtaagacgatggtgaattttaacactgactagatatatgatgacattaaggtattgttaatattttcaatatgataataatataacccttatgttttcaacaacccttatattttagagatacatactattttatttatagaagaaatgctatgatgcttagtatttacttcaaaataatatgggagtgggaatattataggaaaaatgactgtgagttaataattgctgaaactggctgaaaggaacatggggatgcattatactcttctctcctcctttgcagatgattatgtttttccattataagaagttttaaaatgagtcctctagacctcctagttgcttgcaaaacaagtccgcagtgtttagcaagtggcttgggatctgaactagagttagaacaaaaaaaggaggtgcctcttatcatggtgtgaaaggccagagaagcagagaggtcactcttgtttggaaagtcttccccaggaagactgctggacgctttcaggcctctctgcctttgctcatgccatttcctcattctagaatgccacactcctccattctctgccaaccaaaagtctcttcattttgcaggctcagatttttccctgtgttcttcacatgtcagccctactagtctttcagcttttagagaacagaggtcatgtcttagcttcatatcccttcctcccaggtatgagcacatacatggcaagtgctccatgcttgtcaaattgaactgcagaaactgaggctcaaaatgtggactccaaggtctcacagctagttagtgaaagaacttaactaaaaatctcatgtaaacgttagtcccctgacttcaggaactccaaagcctcttcaagcttgttcaccagcattcctttccttgagagttaagatttaaaggctttatgatctctgagagaagtaacacattaacttagagtagctgaaagttattatccattaccatgtactggcatgtagaaaagcacaggcaccaggtgagtggcctataagacaaatacatcttatagggaagagggaagtgggctggaagctgcaacaccacttggatcaggaatcgcacagtgagagtcatggtgaatgcactggacaccaaaaagacacagaggaaacacaggagagatgacagggtccaggagatccagttggccggtttcctgtgattacacatcagcaaatgaaatttgaaaaggcattataggccaggtgccttggctcatgcctgtaatcccagcattttgggaggccgaggcgggtggatcacgaggtcagaagttcgagaccagcctggccaacatagtgaaaccctgtttctactaaaaatacaaaaaattagccaggcatggtggcaggtgcctgtaatcccagctacttgggaggctgaggcagaagaatcgcttgaacccaggaggcggaggttgcagtgacccaagatcatgccactgcactccagcctcggcgacagagcgagactctgtctcaaaaaaaaacaaaaaacaaaaacaaacaaaagggcattgtaatcactttacagacaagcttgttatatttgggcaatcatcattacctgaacatccttatgaaataaaatttcactccagacaagtgaatgcaatagggattgtcttttaaaagatccacagttagttatccagtactagccacaggggagctttccataggaaggagaaaacccacgtttcctctgagaaaaaatgcatctatttgtttggttttgtacttagtaagaaatgggcatgagttatatctctgtataggtcagttttcttttttttgagatggagtcttgctctgtcacccagactggagtgcagtggcacgatctcggctcactgcaagctccgcctcccagtttcacgccatcctcctgcctcccaagtagctggtactacaggtgcccgccaccacgcctggctaattttttgtatttttagtagagatggggtttcaccatgttagccaggatggtctcgatctcctgaccttgtgatccacctgtctcagcctcccaaagtgctgggattacaggcgtgagccactgcgcccagcctataggtcagttttcttattttaatattgcagttcactgtttaacctttgaaatgtgttgttagaacatcacctaggcaaggccaataaacatgagttgtcatgtttgaaatgtgttatagaagagagcctagacaagacagtaaacatgagatggcaaacatgtcctgtggaaatgaaggtggcatcaaatagaggcacttccctatggctggcctcttactcttttttttttttttttcaacataatctgcttctgcaacagaaaaagagtgacaaagaaaggagttttgttttgctcttttggtttttatgtcaccaaaaagatactttttttcctttcatcttggaactctggaaatcttccctggtgatatcaaccaaaactagaggaatttagaaggaagtgtgccctcctgggtagaaagggaaatatgtcttctcagttgcccagaagcaaaggttatcagtaaataagtgtcctatccccaaactgctgtgagctatctacccccttgaactatgccaacttgccaagctttggataaatatagattagctattgtctgggtttcctgaggctgccataacaaattaccataaactcggaaagcttaaaacaacagaaacatattctccgacacttctggaaactggaagcctgaaatcaaggtttcagcaaagccatgcctcctctgaagctccaggggaggattcctccttgcttcttctagcttccagtggccccaggcattccttggcttggggctgcatcacttcaatctccacctctgtctcacatggccccctttcctctgagtcactctgtgtccaaacttccctcttacaaggacaccagtcatccagtcatattggattagggcccattttcatcttaacctgattatatctgcaaagagcttatttccaaacaaggtgacattcacacgtactagaggttgtggttcagcttatctttttggggaacatggttcaacttatagcagttatattaatttcacatctcaatcatgttcatgaaagactcctccccacagataaaataagttatgaacttaattgattataaattacttttattcaagatagcattcactatcacatcaagttttttttatttgtttccttatttatctacgtatttattgctcttgatgagactgtttaaatcaggtgtttctcaatctgtattttaggcatttggagggggattttttttttttttacatggagatggcatttctggttcctgaccactaaataccgatagcaccctgcaggcactgtgacaagcaggaacaaagaaaatcaggaaaaagaaaaggaacggaggaaaggatggagggaggaaatgccatcacacatttccaaaccatctgactctttgaaaccaacagtctaaattgatgggactttaatgttgctccttggagaccaacagagaatgggctgtgtggagcaatagcagccgttctggtaactcagccagcctgcggctgtcagaggtctctgggtaattccagagcattctgacttggacaaggatagtagcaggtatactatgttagagacaaatttcaaaggcaccatttcacttctcctctgccaggttcaatactctgttgtttacaacaccgtatcatttacatcaccacgcctgcagtaaagtcaggaagagtatagagagatagcaaaaagttgcaggagatgaaaatagcctcctgcactttttttagcattgctcattgcaatgtagaaatgatacttttcctttgtttgcatgcaagggaggacatgacccactttctatttttctttttattatacttttaagttctggggtacgtatgcagaacatgcaggtttgttacataggtatacatgtgccatggtggtttgctgcacccatcaacccgtcatcttcattaggtatttctcctaatgctgtccctcccctagcccccaaccccgcgacaggccccaaatgatgttcccctctctgtgtccatgtgttcttattgttcaactcccacttacgagtgagaatacgcggtgtttggttttctgttcctgtgttagtttgctgaggatgatgacttccagcttcctccaggtgcctgcaaaaggacatgaactcatcctgttttaaggctgcatagtattccatggtgtgtatgtgctacattttctttatccagtctatcatggatgagtatttggcttggttccaagtcttcgctattctgaatagtgctgcaataaacatacatgtgcatgtgtcattatagtagaatgatttataatccttttgatatatacccagtaatgggattgctgggtcaaatggtatttctggatctagatccttaaggaattgccatactgtcttccacaatagttgaactaatttatactcccaccaacagtgtaaaagcgttcctatttttccacatcctctccagcatctgttgtttactgattttttaatgattgccattctaactggcatgagatggtatctcactgtggttttgatttgcatttctctaatgaccagtaatgatgagctttttttcatatatttgttggcctcataaatgtcttcttttgagcagtgtctgttcatatactttgcccgctttttaatggggttgtttatttttttcttgtaaatttgattaagttccttgtagattctggatattagccctttgtcagatggatagattacaaacattttctcccattctgtaggttgcctgttcactctgatgatagtttcttttgctgtgcagaagctctttagtttatttatatcccattggtcaattttggcttttgttgccattgcttttggtgttttagccatgaagtctttgcccatgcctatgtcctgaatggtattgcctaggtttttatagttttaggtcttacgtttaagtctttaatccatcttgagctaatttttgtataaggtgtaaggaaggggtccagtttcagttttctgcatatggctagccagttttcctaacaacattaaaagtatcttcttctcagttctgtgtaagtattactggatatgagaacataagaagtcagatgaatctttcactgaaaaacatagaaaatgtgaccttgtaggacagtggttttctgttagccaatgtgaaaagtgtgtgtttatgtgtgtgcatatgtaaaatgtgaatatacatatatttgtgagtgatatatatgttttcctctttctttacctgcttccttccttactaaagtaattagaagtctttaaaagaaggagaccaaataacattgaaataatttcttaagagaaaattaacattcaatagattaatacattttctggagcatctaaaattcactttccctccccacaaaaggtaagatagtctatatattgaagagccataatcatatacatccatttcttctgattagtaactacaatatttattaagtaagcatggacgtttatttggctctgtagctacctatttcatgttcttttggaatcacagctttctttatatgtcataatgaaaatcaatatttgaaacttcttcctctggaaaaacatataatttcctttataggagatttaactacttaaatagttctgcttatgcaggtaagagaaatattctaagaaaaaatgagagatctgctgtataaagcctttattgatatgagttattatttaaggaataaaaaaaattaaagctctgatgctgcaaacaaagctccttgatgagaactgagttcatgctgagataaaaagttacaaagcaagagaacagcctcattatattttttaaaattccagagaaagtcattgttctgccaaagcaatgtggcaagacagcctgggacccaacatcggtgcccaggaggctaggagtaaagagctttagaagctttgaatctttttctaaaacaattaagattaaagaacttaatcaggaaatctgaggttatataaggggtgagcaggtcaaccagctcatatatctggtttggggcacatgctttggatgaccagacttttccatggaagattgtactttatgataattcttccagaatgaaagaactgacaagaaacattaaagtttgaaaagcgatccccaccaccaccgacatctgagaacatcctggcctctccagagacatctgactgagggaagcaggtgagccagcttgggctgcaaccccaggaagagaaagggaagtgggtcacgcctggtgaagtggcctatctctctcttggcaagtcaagctgactgatttggaggctacagactctaccttggctggcctggccacctcacaacctcctctccaaaggtgacatgtactacagcttaagacattacacggcacctgaagcaaaaactaaaagtagatatggaataaatcttctgaagctctaaggctcaatatccacagtaaattattattaagttactgagaagagaacattcactatttcagcaagagctacccaggaagaaccaaaagccttctgagatggtatatgaagggacaggaatttagggaatagacccaatttttcttttacttaatcagcgttgagtttttgggtttctaggagggcatagaaaacttgaactggagaagcaaggttcattggcatgtgccagttgatacttcactaagtctttactagtaaaaatgatgacatttatcttctttcttaagccatgtctattctgttccaactttaccaagaatgacagctaggatttgaaagtgtgcctatgttctttgctgaggacttactgcaaagtttctaacaacgtaaacttgacctgtgtttgactcataatgcccaacaaaaaaacactgctgttttgaaattatggacatagcaaagtatagattgaatcttgctgtacactcagtgattctacctgctcattttcttttcacttatgatgctgatggcccattctagcatcgtgcgcatcatgttcagaaaacaccaatcaatcctgcacctgtgggagagcaatttctgctggtttcaatgatagtggaaaagtaacaggtctcaaatcccatcagcaatgagaatgttggtcctcttcaccaaggctcctaaatgtagaaattatattgtttatgcattttcttgatcttatttttataaaaatgcatttttcttagcatcagacttcagcaacacttgatttttctttttgatgaggaatttgacagaacctaggcaattagctgggagctgtgtaaattcaggaaacctgattaacagatcataattcacctaagaatttaggcttaagccatggtggataaagtttccttctaaaagtgtttggcaatttggctttaaaaggagcactagattaattcagtctatgctttcttgccatatgacatcatttcaaaatataaattccatttatattattgaaaatgtataagatatgcataagtttattttgatttaacagggaggataaatgaaatgttctgctaataaacatattccaaataactaagcttactctatataatgtagactgcagattttgaaaaatgaaaaaaaaaaaactcattaaagctatatttagcagttgtggtaaggtcactgataagcttcatacctccagttgtcatctgttaaataagaggatgaaatgagatgatcattagtgtctgctcttctttatgatctgaaatggattcttaacctgaggcctatctaaacataaatgaaccacaaatgagcatcaggaagcccacaaaacacctgaaattgtatcaaacattatgtatatgtacttatttgcatttttttcttggatgatccaaagattttgtccaagacctgaactttgtgcccctagtaaggttaagaatatctaacattcattctgtgattaatttaactgttaagtgatgtagcctttctttcaaaattcataagcctcctcaggatatctagtactggctttagttttttgtggccgtagcttccaacacgtcgatcactcttgcatgaattcatctcaccctcagatcacccttgaaggcagacattgtcctctcaagttacagatgaagaaatggaggagcagaatgctcaggtatgtcagtaaacatagaagtcagttatagatgttttggcttcctggtctggtgctttttccattacagtccattatgtagagtatcataaaacttacattttaatgcacaaagctcagtattttggaagctacttatgtttgcaaaggtctccaaagtttagacctccaaaaaaaactaattcaaaagaaatcagactagtagcaagtatgaattttaatttaaaaatggaaaataccagctgaacatacagttcttcagtttctgctctctaaattctaattttaaaaatttatataacacaatgtgctttcttttacagagctttcaggtggaacacctggtagtcagctaatgtccccattatagagatgacaaaagtcaaaactcatagaattgaggtgacatgtacaaagtcagagagaaaagtgcagagttagaactcgatgctgatctcattactccaagtttgcactttttcattgtacccacagctgtctctgcagtgtccttagggcatcagggataggggaggggtgcatgggctgggaaatatgttgccaggtgagaccatttgtatagactcatgtgttggagagggaactgtctgcaaaataaatgccatagtaagataaactatattctttggagtctagacttggaagttttttctgaaagttcagaatctttctccatagcaagcaaaggacaaatatatctatgaccagcaagaaaacaactgagactgaaatcttccccagttgtaaatgcagcttacaacttttcacaagaacattttttgtgaacttgcatttcttttcttcccaggggaagacatggcctgattcaaaacagggggactgtgagagagatttagcacaagaaaggctattggtgttccctatgtcttattggcttttcgcaaattccctagaacctgaagcccagtatttactctataatcttttgccaatgttaaaccttttttctgagtaggtctatgactgatatttttatgatcaggctgtactgcaggcacattagaatgcactgggagatgcatgatttatatattttgattttgacttgtacaagatttacatctgggctaaatacataaaataatagagagtggtttgccagtataaaggaaagaatcattcaagttcagccaatctgattgtatcaccacagtggtggaggagcagctcagacaagttctcattacagatgtgccaagaacttgggtttggaggcccacctccctgcttttgaattacatctctgccatatagtgggcaagggaagagggaactcacatttattaaatctaataagatgccagccattgtgttaggcacttcacagacattttaatttcggctctatatcagccctggaaagttggtactactggtctcaatctccagatgagaaaacagagatttaatgaggtttaataatttgtccaaagccgcagagttactgacacccacatttgaactcaggtctttctgccaataaattcatgttctttctattattcagcacgtcttatctgggctttaatgtctccatctgtaaaataagatcagtaagcataccttttaggactgctggattacaagagattaatttacccagaacaatcctaattacaggaggtcttggatgaatagtatttctctccctacactttgttctggtaatagctctgattttgttgtttgatttatttgtttgctaacttgattgattagaggtttttgttctttttaaagatttgggcctacctcagctttttctaagatgcagaagcaaacagatgattcaatatagaggtgcctatatgacattagaagtcaaggagaaccagaataacattttcttcttctgtcatttgtctagagtagagagctgcaggcagggaattggggtggtgctgttctgtaccctgggagagtgtgtggggttgccaggtgtcttcttaactgtgcaccaagacctttgtgaacaattttaatattccttccttaagcagcttcagggagggattgaagctagacaacagccaagctgcaccttaataggcctgcagtattccaaatggcctctcattgcaggcaggtagcccagagtgctgcccatgcctggtgcatggtagggaatgtggacagaacttcatgagaattggtagggaatggcaatattttcttgcctgtaaatggcagactactcatagagaggcttgggaataactacttatctcagaaataatgattatttatttatttataccttgctccctgcctgaaggtggtggagctctctgcttacaggtaataaatagcatctaaaactgcgtgttccaagaataatggaaagcatctatataagccagagtggttgaaagggtgatgactcttaatcctaggaagatattttgatatttttattcagctaaccttgactcagcacgttccttgaactagggatatacaaaaataattaaggcacagccttcatctttaatgtactaacagtctggtggggggccatacatgtgtactgagactataaggcagcctagtaggctgtgtgctggaggtatgaatggagtatagcagaaacccaaagcagaccgggtaactattttacttgatgaagaagtaatatttgagttactttctaaaggataaataggaacttgccaagcaaagaaaatgaaaagctgggggtagaggagtactctgacaaagcatatacaaaggtccagtgtccacaagaaagaccgtgaggaatttatgaggctcgaccataagacagtaagaccagaggccaagcttggggccaaagtgaaatatctggtactctgagaaatgatagttaatgggattaagccctagcactgccatttctagaatgtggctctgaagaacttactaagtcaccctgaatcttgtttttctcatttgtaaaatgggcctaataacagttcctatctctgagagttatgaggattaagtcaaaatacccctttggacaattctagcacatggccatgctcaataaatgccaattctttgtagtatttttagtagcaatagtcaattttatgataaaatcaatagcactacataagaacataaataatgttcacattaggcttctcaagagtctttttaaagaaaaagatctagaatagggctatccaacacaaaactctctgtaatgatgaaaatgttttctgtcagtgttgtccaacttattagtcattatctgactgctatatcagactactgagcattcgaaatatggctagtgcaattgaggaactgaaattttcattttatttaatttaaatagccatgcatcttagtggctatcgtattagacactagagatctagatttataaaatcataaaatgttttatctgtgaaagatgttagaaattgatataaagctcttatcctcccccccatcactattttacaaatatctctcagagggaaattgatttgcacagggtcacataactaatgacagacctggtgctagaacctagcagctcttctggcatcctaagcaaagttcttattatcctgaagtctggttagattattatttccaccttagagagtgtctattgcaaatacatcgtgggttctgatgttccactcagccacctttcctcccctcaccatgcttatttctacttcttgttttaaataatataatatgcatgctgcatcaagtaaatcccaagtaatccataactcactgatagatattttagttcctgctcatgggaacgttttgtatcagcagcaactcatttagtacaaaattctcagcaccattattttcataactagtattttgttgtttttgttgttatactattattaatttttgttactttgcctaagtattaaacttgtatcaacaagaatattgatctttttatagcacttacaaaacataaattcagatttttcatcattaagaaaataggatgatcaaaccatttagcagagtcatcagttaagaaggattgatcagagcactatgggaatatggcagaataggaagtaccagtttccccatctaaacaacaattgcagttgcagaatctgtctggtctattttggaattctggaatccattagaatgattgtaacttacaggggaaggattggtaatagtaaattttggttaatttcagcttgcaacatggcagcagctacccattttccagccccatggcagacagttgtgcacgtttcatatgtaacttgcaggcagtttgtaggagccagggtgagcgaaaagaatcctacaaaaactggagatatatattctgattgctgattgctgtgtctaatctttgaggtgcacacatataggaggaagccattgttgcacccctttcttcacgttgcaagcccttctccctttgggtaaagcaagttccaaaagatctaaaggaccagtgcactttcatttaattttttcttctcctcctcctactttatttttctcttcttccccttttgggagacagacatttaaagtctaagacttctaaaaacaaccacatatatgggggcatttggaaagtcacgacatatgatcagggaaaggcagtcttaaaaactaaccgagaagaccttaagtttacatgttgggctgatcaccagcactgacacagcctacagcaattaaaaaacaaaagcaacaattagcataccctggggaaggggaagaatctgatttccaaaatcactatattattatattcaaaagtccagtattcaacaacaacaaaaatcacaagacacaaaaacataggaaagtatgtgtggcccattcaaagggaaaaataacccaatagaaacatacctaaaaaatacccagtggaagatctactgtacaaaaactttaaaacaattgtcttaaaggtgctcaaagacacagcactttgggaggccgaggcgggtggatcacaaggtcaggagattgagaccatcctggctaacatggtaaaaccccctctctactaaaaatacaaaaaaaaaaaaattagcggggtgtggtggcaggcccctgtagctggcaggctgaggcaggagaatggcgtgaacccgggaggcggagcttgcagtgagccaagattgcgccactgcactccagcctgggtgactgagcaagactccgtctcaaaaaaaaaaaaaagatgctcaaagaactgaaaagtgatgtggagaaagtcaaggaaacaatgtatgaacaaaacagaaagattaataaagagagaaaaagcctaaagcaaaaccaaaaggcaattctggagctgtgaagtataataactgaaataaaaagtttgccagtaagattcaaagacagctttgagcagactgaagaaggaatctgtgaacttgaagacaggacaatggaaattgtcaattctggagaaaacagaaaaaaatatcaaagaaaagtgagcagagtgtaaagaatctgtgggatatcatcaagcagacaaatatacacgtaatgaaagtctcggaaggagaagaaggaaagagaaaagggaagctagattattcaaagaaaaaatgactgaaaactttccaaatttaatgaaagacatgaatataaacattcaagaagctcaacaaactgtaactaaaatggactcaaagagacccacaccaaagcacattataatcagactgttgaaagccaaagacaaagagagaatcttgaaagcagcaagggagaagcaacttgtcacatataagggattctcaataagattatcagcatatttttcattctaaactttagaggccagaaagcagagggctgatatatacaaagtgctgaaagaaaacacacaaacaaagctgtcaaccaagaatcctatatctgtcaaaactgtctttcaaaagaggagaaattaagacatttcctgaaaaacaaaatctgagaaagtatgttaccactagacctgccctaaagaaatgctaaaagaagtccttttggttgaaatgaaagaacactaagcagtaatttgaagacatatgaataaataataaagatctcaataaaggtaaatacatgaacagttataaaatctggtaacttttacactttggtttgtaactccactttatgtattttatatgatttaagagactaatgcttatttttaaaactattatcagttttaaaatcagtcttattttaactttggtttttaattctacattttgttttctacattatttaagaaattaatgcataaaaatttgtttatacctttggacccacaatgtgtaaagatacagttctgtaatatcaataactaaaaagaggtgggagtggagctgtattggagcagagtttttgtatgttattgaagttaagatgtataaattcaaattagaatgtgataacattaggatgttaaatgtaataccataagaaccacaaagaaaatagttaaagaacatacagatacacagaaaaaggagaaaataattaatgcatttaactgcaaaaaaaatcaactaaacaggaagacagcaatgtaggaaatgaggaacaaaaaaagctataaggaatatagaatagaaataaaatgacagaagtaagtctcttcttatctgaaattattttaaatgtaaatggtttaaactgcccagtcaaaaaacagaatgagataatggattttataacaatgtgatccacctatatactatctaccagagacacttcagatctaaagacacaaataggttaaaagtgaaaacatggaaaaaagtatgccatgcaaacaagagagcaggggtgaataggtaggccagttagcaaaagaaaaatactgttttattccatttatttgaggcacctaaagtagtcaaattcatagaaacagaaagtagaatggtggctgctaagggttgggaagagaaagaatgaagagttattctttaatgggtgtagagtttcagttttgcaaaatgaagagttctggaaatggatggtggtgatggttgctcagaaatgtaaatatacttaatgccacagatctgtacacttaaaaacagttaacacatcttaaattgtaatccccacatgtcaaggctgggacaggtgaaggtaatcagatcatgggggcagtttcccccacactcttctcatataaatgagtgagtctcacaagatctgatggttttataagcgtctggcattttctctgctagcactcactccatcctgtcacgctgtgaagaaggtgcctgtttctcctttgccttctgctatgactgtaagttttctgaggcttccccagcaatgcggatctgtgagtcaatcaaacctctttcctttataaattacccagtctcagatatttcttcatagcagtgtgaaaatggactaatacaaatggtaaattttatcttacatggattttacttcaatttttaaaaatgtgttatttcttaaaaatgtatattaaacccaaaagaattcaacatacgattcaaacagatacttttaggtaatgttcttaacggcattattctcaatagccaaaatatagaaataacccatgtacatcagcagataaatagataaccaaatatggtatatacatgcagtgaaatattatttaatcatgaaagggaatatagttctgatccatgctgtaatatggatgaactttaaaaacattttgctgagtgaatgaaatcagacataaaaggtcgcatattataggatttcatttatatgaaatatctagaataggcaagtcaaagaaacagaaagtagattagtggttgccaggggctagggagaggaaagaaataggagtgattgcttaatggtacagagtttctgtttgggatgattgaaaagttttggaaatagatagtggcaatggttgaacgacattgtgaatgtaattaatgccacccaattaagctcttaaaaatggttaaaatggcaaattttgtaatatgtttacatattataaaatttacaaatctttctacgtgccaaaaaataaaaataaaaatgggataatcaggtgtagacaaagacaagatctttgcagcaatcattgtagttagttatccttgaactaaggcaaatgtgctaatgggactgttgtacctgatctacacaaatgtatctcttcccttctgcagagagaaatatcagtctttaactgcaaatgaccctcgctagggaatggtgcgtggtgtcagggagtttgagtggacactgaaagtttgctgcctcattctccttaagacatgggcatggttgtgtaggagcagggatggatagctaaggaagagagggacaagtcaattagcattatattcacagttcaaataatactcttcttttatgggaaggagctattaatacttagctcttgccctcctgagcgcttaccagtgagctctacctggagaacagcattcacaatcttaaacttggttttagcctggcctgcatgattgatgaggtcacattagtccccccacttcagacacactgtcacgttaagttcctagaacattcctgcaggccctgctttcagcattggtctgtacttttcctctttttagccagtttagctaatgcttactcaagtcttcagatcatttgcaaatattgctccctcagataagccttcgctgacctctactcttaaaaagtaaatcaactccttccacacctggcaaagcacacacacacacacacacacacacattgcatccttccttgatcttttgtttatgattctcttcacagcttttaatacacttcatttttattattatgtgtttaatatctatctcctccttagactataggttctatgagagtagaaaccctatccctagggtctaatctgttcctagacatttagtaggagcttagtaaatatctgttgaattaaaacataagtaaataaaagaaaaactctattaataggtagtgactagcaactaaacacaatgaataattttttgttaagtgagtaaatggaaaaattacctgtccttataagaaatctaggttagtttctatttctcttgaaagtttaggaatagacttgcctaaagaccaagagctagaaagagactgagactcaaacaactaaagtaaaataaaattagtaaatttgtgatactttgttaatatgactgttaagaaaagtccaatgtttaacacttgagcaaagtaagctcctcttcactcattccaccccctagattccaggaacaagacagtttgcttcaaccttccagttcatcatggatgaggggcattgttctgaagtcagttctcactgataaattgtggagtaaaaatgtttttaataacctttttttgtataaaggaagaaagttatttgagactgaaaaactgtttcttagttattaatactatcttcaggtgacttctgcgcagatagtcttcagaaggtcttttgctgaactagatgatggcatgcagatgcatagcaagaaaaagtggggatctggggtacagatgggctagagcaggtggattccggaaacttcctgggcaagtggaggatacaggtgctgtcattcctttgtaaaagggcaaaaacggatattagaggggattttcattaacttgtgctctgttatatgtgatgtaactttctcctcttttcctttccccaccttcccgtatgaaatctttagtaaagttcttcagtaaagccttgagaggtgggtttcacttttgaggtatgaagaatcctgctgtgaggttaatgagcaaaagttgccacatcaaaaagtcatctcaaaaacatgactgtgtgataagaagaatacttcgcttctatggtattcttttcaaaaaatcatggcccatctaatcatgggaaaagcatcggactaacccagactgggggacattctccccagtacctcaccagtgattctcaaaagtgtcaaggtgatgaaaacaaggaaaggctaagacatcattatataccagagtagactcagaaaacatgccaactgaatgcaatggagtacctagatgaaatcctggaacagaatgagggcattaattttaaaaactggtgaaattcaaataaagtctagattttagttaatagccatctaccaatgttggtttcttagttttgatgagtaagatgttaacaatgggaataagtgggtgagggagcacatagcaacttttctataaatctaaattcattccaaaataaatagtttatttaaaggtaaagcctcaaaactaaaatggtcaattttggctccttgctgaacttaagctccttgctaagcggacagtggttgtcgccaaagtgccttgacctttggctcctattaaacatagctatcatgtcaaaaaaaatgttttaatacgtcttaaaatggcaaggaagactttattcaggactattgcaatatgtgtcaagactattttaagaggggagagcgatcaggctcaactctaaatacaataaagacaaataaggatttataaccaatgagtagagtgagggggtgaatggatggcaaatcactgggaggagacatccagggtaaggggaagttgctaaaccaactgaagaggattcttgaaggcaagccaagaacttatacatcaaaagtgtgtggtcaggaacttgatcagatatcaagggtgggggaattctcaataaaattacttggcagaattcttgctgagactggactaggcaagcaacagacaggacaggggccaaggttgaggcctggtcaagaagagggcacaggggaacccagctgaaattcagtcaaggagagggtctttgtcattatcagtcacactgataccatctggttcgaatttgagtggtgactatactacccacattcacctcatagcttgacttgcatccagatgatttggttgtattgtcttggcctgggagcagattccacttaagatttcacattcaccatctagagtttggccattggcattacgggtgttgatgttatttgagccaatttcctcccaaattgattggtttgtggtcctggagacagtaagcttttgggatttggcatgtgattttacagatgatttggtacctggaatccaccaagccgttctttctcagagccaaagcccttgaaatatattgacctttccagtcaaaagatccttatccaggtgtaagaactgtaaaaactttacatgtaatgcaaacatgaattccatagatctgccaatttaggtatagaagataaactacagaaggactttattttcctctgggccagtccagcacattaattcacattaacatattcaggtaaggaaggctttgaaaaaattaataagctcagtctccactttgcgttatttattcttggtgcagaatgtacggttttatttgtttgtttgtttattttgtcatttgggtaattcctggagcagtatctctccatgtaaagtcaagtgacaaaatgagggcagccaggcaatttcaaacagaaccagttttgtttttttggcctgtattctgacctaaaataatccacacaataaccccatttcttcacctgactttggctctggagacaccttagagttgtgtctgcagagagacagattgcgtcatggagagcaccaaagcagaggccttgctggggtaaggcccttgaaggcttatagtggcacatcggctgggctagtgaaaacaagttcaaagttggttgggcttttttgttttgttttgtttcagttccaaaaaaaattttcataggcaaacgcattctgactcttccaactccataaatacattctgaaaagacatgaaagaaggtcacaaaatccaaccaaatacatgcctacctgtaaagtcttgttctgctgtcatttaacttgtggtttttccttggggaatcttttaatatagggagaaagtgaaaccatggttaaaatatttggcaaaatgtaaccattattaataagcaacacatagacggattgttagccaatacctcaatgctttgaggttacttaagtatcccaccagcacagtggtaaagtggcaaacacagaattctgttgccttagaagaagctgaccagaaaatataagtgtttcattatttctgaagtgtttgcaggttcctccccttttcattttccttcttgcaaaactttttaattctagcaccatctcttagccagcttttaaaataaaattaatatatgtttatgacttcatttcttttcaacagtttatgatatttaaggacaagccaaccacagtttatttatagaacttgatcctatttctgtttcttattttgtctcctggaaagcagaggaaagagctctaaatttgtcagagaaattagacattgaactttactttccccaacttctacaaataaacttgagcatttgtttcaagataagattaaaaaattatatcatttgaaaataagattactaaaacattaggtctagataattaaatctgtacaggtcaggaaatataaaagttgattattctgattttaagcattattgtttataaggatgctgtagtctctaataagacttcagcacttcctgaattctataccatttcaacttcaaatgagatttaaaatttttacatgtcacaccctggttatttgtcagtgtgcatggaagaagaaagaggaagggaaaataattctggaacttaattaattgtgaaaccagcctcagcccctggatgtggtcttgttgactgcagagataaggcagtttggggtcagttgtctattgtgctttcttttgccaatgatcgttctattcattcactcattcattgcattttttattcattcattcagaacaaatgaaagaacttttccttttggccatttacttctgttcccttttactcaaaggtagcaaaatacatgatgaaacttccttgaacagaattaaaacaagcctgagttttggaagatgtcaaaattaaattctagaaatacaggtaaatctgtaggatttttgggttccagtcattctgagaatagtggtgatttcccatatttaagaaatgttttgaaagacaggctttgaaagtaggctatgggctggtttgccagggtggtttatgttcaaaaatggaaataaccttctgacagagaaccagaatggactaaatacaagcacatggtaaaccaagttttggctgcttctctctccttgcaggtggatactgtgaaggtaggtgatggtgtgtatacagggcttctcctggcaatgagggagagggtgcggaagggcagccgacatcccctactctttctcacttacagaagtacccagagagagccaagctcatgggtcccttgtcgttgtgttgagggggcggctgtctaaggcccttttgtggctgtgttaagcagtttaaagagggtttgtaggcacttagagggaaagcatgaacccaaatttctattttaacatgtaagaagggacttaaatgccagaaaatatagtacagcactcagaatgttgtatcacccaagttgcagacaagcaaatctgaatgtagttaccactccattgtatccagtgctaggacatgtgtcttgccttccaaactcacccagtggtcctctgtagtcagaggaaggcagagagggcacacagcctcacatttcatgaggagagctaaagggcccatcttgctgtgaaaacagtcagtgttgcaagaggaatgatgcgtctggaggcatagctctgaggctgtctcctttcttcatcaggcaggggaggcagagaaaataaaagttaaaagactgagtagtgttgcaatgaaactaaatacctcgtgagaaggcaggtgtctttgttcctctcccaccatggacagctgggctgttccttctcttctgggtgctctcaacaccttactatcagctatcacccagcagataagaataaagtagccaaggagcaataggggttttgtttttcactgtttttgagattgtagaaattgatagcgcactgcactctcatcttgagatctgtgggctgagctcccagggttcttaacatgggccaagttagtctggatgcaaccttttgttattgtctaagtcactggcagatttaaaaatcacagcggttcacagccagatgaccagcctagggatgaaggcggggcagggggcggtcagtatctccactcacatgtcatctagtcacgatgcagaggttgaaacactgagttaaaggaagcttatcttcatatgaagaattagaggccacacctccctaagctaaatttagaagtgttagtatgtgaacaggaggtatacagtatctcaggtttcctggggcaccagccagataagacattccagataattctcttccatgcctaacttgtacctcaccagtcaggccagaggaggcactgcagaaggagctgtcctcttgtgtggctctgtccttcttttcaagtttgagggggttgtggaccatgtgaggctggacggctcacatgtcagccgccaggctcttagttacagacatggcaaacttccatcatttaagcagtggcacagatgttgtggagaaatcccagtgctctagctgtgtggcagagggaagggccaggtctgtgagaaaataaaattattctcagcctctctcccatattccagtaagtctagattgagtaaaacatctaatctaactgtgataaatagctattcaattgcctggcacatggattgcctgctttatagattttaccgagcatgtttcaaatccagagaccctctcttaccctggtaaatgtctacccaggctgcttccagcctgcctgcatgtgttcagggcagcaatttaatttttatgttatcataagctaaacctaatcaggaggcaaatgttctctgactaatttagctctgttttccagagcaagagataaataccttagagtgagaggcaatatagagttgtgggagccagcacaaaggaatcaggggcctagtatgagtcctggctctgctccttcttcactcagtgactttgagatagtttcctcactcctggattttaggtttctcattggaaatgaagctgcatgagcatagtggggaacaacaggagacctaaggactgagaagtgagcatttggaggcaagttgcttactatgtttcatcaagataccccttctaagacactgtattagtctgttctcacagggcaaataaagacatatccaagactgggtatttataaagaaaaagaggtttaatggactcacagttccacatggctagggaggcctcacaatcatggcagaaggcgaaggagcaaaggcatgtcctacatgatggtaagcaagagagtgtgtacaggggagctgccctttattaaaccatgagatcttgtgagatttattcactctcatgagaacagcacgggaaaaacctgaccctgtgattcaattacctctcacctggtccctctcacgacacatggggattatgggagttataattcaagatgagttttgagtggggatacagccaaatcatatcagatttttttttaagcttttgtttttgcttttaccactttaaaaatgagatgtgtttcacaatcaatggcatatcctattttattaacagcattttgtgtcactcttaagactacataaaataacaagtgtctgatagttgacactttttagatttgatgaaatacagtcatgtttttgtttctgagctgactttgtttatctgaaaataaagcatgagggtgaggcaagtcctcagatctccttcctctctgagattctgagtcttgctttgctgaattgcacactccatcacctacttgcactagtggggttaatgaggagctggcttaaccttttaataccttacctctgatcccaatcttttcccagcctagtctagactcttctttctagaagaaagttttcaaggtttctgagaagttcaaggtattgggacacattcttcctgcagcactgattagctggatggtgtctgctcctaccaaaaccagaggacatctttcacagccacaagcataataattttctgtgacacatattttattattcatatgtagctccttgaagttactggtagttagggtgtggctgtaagtctgcaaagatgagcaaggatattgacaacatgcacgccctgtctctgagcagggaaggggtaaaaacactgaaattcctgagaatgctcagtggagcagtgctgcccacatcaccttcccatgaaactacagggacagaaggagcatgagctgaaaacagggccacatggctctgggattgcctgagcatctgcaagattgtggtctactgttggggagccctgatttttgccctaaacattggatttgttttgtttttgcaatgcaaaaagaaaatacctgtgataatacttacctttcactcatattcattcacttagttttgaaaccgctttctgtttctttcagaatccctttatttggcactgagttatgtatttgtatgctttgtaacaataaaataacttcagaaagaagcacaaatctaagtcaacacgtttctgaaatctttacctttttaaacatctgcagatggatctgaatgttctcaaaattgtgtcttttagtgcagttcttcggtagtagtatatgagttttgacattctgctgtaaatagcttcttggaaccaagagttatatttgggagacttgtttcttacttagcatgcttatgaaaattcttccggtaaatacacaaagtagtacttcatgatttctttttccgatcagcagaaagtaacataagctcaatctgagcctagtaacagataagcctctacgttatttgggttattttattttaaatgttaagtcctttggtgtcatcttgctgatgcctcaatgtgtccaggcagtaaggggaaatgaagacttacactgtggggacaggaggcttgaggacatctgcaagctgatacagtgtagtggagaaggcaaggctttgcttttgagtagatgacagtaaaacattggctctgccccttatctaccatgtgatgtttagatctctgagcctcattgtcctcacttacacataatgagtcaatcacacctcacagtgttattctgaagattaaaaaaaataacaagaatggattttctaaaaccccatcacatgggaggtatttaaatttactcctctttcccatgtccacactgcctttaggacccttctttaacattttttggtttgaattttgatttttgattttgttcttcagtcaatgaagtataaaatctgaatattttcacagtggtacacattatgtgtaatataaacttaaaatagaaaaattagtgaaacctgtcatctaaagatactgtacagtacacatgaatatataaaaaaatttccaacaaatatgaacagacttttaaggtgtttaaaagaataaatgatctcagcatataaaatgcttttatttcccccataaagatctcagcaacttgaaaacaagaaactctccctcccaaccccccgcccccctcaccgcctccccagttatatatcacagtccagggatagagctagagacattcgtcttctggaggccactggagagtcaggtctcctcatctgcatctgagtcctggaaggcagtacaaattgaatacaaagtcctgtcctgaggtatccttcccaggaccctcttgcagcggcacaagcctaaagatggccataaagttaaatagaccattttttttaggtagataaaacccataatattcacactctgcagattctggctgtctcctctctcttgacccaagttcctgcagaggaacccaggccaccaccctcagattttaggacactgggatcctgtattggtcatgattagagaatcaaataataaaatatgttacatgtatgtgtgtgtgtgtgtgtctgtgtgtgggtgtagagagagagagagaaagaaagagagagagatttattgtaaagaattggctcggatgattacagtggctgggaagtaccaccatcttctgtctgcaagctggagactaaagaaagccagtggtgtaatttagttcaaatctgagggcctgagagccagggttgttgacggtgtgatttagtttaaggaccagagaagatgaggtgagatgtcccacattatgccatgaggcagaaaaagaagaggcaaatccctccttcctctgtgtgtgctctgttcaggctcgccacggattggatgatgcccacatactttgaggagggcaaactactttactgagtccatggattcaaatgctagttttatccagaaacaccctcacagagcttacccagaaataatgtttaatctgggcaccttttgtcccagtcaagttgacacaaagaattaaccatcatgggtccccaggtctccactgtcatagcagtgacaccctaggaggatgggccactgggagttgttaaatagctttcaagagaagacttgtccagtttttcagactcctgtatctatgtcaatataattcggctcattcaagctcaggaggcctggagacatataaggcttttattcccagcactagcctgtcagaagttttctattctctattatggtttgttaccatagaatgtggaggtgattgcagtcatagtagagaaaggtaaatatgtgaatgcacatgttattgtgacctcccaaactttggcctgagggggtgactttcaagggcagtgctatgaactgaattgtattcccttaaaattcagatattgaagcccttaagcttcaatgtgatggtatttggagataaggctttcagaagtaattaggtttagatgaggtcagaaggatggggctcttgtgatgggagtagtgcccttctaagaagaaacaccagagagcctgctctctgtctctctccatctcatgggagaacacaggcaaaaggtggtcattagcaacccaggaaagggcatctccccagaacctgaccttttgagaccctgatctcagacttctagcctccagaaatgtgggcaaaaaattttttgttgtttaagccacacagtctgtggcattttgttatggcagccaaagcaagtaatatgggcagcatcagacactgcatcagacatttgcacattccccctttcacctaacctttgaatgtcagtgcagtctctgcaaagctagaacaggtggactttggcatccagttttcgaaagattgcatcccctgttagatgtattacacattctaatgtatcactctttaaaaaaccaagcatctttagcctggctttagagttaaatgaactctagttagtcataacaagacactgcagttaatgagagttttgcttttcccaatcatgttagagtgcggtattatgtttctgtaaaacaaaacaaataataggatgtgaagctccacctagaagtagttcagttatttcagtttctttaattgactttgtgtgagtttttgagtagttgaaagacataactatggctgtgaatacaagggaaggcatattctttactaggttttggcatttgccagaaattttaccaaaacatgcacaccagagaagtttataaaatgcatgtatttcatgaacatgaagtcaaaggtatattttataaacatgtagtcacgtttgactacatttgttatattaattatattcacggggctaggagagacaagtaaattggtagttcaacaacttctgtgtaattatataatcaacctcacaatggcttgagtttaattttttaattgagtcttgcattattatagttgcaatatatagatattgtagaaaattagaacattgaagcaatagggaggagggggcaagatggctgactagaagcagctgctgtcagtggctctcatggagaagaatgaaaatggcaagtaaatcctacaccttcagcacaggtattcaggtttttctcattgggaccaactagacagttggtacaacacccagagagtgagaaaaagcaaggtggagccacagcccacctgagagccacataggttaaggggaattcctacccccaaccaagggaggtggtgagtgattgtgctacctcaccagggaaaccatgctttttctgtggatcaggagatccccctgtgagcctatgccatcagggccttggatcctgagcacagaatcatgtaaactcttggtggctgcttgagttgtagccagcggcagcagtctggagactccctaagatgaccaggttcctggggagaggggtgatgaccatcactgtggctccagtctgtcattctcccctgctggtgccagggaagctgggcagtttggactgggaggaattcccacagtgcagtacagcagctgtggcagataatggccagactgcttctttaggtgggacctgaatccattcctcctcacagggtggggcctccctgggaatttcagcaattctagccaggggtttacagacagaactctgaactctctgggatggagaccctgggaggaggggtggccacagtttccacagtttagtggactttgtctttcctgcctgcttgctctgaagaggctgggcagtccacatgaggaggacttcccccagtgcagggcacctgctctgccaaggggcagccagagtacattaagtgggtcactgatctggtgcctcctgactgggtgagacatgccaacaggggttgccagacaccttatacaggagtgttcctgctggcatcagatggctgcccttctgtgacagggttccaagaggaaggagcaaccagccatgtttgctgttctgcagtctccactgctgacacctccaggtgcgggagggacccaggtgaatagggtctggagtggacccccagaaaaccacagcagccttacagaagaggggccagactgttaaaagaaaaacaaacaaatataaagcaacaacaacaatattgacaagaagaccctacaaaaaccctatccaaaggtcatcagcctcaaagatcgaaggtagataaacccacaaaaatgggaaaaaatgaatgcaagaataccgaaaactcaaaaaccctgagtgcctcttctcctccaaattattgcaataccactccagtaagggaacagaactgggctgaggctgacatggatgaattgacagaagtaggcttcagaaggtgggtaataacaaactttactgagctaccagagcatgttctaacccaatgcaaacaagctaagaatcatgataaaacattatgggagctattaaccagaataaccagtttagagaggaacataaatgacctgatggagctgaaaaacactacacaaaaacttcacaatgcaaccacaagtatcaatagccaaatagaccaagtgtaagaaagaatctcagtgcttgaagactatcttctgaaacaagacaggcagacaagattagagaaaaaaagaataaaaaggaatgaacaaaacctctgataactatgggatgggattatgtaaaaaggctgaacctacaactaatgggggtatatgaaagagacaaggagaatggacccaagttggaaaacattcatcaggatatcattcagaaaaacttccctaacctagcaagacaggccaacattcaaatcctggaaattcagagaaccccagtaaaatactctatgagaaaaatcaactccaagacacataatcatcagattcttcaaagttgaaatgaaggaaaaaatgttaggggcagccagagagaaaggccaggtcacctacaaagggaaacccatcagactgacagcaaacctctcagtggaaaccctacaagcaaaaagagattgggggccaacatcaacattcttaaaggaaagaatttccaacccagaatttcatatcaggccaaactaagcttcataagtgaaggagaaataaaatcctcttcagacaaacaaatgttgagggaattagtcaccaccaggcttgccttgcaagagctcctgaaggaagcactaaatatggaaaggaaaaaccattaccagctactataaaaacacactgaggtatgcagaccaatgacaatatgaagcaactacattgacaagtctgcaaaataactggctagaatcatgatgacaggatcaaattcacacataacattattatccttaaatgtaaatgggctaaatgcccccaattaaaagacacagaatggcaagctggataaagagtcaagactcatcagtgtgctgtattcaagagacccatctcatgtgcaaagacccacataggctcaaaataaagcgatggaggaaaatttaccaagcacatggaagctgaaaaaatcaagggctacaagtgtagtttcagacaaaacagactttaaaccaacaaagataaaaaaatacaaagaaggtcataatggtaaagggttcaattcaacatgaagagctaactatcctaaatatatttgcacccaatacaggagcacccggatttataaaacaagtgcttagagacttacaaagagatttatactcccacacataatagtgggagagtttaacaccctactgtcattatgagatagatcatcaagatagaaaattaacaaagatattcaggacttgaactcagctctggatcaaatggagctaatagatatatacaaaactttccaccccaaaaataatggaatatacattcttctcagaattgcctgacactttactctaaaattgatcacatcattgatagtaaaacacttctcagcaaatgcaaaagaactgacatcataacagtctctcagaccacagcacaatcaaattagaactcaagattaagaaacttactcaaaaccacacaatttcatcaaaattgaacaacctgctcctgaatgactcctgggtaaataataaaattaaggcagaaatcaagaagttctttgaagctaatgagaatgaagagacaatgtaccagaatctttgggatgcagctaaagcagtgttaggagggaaatttatagcactaaatgctcatatcaaaaatatagaaacatctcaaatagacaccctaacatcacaatgaaaagaactagagaaccaagagcaaacaaccccaaaactaacagaaataagaaacaaccaagatcagagaggaacagaaggagatagagacgcacacacacacacaaaaaaaaaccttcgaaaaaatcaatgaatccaggagctgttcttttttaaaaaaaatattaaaatagaccactagctagactaataaagaagaacaagaatcaaataaacacaataaaaaatgataaaggggatatcgccactgacccaacagaaatacaaccatcagagaatactataaacacctctatgcaaacaaactagaaaatctagaagaaaaggataaattcctggacacatacaccctccccagactgagccagaaagaagttgaatccctgaatagaccaataaccagctgtgaaattgaggcagaaataaatagcctaccaaccaaaaaaagctcatgatcagacagattcatggctaaattgtaccagaggtacaaagaagggctagtaccatttctactgaaactataccaaaaaattgaaaaggagggacttctccctaactcattttatgaggccagcaccatcttgataccaaaaccaggcagagacacaacaacaacacaaaggaaaacttcaggccaacatccctgatgaacatcaatgcaaaaatcctcaataaaatactggcaaaccaaacccatctgcacatcaaaaagtttatctgctatgatcaagtcagcttcatccccaggatccaaggctggttcaacatacacaaatcgataaacgttaagtcatcgcataaagagaactaaagacaaaaaccacatgattatctcactagatggagaaaaagcctttgataaaattcaacatcccttcatgttaaaaactctcagtaaactagctattgtaagaacatacctcaaaataataagagccatttatgacaaacccacaaccaatatcatactaaatgggtaaaagctggaagcattccccttgaaaattggcacaagacaaaatgccttctctcaccacttctattcaacatagtgttggattttctggccagggcaatcaggcgagagaaagaaataaagtgtttcaaattggaagagaaaaagtcaaactgtctctgtttgcagagggcatgatcctatatctagaaaacctcatcatctccgccccaaagcttcttaagctgataagcaacttcagcaaagtctcagggtacaaaatcagtttgcaaaaatcacaagcattcctatacaccaataacacacaagcagaaagccaaatcatgaacgaacttctattcacaattgcttcaaagagaataaaatacctcggaatacagttaataagggaagtgaaggaccacttcaagcagaactacaaaccacttctcaaggaaattaggacacaaacaaatggaaaaacattatatgctcctggataggaagaatcagtgtcatgaaaatgaccatactgcccaaagtaatttatagattcaatgctattcccattaaactaccattgacatttttcacagaattataaaaaactattttaaaattcatatggaatcaaaaaatagcccgtatagccaagacaatcctaagcaaaaagaacaaagctggaggtatcacactacctgacttcaaactggtacaaggtgaaagtaaccaaaatggctggtaccaaaacagtactggtacaaaagcagacacatagaccaatggaacaaaatagagaactcagaaataagaccacacatctacaaccatctgatcttcaacaaacctgacaaaaacaagcaatgggggaaaagattccctatttaataaatggtgctgggaaaactagctagccatatgcagaaaattgaaacttccttatatcttatataaaaattaactcaagatggattagatttaaatgtaaaaccccaaactataaacaccttagaagaaagtctaggcaataccattcagaacataggcacaggcaaagatttccttatgaaaatgtcaaaagcaattgcaacaaaagcaaacattgaaaaatgagatctaattaaactaaagagcttctgcacagcaaaagaaactatcatcagaatgaacagacaacttacaggatgggagaacatttttgcaatctatccatctgacaaaggtctaatatccagaatctacaaggaacttaaacaaatttacaagaagaaaacaaacaacctcactaaaaagtgggcaaaggacatgagcatatacttctttaagacatttatgtggccaagaaacatatgtggccaagaaacatatgaaaaaaaaagctcaacatcactgatcattagagaaatgcaaatcaaaaccgcaatgagatacaatctcacgccattcagaatggcacttattaaaaggtcaagaaacgacagatgctggtgagactgggaagaaataggaatgcttttacactgttggtgggaatgtaaattagttcaaccattatggaagacaatgtagctattcctcaaacacctagaaccagggccaggcgtggtggctcatgcctgtaatcccagcactttgggagaccgaggcgagtggatcatgaggtcaggagttcaagaccagcctggccaagatggtgaaaccccgtctctactaaaactacaaaaattagctgggcacagtggaaggcgcctgtaatcccagctactcaggaggctgaggcagaagaatcgcttgaacctgggcagcagaggttgcagtgagccgaaatcgcgccactgcacaaataacagtctgagtgataaagtgagactcaatctccaaaaaaaaaaaaaaaaaaagacctagaaccagagatatcatttgacccagcaattccatcactggatatacattcaaaggaatataaatcattctgttataagatacccgcactcatatgttcattgcagcactactcacaatagcaaaggcatggcatcaacccaaatgcctgtcaatgatagactagataatgaaaatatggtacatatacatgatggaatactatgcacccataaaaaggaatgagatcatgtcctttgccgggacatagatggagctggaagccattattttctgcaaactaatgcaggaacagaaaaccaaacactgcatattctcacttataactgggagccgaacaatgtgaacacatagacacagggaggggaacaacacacactggggcctgtcagggtcgggggtgaaagaggagggagagcatcaggaaaaatagctaatacatgctgggcttaatacctaggtgatggcttggtatgtgcagcaaatcaccatggcacatgtttacttatgtaacaaacctgtacatcctgcacatgtaccccagaacttaaaataaataaaattaaaattaagaaaataaaaaataataaacacattcacataactttttttaaaaagaaaattcaagcaacaaacttttttagtagcaacttcctcttctcaccacccaaagatcaccactgttcttgagtatatctttaaaatgaagtcagtgaatcctaagattagggtttgagactgtgccaccattgttgaatgtgaatttactccaggggcagtgctctttatttccagggtaactttcagaaacagttccctctgggaacatattcagagaagttctttaaaagaaaacattctaaagcaatctccctagtgatatgcttgaattaagttgtcaccattccatgacacgtacagtttagtcctaattctttttatatgcaaaatcattatcactccttcagtcaatcagctcactattcagaggacagctctctggccccatgaagtacacttcctagtttcatgcatcttttcctacttttctgttaacactgcaacaggaaaaaaaagttgaatctctactgccttacctcaccactgacatcattttaaaaattgttccagggaccagatattgtcttgtatctatagtgacaactcagagtcttatactaagttagagggaaaattagaggaactgattacaattcatgaccaggacaggtcttacaagaagactctagagcattcatctgacccacccctcatgtactatgagagtcattgtatatctcagtaggtagtagattgttgtggctttggtcactgaatatggtctgggaataggtttttcagaaaactaaaatatctatccttttctggagagaatgtctgaaatcttaactcataactattttgagggggagatcttttaaatgtatgcttttctgactcaggagacaaaacagactgcatcattcttgcatctgtggatgactcaaggtcattgtcacagaacttcagtgatggagtgatgtcataggatgctggtacagtggatagcactaccagctatgaaacttcagtaggagtttctcctcctatctggaaagctggctattctggtcaccatgactggacctgatttatatcatccctgtcaatgcttctctctactgtagcttctgcagcccatggctctattccttcaacatcccctcctgctcccatgtacttttatccattacttttcctctcttcttagatttggccctggagaatttaccttcttaaccagaacaagtgcttggacagttttggacactcaattattattttaattccttctggcttccctttccaccccaccccttcaccttccagtttagcaatccttcaaaacttcttgttgtctttattctttgtatcattgatgtcttcttggctgttttttaaggtttatttttagagatggtggtctcgctacgttgccaggctggacttgaactcctgggctccagtgatcgattgcttgaaatatttctggagttcaagtctaacctggcaacatagcaagaccccatctgtaaaaattgcctcagccatccaagtagctggaactacaggtgtgtgccaccacatttggctttcttggctatttcttatcatctttttcctcagagggtgtctggaccattcagagttaaccaattagtgtgacttatctcctgtcctgtgaggagaaaccattctacagtcacctggaatcagtaaaggaaactgcatgctcctctgaattccacaccaaccacactctagttgaaaacagtggtctaaaaattgaaaagtgttctattatacaccaaacctgtacttcactaaatggtaacttaatgacctgaagcagggtttaacaacctttttcatgccttgacccacatagaaaatgataaatatttgcacagtgctctggaataaacagatgaaggtgaccatctgccctgaaggtggaggagttcaatatctacacacatacctgtaacctattcttggtaccatgtcgggaagcctgacataaggagttgtcctgtttccaaaggcacagaatttacttaaaggagtgagaatagctagtcactgtgcactatatgttttccaaaaggttctttatcattttcgaacgttatttggagtaccaggagggtttccttaggcttagagattaacaaaataaaaaagcattaagtgtaagaatagctaattttttttgaaatgtcattaacatagcgtagactgttttaagtgttttacatggatatcagagaagatgccagcctcctaggagctgaggtcaaatccagccttcagcctatttttgttcaacctgtgaattaaacatttttttatttttaaaagattgttaaagaaaagcacactaagaagaatatgcagtagagactatatgtggtcccaaagcttaaaacatttaccttctggccctttagagaaaaagtttgccaaccctcatcacagaggatggcagggagtgacaaagctccaaaaaagatccaaaggacatgagtaagcaatcaggaaggctggctttccacagccccatagattccaaaagtagacaatgagattcaatagatctgagcaagaccatttttatttacagcacggaaagcagcagaagcatcacatgatactgccagttcctctgccattacatcccacataacacaaagggcccaggtggcagctatgcgggcagttgtgctgcagctgaggaatctaggaccaagccctccataccttttacagcaagtaatgaacaagccagaatccttcccctgaggagttagtagtcatatggttgtctgtctgtgtcaccatgacctacttaattggctatgtgattagctacagaaatggctcagcatcataggacagctaggccttgcattttggcatactcagcaaggatgggtgcagatgctggggcccatggaagactgcctttcccaacagtgggtggtccatttcatccttatcacaatcctgagaagaagatgctactattatcccatttcacaagtgaagaaattgaggttcggtgaaagggaagtaacaaagcaacttgcttaaggtcataagcaacttgcccaaggtcaaaagtaacttgcccaatgttgcaaagctagtagacagtgagcagtgatttaaccctactctgtctgaatgcagggcccaaacaacatacaactgcctcattccatttggcaggaaattgagaaccacaaggaacagatttaaattatgtatctgagagaataattcattgtggttttttgtttgtttgtttttgttttgtttttgagatggagtcacactctgtcacccaggctggagtgcaatggcatggtctcggctcactgcaacctccacctcccaggttcaagtgattctccagcctcagcctcctgagtagctgggactacaggtgtgtgccaccacgcccggctaatttttatatttttagtagagacgaggtttcactatgttggccagactggtctcaaactcctgacctcgtgatccacctgccttggcctcctgaagtgctgggattacaggcatgagccactgcacccggccttagaataattcattgttttgttttcctcttttaatgataatgctgagagatggcattttgacaatgcatagagtctttggtgcataataattttaagatttatatatgttcagatactagtaaaagcttgctaaaatctttcctgattaaaaaaaaatggatttggctagattttacctttgccagttgttttaaaaagtttcctttgcagtacgaaaggcaaaacacacatttaattatctttctctagctaatgtttgaactgcctaattatactcaaagtgctaattacagatattacaaattgcaactcacaataaaatatttcttcatgacttaaccagtcccatcaattaaatgaagtcccagacatattcctccacaccctttgtgttactctctctacatttccacaaaccagtaactgatttgtatggatagtatagaaacaggtgcagagaggcattgtgcatatgtgtctatgtgtgaaaaactaacgcaaacagcagaagaggttgctgaaaacagcaatgagagcacatacacatgaagcttaatggcaatgctaagtccaacacaagggggtggaaatgaaggggtcggggctgttgcaggggactttggggttgcaggtaactgaaacatctgaaattgtttaagcaaaggaaaaaaatttcaatggaaaaaaatgaccttcctcataatatccatggcagaaagttcagacaagtcttagacaagatcaggaaacctcttgctaaggaagcccaccagctctctgtgatcacatggtccctcacacctgctctactactccagggtagtagaatgtcagtcaaaaattgggctctggagtcaggtcagacaactagattcacaccccggctgtgcactttcattaatctctctttgtgtcagtttctttgactgtaagcacttgagtttaattgagttctatgaacattaattgaaataggacctaatacatactaaatgttcaatattattagtgcttttctttcatatttgctttatccttttccatcatcaaattggcttccccttctttttatgcatgtgataagatgtcttcccaatttaatcattaattctaacggactacctagtgcctcagtcacaaatacagtttcctagaggaaagaatctggtccggcactggtaaggttctattcctggtccaatcagctgtggttggaggacaggatcacagggttcaggtgtgaccacagagacccatttctttgttagctgggggcatgagaagagacagagaacttccatagtacttttgaattcaatatagacattaatagttgttgatattgaatgttctactgtttataaatggtagaacatcttaatatataaggaaagatgcatgtaaatcaaaacctattctaaatggtatctaagaagatcatgaagtaaaattatttgtaaaaacttcttttaaatttgaaataacatactgaatatttattttgtatattaaaaattaaaatattcaaggtgtttgttaagacaggttatgtcaacgtcaagagatgaaattttgaagttttaaagtttgccatgcaatttgcttgatctccttttaaagaaactaaactcaacagatcctgtgttgtttgttgtattttcttatggttgatcaagaaggacagaattctgttctttttttgaaagagattaaaatcagatgtaaagaagcaagttggcacctacttcctctggggatactacatgatctttgttctcatttcagttattcaagacacaagcagatagatcatcagtgtccttctgattcttgattgtgttatttcatttattcagaaaaattaatttatgttcaatttcacatttactgtgtgtcatgtgaggccctgggctagtagccttgtgaatgagttcaggaggaatgaaatggactcttttcccttgaggacttcattatgggagagatggctgtgtatgtaggagatacatttacacagctatggtaggcatggctgtttatacaatgggcacctttatgcaactgttggagagatggctgtgtgtatagtggacacatttacacaactgtaggagaggtggccatgtacacagtggataatttgcacaactgtgggagatggccatgtgcacagtatacatatttacccagtggtggaagagatggttgtgtatacagtagacattttcacaactataggagaaacagttgtttatacaatggacacatttatgcaactgtaagagagatggccatgcatagagtagacacatttacataatggtgggagagatggcgcgtatcagtatacatatttatgctgctgtgtaaatatgggagagaagatgattagtgggagagataagagagacatgggaagatgaccataactcagtaaactctgtagcgtggaactttccacatcattggtgctcagttcttgttgaatgaataaactaactggtgcatcaggcaggatgataaaagtgttattggacaagcacaaaatgttataaaagtgtaaaagagagtcattcactcattaaataaacacttgtatgcctactatgtatcaggggctgttttaagcataactgtatggctattacttctggttagaaacttttagaaaatgacataaaggagttggcatgctagagttgatatgctagaccttaaagtcccaattcatagatttaaacaggcaaaatgggcctgagagaattctaagatcaaagttaagtttggctggagatggcagatgtaaggtgaagcacaatgattaagattacaaaggtagtataagccaaaaccactgaggaaagggcattttgtgctgaagggctagtttggacttagttttgtgcacagtaaagagttgctgaaactttagaagtcctataagcagtttgtctttgagggcgtccaaggatagagaggaaaaaaccaaagtatttttttcgtattctcttttacgtcttaatacaacacagcacctccagtcaccaaaatgtgtggggatttctccccattagcaaccaaccctccagcagataccagctgggtctcctctaattcaatttaattcttatactatctacctgaagatagtgtcagatcccacagcttaagggctcagtcccacaagactgcccctacttcagacagcaatcccaggaactaagttgctatttatacttctgacccactggctataaatcaagattcccatatcccctccttgtgttcaattaatttgctagagctgcccacagaatccaggaaaacacttacatttaccagcttatgttcaaggatattacaaaggatacagatgaacagccaaataaagagacgaatagggcaaggtatgtaggaagggatgtggagtttccatgccctctctggcagccaccctccagggacctccctgtgttcagctatcaggaaggtcctcaaacctgttccttttgagtttttatggatacttcattaggtaggcataattgattaaatcattggccactgatgatcaactccacctccagcccttctaccctctgtagaagttttagagtagggctgaaaatcccaaccctctaatcctgccttggtcttttggtaaccagtccccatcctgactgctatctagagttgccagccaccagtcatctcgtgagcacacaaaagacactattatcactctagagattcaaagtgttttaggagatgtatgtcagaaaatgggataaagaccaagtatatatatcacaatatcacagaggaattcacctagcaatgctgtgtggattgtattggtggcctcatcaggaatgaggccttgtagcaagggagtgatcatggaaatgtagaaaaaatatgaatatgagaaacactggaaggttagaaactgtaacatacaagagacatttccatgtaaaacttatggaactagaggacatatcaagtaatagtaagagactaaggcatcatagatgattcctgagcttcacagttacctgtttaggagatgaaaggcaccattaatgaaaataaggatcacaggggaaggatcagattggcagggaagatgcattttggatatactaggcttgaaatgagagcagagtatgcacatggaaatctgtagtacatccattgcacagggttattaattcaagcaagcaaggcctgggagcaactgcagtaggtccttgaaggactgactttcacctattagatagtaatctcatggatatcttcatctacaatatcaatgtttccagctggaaggaggaaaagttttgcagctgcaatgtaaatagggattagtgagctcctccaaaatactgttggcttcagcacaacacagagctggccagagatgaaacttagatatgcaggcacagtaccagaaacagcaaatggacttcaggctctgtctgtgatccaagagacgagaacttaggaccatccagggaaagtcttggaaagtcataattgctactggctgagttgggaagacaccaaaaatcccagcagagagtgggatgtgaggatcagaaaatagggagttggcaaaaataatgggtgtcaaccaagcatagtaaattaggataatcagactaattttgccagatggcaaaatttttcacttgagttcacctttaaaacactgtatttggcgcataaatgccagttggaggccctccagtgttataaagttgccagtcagtatttgacaaagataatagctgaagccatcagattggatgacatttcaaaggtgtactgtcatatttatggaatggtaagaggagctagatgtgaagaagacagagataagagaaagaccaaaaggatgcagtatttttgaagcaaaggaaacagacttcacagccaacttttccaagagaccaagtaaagagtaatatatattttcaacatgtgcatagcactgtattaggtgtaaaagaagtcagataacatgggttccgccctgcagaagcactttttcttgagcataaaggatatataaaaagtttgggggctaaattgtgtcacaggttattaaagcaaatgggaaatatttccacctctgaacatgatggagtaatggaaaccagattcaactttctaccttaaacaactaaacaaaaaataaatcacaaaatatatgaatcaatggttttccaatattggtcaataggcagtaatttctaacaagaagaacaaagtgagtcctacaattgcctcagcttgacacctagacagagtttccaggctagcgttgagggaaaaggaacctaggcagagccaggcaaacttcctgagttgagaggcacagttgagaatgttaaggtaggctaaagcacctaagattcctgaggcagagtaccagagatgcagagagagagagagctccagaacctgaagaggattcctttcaagtccaaagctgagtactgatgagcgcatacttatgtagaaacatcaccagaaagaaattaacagaacaattcctcacagtaattcaagactggaaataattcacgtttccagcagccagaggaaagaacccttgtaatacatggggcattaggttgagtgctcaaaagggtattgcataagtagaggggccaaattaatgaaagctgctgtggtccccacataacaaaacttaactgcaagctgagagaatcaaaatgtttctaagtaacttacacatgtcccagaacaaagttcaagaacagtaaaagtaatgcaaaaacaaaaaaacaatcccaggaactaagttgctatttatacttctgacccactggctataaatcaagattcccagacctgctccttgtgttcaattaatttgctagagctgcccacagaatccaggaaaacacttgcatttaccagcttatattcaaggatattacaaaggatacagatgaacagccaaataaagagatgaatagggcaaggtgtgtaggaagggatgtggagtttccattccctctctggcagccaccctccagggacctccccgtgttcagctatcaggaaggtcctcaaacctgttccttttgggtttttatggatacttcattaggtgggcataacatccagcagcatcgtcacaatgtctctcacctaataaaaaatgagtaaatttgaaggcaaagtaatagaacgttttcaaaataaaacgaagaaaataaaacaaaaaataaacaaaataacagagcagcaatgagttgttggacaacttctagaggcttagtacacatgtcctcaaagaaaggggcagtgcagaaaaaatatttgaagacctaacggcttacattttttcaaatttgatgaaaactataaatttagaaatccaagaaactcaacaaattcaaataaaagaaacatgaagaaaactgcatcaaggcacatcttaatgaaattttttaaggccaatggggcaggagaagtctttacatcagccagagggaaaataaaaccacaattagtatagagcaacaaagataaaaataacagcagagttctcaatggaaacagtgcaagtgagaagaaagtgaagaagcagctttaaagtactgaaagaaaacaaacattcaatttagaattctatacccagcaagaatatatttttaaaaacaaaggcaaagtctctttcagacatacacaatctgaaagaatgcagttatcagataagcaatgcaagaaattcttcaggtagaaggaaagtgacgccagatgaaaatctggatctaaacaaaggagtgaagtgctccagaaagtatctttttaaaataaaaataataatagtgtgttatgagcattataacatatatacaaataaaacaaagtagcagacagcttctaaatagcttctaattatccccacctcctgatgtaatcctcttcccttgtatgtaaaatagactagagacttatttcttatgaatagaatatgccaagagtgttaagatatcagttctgagattaggttataaaagactgtgactttcattttgcttaaactctttccctgtttcttcctgcttgcttgcttggatgaagcaatctaccattttgtgtactgccctgtatggaagcccatgtggcaaagaactgagggtagcctctggccagtagccatgaagaaactgaggtcttccattcaaagatcaccagggcctgaattctgccaaccactgtatgaatgagcttagtagcagtttcttccccaattgagcctaaagatgactgaagccctggctacaccttgtttgcagctttgtgcaaggccccaagagaggatccagctgaactgctcccagttcaaattcctgacccacaaaatctgtgaaataataaatgttgttttaagctactaagatttgggataatttgttatgcagccatgtataactgatacatcaggagaagtgaaatgaaagtatatatgaggatcaaaataaaatattttcccttattttttacatgtctttaaaagataattgagtgtttcaggtaaaaagaataacaatggattatgattttataacaaatgaagaagtgaaatgtatgaccatttttaatttttgatgacagaaagcagataactggttgtctgagacagggctaggcatgaagagtggatttgcaaaggggtatgagaaaacctttgtaggtgatgggtctgttcattattgattgtggtgatgttttcataggtaggtacatatgtcaaatctcatccattttgtacactttaaataggtactttattatacatcaattatacctcaaaaaatataaataaaagtctaaggaacagacaatagaagtttacaaaagagaaaggttgatgtaggtgtaattattacaaaagacttcacagaggacccagcaacagaatcaggctgtgataaaatggcagaagaaatatagggaaggaattaaagtggagtacagtagactaccaaggccaagaagtaggaattcgtgtgatgtgtagaaggaaagaacattgagcaaagaatgccttttgaagaaaaccagcttgcaagggtaattttttcctgaaaactcccaagagacaaattcctaaaaatcaaaaacataattactattagtttcaagagatgttgatgcatcctgagcccccaaattaagccacttatactaaaacaacaccaaattgccttaaaatggacactgttgcttcagcagatgacattcatcgtcatggcatggccttcccaggcaatttcccttcattaattattctgtaataaggctgaatgtctttgctcagctcatttacggctactgcataccataaacttaaacctttgctgtccttttttaggccacaaaaggctaaataaatcaattaaaaaacaatgctggccaggcatggtgactcacacttgtaatcccagcactttggaaggccgaggcaggtggataacttgaggtcagtatttcaagaccagcttgggcaacatagtgaaaccctgtctctactaaaaatacaaacattagccaagtgtggtggcatatgcctacagtcctgaggcaggagaattgcttgaacccaggaagcaaaggttgcaatgagctgagatcacaccagtgcactccagcctgggtgacagagcaagactctgtctcaaaaaatataaataaataaataaataaataaataaataaataaatggcaatgtaaatgatgcataagattgtcactacaataagcttaaaaaccaaaaattctgggaacacttcaaaactgggaagatgacctcataagggctgttgtttcctggcgctcagctacttggaggtacaaacaatccaaaacagctctcataaatgtaagtgcatgcatcataggccaaagcagatattatataaaactcctcgcaaatttaaatttttgtcaactaaaggccataccctgggatataactgtaaagtgaaatacacttagagaagattaaatatgaccaggctggggaagtgtttgcattgttggattaaggatttggggcttaattgggagccttataagatttgaaaaaagagagtgacattatgaaagatgtctttaagatccatctagaagtcatgtgcagagtagaattaggcagagtacaaataggcagaaaggcgatttaagaggccatcatggggtagattgagtgagatgtgatgagattgtggacaaaggaaatgacggtacaatcctgaacacatttactactaattaacatttattgagtattttcatgtgcctggcactgttctaagtgtttacatgtattaactgtccctttactgagtatttactatggaatgtatatcattattgtccctactttacttttgagaaaactgagacacaagagagagctagtgaggagcccagtcagggtttgaacggggtagtctggctccagagtttcacacatgctctgtgccctcttaagcattcattcactctgtatgggtcctatgagaagtactcagagtgccattaaagaagaagccaaggccaagagagatcctgagtgcattcacttttctccatggctactaccttaggccagaacagtgtcctctccgcggcagcccctagcagcttttcctgcctccagatgtgtcctcttccatcaatcagttgtctgccctcaccagagcgatcttccaaaagcatcagctgatcacatcaccccttggttcaaaatcactgggataaagttcagagctcacacgtgtcttacaaggccctacatgatttggtcctggatgatttttttagccttgtctctcatccctctccattttgcatcctaagtcccagacataaggctctcatgtctgggatttttgacataatgcttttaaagttggaaatattattcccccttccatccacaccactattcttcctggactgactcttactcatctttcccatccaatctgagaggtcacttccctttgaaagtctactctgacaccgtgacacacatctgttgtaggcctgccccccaatgtccttgtacaggcccctgtgttgtcactaattataccacattctaacttcatgctctgtagcagctcactccactgaatattggtgctgtgagggcagtgactctgtgcattattttattcccaacaattagcatggtacctggtacctagtgggctctaaataattttttaaattgaagaataaatgaggattgagtttgacaggacatagaaaagaaaagcgaggaacaaatcaaactttcttcaaatacattaaacctgaccggtgctattggcagaatcagggagcatttaggaaaattattttggaagtgggcagtggggagttgcttagtgtagattgacctattgaatttggtgataaaatgtcatccaagaagaaatgaatgccctgtgtgcagctggaatgatgggagctggggctcatttgagaatgagcctggagattcagacttgctaattcctggagattttaccactcttctcttagggaattttgctgttctccctttgctctgtagtttttatgtagattgattgttttattacagtgaaacagaaatcaaaattattaccagacccactcctttccagattgtgtgtacagtcacacatagaaaggagaattaattttctctacatttttcagaaagtttgcttgtagtttttatatggtgctcatacttgcttagctagtgaacaaaagggtggattccagagagaagagccaaagctgaaacgcttttgattcaattacatagcaaatagaaatgctatttctgatttttcaaaaaataattttggcttttctatatatgactatttgataaggacttaataaaaggtagattttctggatgaagactagtgaatgcaattacagccccctagctacaccaggctgacatgcttgtgcttcctcctgcagagacctgactcacagctgataagtgcctttagggtgagatgggaacctgtcgtgttaaaagcagcctctgagctagagagaaggtgtatccatagtctggctggcaggtagtttctaccaagggacatgttggcatctatcctatggtctgaagaatgacacacccatttccttctgagtagctatatgaagaatgtgcacatttggctggacagaaaaagttctctctctctgatggatcatttagaagggtatatgtgtggataatatttcagcccactgaaaatgaagtgctttccttaatgggcatcatgtttataggagtaggatcctccttcaaaaagacctgagggattactggaatcttcagacatatctgagcccaaatcccagctctgcctcttgtgagctgcttgacattgaattagaacttggataaggtgtaggataatgacagaaataagggagctggtgtaatgagggaaagataatccagatatgttagacttactgactttgaatgtaaagcccaaaagacagaggactggaatgcaggagagaacataaagctggatattcagatttgagactcacctttaaaataaagccatgcagcagaggtgactctgcctccgatgaagcatgtgtatatttggggtgtcactgcataatcccagcactgccagagggaacataggaatatattaaaaagtggtttataaggtttaaaatgggcagagttattttttgaatattttttctaagcagcgacgcatatagatttattctaaataagtgcaccaaacgtaaaattattctttgagttgagcttaacagagccaatttttatacagcttccgcaattcacccaagttagctcatgtcgccagattctgtccttccagattgatgtgtttaatagcatctgtcagcaatggttgcagagtagcattttaatagttcccacagattttcatcagaatatgctgtactccaatcacagtgccaatgacaactccccagttggcattgcaaacactgtctttagcagaggtggccatgctgcaggcatttgagagatactgacagttgcagcagttggaggttggttaacaaatgaagcaccgaagatggtgtttatgtggctgtgtgtacccaagtagtgatttatgttattttcagcagagatgcaaactctgtagttaaagcaagctgcctctttctggaatagtgaatgtgttaggtaacaaaagcataggagagtctggacttttaggcaaattaaaagtctaaaagcttcttgcacaagagacaaattggaaggtaattaattatacaaaatgaggattcaccatggagtttcttcaaacatccagtttcccttgttacttaaagtatttaattaaaattcattacccacaacatctcttacataaagcatggctccccacattgatttcaactgatttagttcattatgaggaacactttttgcagagggtattcattcctacaaaattaataggttaccttaataacatctgaactggaaataagatttatcccagcttagctttatgctattcatattttggtgtgagctacaagcatgcatgtgttacactaatctcccaataattgacttcccttctctagccccctttctttattcagggaaagaatgaatacacagttcctactcccctcggattgcctgcctatctttgacaatatatcaggacttaggaaacattccataagaaaataaaacccgaaggctctcctggagtctctggtgataagttaggtcctgtctacattgtggttccatcaacagcctccttcctccacccaatcctagttttaaaaatgaccacacaacatagagtgtccctgacgggaaagagcgttaattgtcagaggtactgggtctcatagacgagaggcagcttacctaaagacccacaaagccagatggagacttcagagatccaaactctgcctcagtacatccagcctggtacactcaagggagcaaccaacttcattctcatttagatgtctgtaaaggacaatgatcctcagattctaagaacttcatcccaacactgtaagttttaaaagctgctatttagaagacagtttaggaggcagaaaaggagctgaaaggcagatatcataattaattaaaaccttacattggtgcattacttaattacttaccagtcctttcctttcagcatgcttgacaaaacagaccatctgtggggagaataggtggtagaagagaaaacatgactattccgctatcagagacctttattcagagaggtcaggtgcaggagacattaagcattaaaatccatgaggtgtaaataggaccaaattgcaacagtcaatggaaaggttgtatgaaatatattaataaaacaaatgtatatgtttttccagtatgccttcctccatataatttagatacctgggttccttgcacacagcaggcactctatacatagttgttgaattgaacttaaacaaataaaaatctaaaagatatttaagaagtaaactaagcaacgcataaaataaatggtatgatagaatgccattctaatgaatatgtgctagcttatacctcaaagcactgataaaggcaggccaggttttctaaaaacaaagtgtgggtccctgattgttgttgagtgctgcttcctctgcttcttcagcctccgggagccattcagcctgatgcgtgtcgtatcatgactcattttgaaaactgccccagaagtttctggacttttttttaataaggtggaaaaacacaatcatatttatctgggtttttgtctttttttttcctggatgcatctgtgggtgtgtgcagcagcttggctttcctgggcatcagcttggagagtacctctgggacactgacaggtccagctgcctcttgctttgttgaaggatgtgggaagcactccattcctgacgctcagagctgatgccatgaggagtaatcatctttctctgatagcggctgcaaagcacttttagaaaatcattagcagttacaagagttgagagcctttgggcccaggttccaattagacagaggttaacatagtagcctcatattgattgagctctttgtgttaggcattgtgattagctctttacgtggcctatcatttatttatattgcaagttatgggaaacctgatgaaccatgccttagctcacaaggtatatagtgtttatttaacaggaagtctggagataggcatcctaggcctggcctggtggatcaacaatatcatcaaggagaaagtctccttctgcctttcactctcatcattcttagtgggtttactggcatccttggcttcacaggatggctgccactgtgctagacacagttgcgttaaggacaggaaggaggaggaaagaatagtcaccaagagagttccctttcttatatattgcttttataaagaggcaaacactttttcagatgtctcatagcgtatgttccatcaatctcatttcacagaactgcggcacatagatgcccttagttgcaaagaaggctacaaaagagcctttagcttggaaatggattggaagtggctgttggattagccaagcaatcgtatctgccttagatggattatttatttaattcttaaaatatccctttgaatggagatattgctgttatttcatgttagtagatgaggaagcagaatgattaatgaacttgtccaagatcacaaagctaataagtggtttgacctatagttttaaccattgcgggtagctgtatggcttggtgtttaagagggcaagagataattcaaggtatactactacttagtccaaggtgtcctactttctaactgtgtatcttgggatgttatttaacctctttgtgcctcaatttgctcttgtaagatggagatataatatttcccataggtttattgtaaagattaggtgacttattacacataaaatacccagaatatggcatgtaataagcattagaaaagagttactaagaagccatgaagcaagcagctttgtttgtaataaccctgaaccaaaaacagcctaaatgctcatcatttgtagaatgggaaaaaattgagatatattcatacaaccaagtacaatttataatgataaatgatgagttagtaatacacatagcaacagaggtgagtctcacagtgagtgaaagaattgaggcaaaagagaatatattgcataattccatttatatgaagttcagatacagaaaaacctaatctgttgtgtaaagtcataatgttccatcacaataagcattatctttggagagttaagtgttgagaggacatgagggggtgttccggggtgctgaaaaggttctgtatcttgatcttgctggcggtagcacaggtatacacatgtaaaaattcattgttttgtacaattaagacgtgtgcattttactgcatgcaagttgtatttcatttttaatagtaaatagaaataaataaaagaaaccatgaagtatacccattcatgctgactggcatcttcggtgaaaacccttagaagaaaatggtggcagagagaagagaaagaggcacatcaatattacagattatttgccttctcagaaagcccctggtttcctctcccccatcagaggaaacaccctctaagtttgagctgttttcccagttgtggagatgtgtttgcactggaaccatctctgtccccttccccgttccctggatggtcagcaatgaactctggcagtgaagccaacatgaatacaaagcctggttgcatttcatgaacattatcctataatcagtcaaattgcctactgattcaccgaaaagaaggccaggatgcattagcctgggatgccactgagaactgtcctttcaaaggcaaagtgccatggagctgaccacttaaagggctccagctctctggggaacaaggagtcatggatggtgcaattagctgaggtagagacatcaggaaaagaagtggacaagtggctacaagagcattaggctacaagagcagcctcagtcatttgggcaattctaagcctagaaaagatcctctgaaggaagaggttccaaatcaaaacaaggcaatatttgggctttgtaaaattctgatttttgccaggggctgcagggtttgagaaatgacttgatagcagtttgtgcttataggaggtgggtagaagggtatgccacccctcgactaggcaacagatgtctgaattttacaaacacccaaactcaaagactttttatctttttagtcccatgagaattttttttttttttaatttcagtgaatgattgagcaaacaagagaaggatacagggagtaaactggtctcccaggccagtgtgtgtgacctgcaggcacaggagtgaggataggaaggaatgaatcaccaccttggctctacagaatcagagtgtctgtctttgtttaaagctggtcactggcagaacattcaaagtgatgcctgagttctctccctcccttccgcttggaaatgcctgaaaattctgccagaaaagtgaggcatagagaagggagactgccaccaaagctgcccaggaagcatgtccaggtcagtctccatcttggcctctggtggacccagccgcagctttggcctacactgccccagcagatcccttgtcccattagtcttgggtctgcagagggttaccctgggagtgggctgcagggcccaggatggagcgcaggctaagccatgggcacatcttaatttgtaagttacatatttagacatgctttgtgtgggcctttgtgtgtactcttgccctggatcccacaaatgttgggactgggtctgtgaaaggaaagaaccagagaacctgatgttgtccttcggaaaatctccttcccactccccaccacccatgcccatatccaccttcaaccacaaagtgatggaagagaagctgcttgccctcctgcattgtctctctttctctccatggccccaccctgagaaaccccaatacagggcatttgggatttcagacattcgttggcgtccttgctcagctcggcttccttctggtgtgaccactatagtccctcccatcctagaagcagtaagtttaagggactgacaaagacagatgttgcatctaaggaaaaaaaaaaaaaagaaaaatggcatatttttctcccaggaagtacagcattcttcacaaatgttattctttcattagaattcacagcaccgtggggagcctgctgatatgattagaactgattttatggatggagaaattgagtcattcaccaggtctgcaggttgtgattcagtggctagaaaacagaagctctttcctctttttggattgaattatgtctcatttccataagcaaaatactcaggagaatatggctttcctacttcaagcaagtatcttcttagacacagtttgatggttttggggcatacacattctgttttgacatatgatagctttcaaataccatatggttggaccacactctaattaggaatggttttgtagatgttagatgagccttctggagcattgggtgccctcagcagagcccaccaaagacaacttgggaaactgtgtaggtgcgaaacttttgtaggtccctaacagtggctcaacctaaaacacactgaaacctagctttgaaatgtaaataaataattatcattttaacattctctctctctctctctcttaaatacctgctgaaattcaattcattcaatgtaaagatgttaaaactagcctgtgtttgccccagctgataggtggtcaccaaaagctggtgaccttggtctagatcatgcataaagaaaggaaatccctgcagtctccaaagtaaaaacaagcaaacaaatataacaaaagtctgtctggaggcccatccacaattttgtgttaacaggtcattttcatggagcttgcagacaaatcacagggaggacacatttctgctatcatgactcagcatataagctagagaacatttctgttttcaaagggtagaaaatccatgtttctactcaatgaatatttattgagcactttctctgtgccaggcactaagacacaaagaacaagtttagtttttattatcagggctcctagcctgaaggggtacaagcctggagaaagactatggctcaacatgatgtgtgctgtcattagagtctgtgtgaagtgaggtggctgcacacaggaggaagtgtctatcaagttgcagaatatttcatagagaaggtaaggctctggatttctcagaactgggatggcaagagggtagacatggagagcagagtcagggtagaaagagcagcagtgcaaaggcagggaggcagatggccatgggatactccaggagcttacagggattcagactgacaagaccgcactgctcatgaggggtaaactggagagactgtgaaaggtggcatgtcttgtgccaaggagctcaggttttatcccaaagacagtaggaatcctgtgatcagattaaagggaaggggaagggttcatacagtctaataacttttaaaaagtcacttagttgcccacactagggaatgtactagaaaagatagaagcaaactggttaccaactgcctccaaggagacatggagcccaaacttcaaaaacacctttgcatttcccaattcaatactatagaatcattaaaaagctggtggttaaaagttaaacagtgttgcattcaagcttcagctgtaccgtgtgctagcagtgtgaccttagggaaattactgaacttttctgagcttctgtcttatcatctgtgaaaccgagataacaatggtgcctacctcacagaggttatatttcaattaaataagatgatgtatgtaaagcgctcagtacacttgttaatatatgtgttaaacagtcccactggccttttcagcagttcacgatggtggccgtaacaggtggagaaactggtagcaattactcagcacacagaccttcagcagctgtgtggcctctgccaggcgaccacaagcaatgctcccggctgacttggcagcagcaggaaagggcttgactgcattttgatcaagtttcaccaagtttgccaaagctttgccacatgttttctcacgtgcttgacaagctgagagcagggaaagacatggccagggacagaaaaaaagaataggtgagcaacacagaaaatcaggctgtctgcaactctgccactggcccaggttgttgctcatggaatccaggaaaaggtgacagagttcagggcactcactgcccatattcctgacacccagtcaggtcaggaggcacagaaggcagactctctacgctacaatgcctctacctcctctcagcaccataagaactcacctgcatgtcccaacaatcagccccccacatccctcctagcaggtctagaaactgaggaccaagccaaacactagctcttttaaatatcaaatggatgtaaactataatagtggtctccccatagaggacaatacacgtggaaacatatagttttctatccaaccaagaatctggttttcttcagagaaacaatccgtcagctattcttgcagcaaaaaagcttgaacctgaccagacttcaggaaccactgctatctgtaaacttacaaggaggaattccagattgaactggttatcaggcttttaggctgcacacatgggctaagtctaagagatgcccttccctgaatctgtccctttcatgtctgtgggcctgtcactgccccagcaggacacaccatctctggcaatgtcactgtgttttgaaacaatgctcattcacctctaactgagaaagtaatgggttcagtttcttcatcatatcttctcaaggaaatactaatactaattattttcttcaaagaaaagtggctgtgttttgggtgggaaggtgtatggaggcatgactttttaatttttttttattatactttaagttgtagggtacatgtgcacaacttgcaggtttgttacatatgtatacatgtgccatgttggtgtgctgcacccattaacttgtcatttacattaggtatatctcctaatgctatccgtcccccctccccccaccctacggcaggccccggtgtgtgatgttccccatcccttgtccaagtgttctgattgttcaattcccacctatgagtgagaacatgtggagtttggttttctttcttcgtgatagtttgctgagaatgatggtttccagcttcatccatgtccctacaaaggacatgaactcatctttttttatggctgcatagtattccatggtgtatctgtgccacattttcttaatccagtctatcattgatggacatttgggttggttccaagtctttgctattgtgaatagtgccacaataaatatacatgtgcatgtgtctttatagcagcatgatttataatcctttgggtacatacccagtaatgggatggctgggtcaaatagtatttccagttctagatccttgaggaatcgccacactgtcttccacaatggttgaacttaaatgttagacctaaaaccataaaaaccctagaagaaaacctaggcaataccattcaggacataggcaggggcaagaacttcatgactaaaacaccaaaagcaatggcaacaaaagccaaaattgacaaatgggatctaattaaactaaagagcttctgcacaacaaaagaaactaccatcagagtgaacaggcaacctacataatgggagaaaatttttgcgatctacccatctgacaaagggctaatatccagaatctacaaagaacttaaataaatttacaagaaaaaatcaagcaaccccatcaaaaagtgggcgaaggatatgaacagacacttctcaaaagaagacatttatgcagccaacagacacaggaaaaaatgctcatcatcactggccatgagagaaatgcaaaacaaaaccacaatgagataccatctcacaccagttagaatggtgatcattaaaaagtcaggaaacaacaggtgctggagaggatgtggagaaataggaacacttttacactgttagtgggactgtagacatttttttaacttcttcagctgcccagtctcacatgcgctcctcattgcattctctgtagtagtggttgctaaagtaagttccaccagcctttttgaggctgggacacagggtatcagtgggggtcacagggcaggagttctagttctgactctgttgctgcacagttctttccaggtagacactgtccaattcttcctcttagtgtaaggtcagttacaccacttcctctctctgtgtctgctccctcatttatcaaattaagggttaaactcactcattatttaggccctccctagctctaaaatttccttgaaatcctgagaaaggctacattcttactggtttgacttatgcagtttcgtattcctgcagagacacgagttctacactgattctgaatgttgaagctttagcccccagtgtgatggtatttgaggatggggcctctaggtggtaattaaagttagatgagatcatgtgggtggggcccttatgatggaattagtgcccttataagaagggacattaaagaacttactctctgtcttcactcgcatgccatgtgaggaaaggtcacgtgaggacacagatagaaggcgatcatcttcaagccagggggtgggccctcaccagaaactgaatcagacagcactttgatcttgagcttcctagcctttacaactgcgaaaattaaatttctgttgtttaagccacccaatctgtggtatttagttacagcagtcctagccgactaagacagcaagcattctctacgatcatcatggtgccttagccctggctatctttgtattggaaatagacctaccccaggagtcagtgcattatggaatgtaccatcaaataaggcaaagcagaggcttctaaagcctcattcaaatgaagataaccaacattgtcatacaatttcatgcattgttagtttgataggaacagaaattgcctgaacttggctgtaaagttctttaaataagtactcagtagatagctatgggaaatgaatgaccacttccagtcctctttggaagcaggcagggtaggaattgtaaaagtgtattagtaagattaaacaagaaaatggatatttccagcaacaaaaccaattctcagagcttgtcattttcagcactgtaatgatttctatggtacagcttttagctccactggaaacgacaatgcaagtgtcattctgaacatcagatatcttaagtggtatcttgtgcattcttattctttcaggacgaattcaaatgtcatctcttctgtgacttttctaaatgtcattcgaaaatggcatttgtatatttttacattccatggtatcagtacagaatttattaatctttcctcagagtttccattacaacttggttttacttttatatagcacttatcatctcatattacaggaagctgagtatgagctctctgagggaaaagctcaataaattcttgaatgaatgaatgaatgaatgaattggttctcctttgtagatgactgatttctcatttatctcaggcttgacaagactctttgactcgactaacagactgaggctctctctacctccatctgcctatctattacatgatgctatgaatggtaaatggtgtcatttttttttttttgcccttggaatcttcaatcagccatgacagctgccagaatgcaaagccagtaagctccaaaggtcatagataggatcccatgttttaataatatttgtcccaactgttgttttgtccatatttcaaagatttcttgatctgtattcattctaaaactgttgacagttcacagctgccaaaagaccaccgtaacagcatggaatagcatgtggcctaagttgggaggtctgtcctcctctttaccaggaaattaactctcctgaagcttatggccttgatgaactccttttaaataaaataaagccaattattttgatgacaatccaaatgttaaattcagaataaactctatagcacggccttccatcagctcctgagtcagccaagtggcaaatgatgatgtaagcagattttagcctagtacctgaatgtttcccttttggtcttttctcccttcctctgactggcatctaggccatgttctattccttttgaatattgattatggttggcctttacctatttgacaccttcaaggaaatatcctcagggtacatagagttaaatagttgaagacctaactagacatcagtcataggcatatgttatgttggaattaaaatgagtgaagctgatctttaagcaagaatcttgccctcaaataataccaggtaggcagccctccctgaggaagccatgatggatgtggccataactaaagtgacatgtggaaaagagtggaaagatgttggagtattcatgaataaggttcttgggttaattcatttttctactctttcttcctttctcccgcaagtccttattaagcacttacctaatgctgtcctaggctcaggggaaacagcaatgagtaagaccaggtcactgtgccctcattgagcttttattccagtagaagagacaataaataagtgaataaataaatatgtaatttcaggaaaacacttctcttattgtgaaagacgaaaatgagcaaagggtatggcatttcctcaaaaaaattaagcaaaaaattaccatatgattcattaattccacttctgggaatatgcccaaaagaactgacagcaaggactcaaacagatatttgttcacccacgttcatggcaacaatattcacagtagcccaaagatggaaacagcccaagtatctatcagtgtatgaacggataaacaaaatgtgatacatacatacagtggaatattattcagccttaaaaaggaagtaaattctgccacatgctatcacatggatgaaacttgaagtcattttgctaagtgaaataagccagtcataaaaggacaaatattgtatgattctacttatgtgaggtacttagagcaatccaattcatagagacagtagagtgtagaatggttggttgtttttatgccattcccatggggaaaagggagttgtttaataggcacagagtttgagtttgggaaaatgaaaaagttctgcagatgaataatgatggttgcacaatatgtatatatagttactgccattgaactgtacacttaaaattggttgtaatagtaaagtgttagcatactttaccacaataaaaaattaaaaaaaatttttttaaatagacaacaggctagagtagaaaagaattagttaaggcttgtctgggaagactcctttgaggaagaggtgacacaatcaaagtgatgacgagaacatgagattacatagggaagcaattctggattttgttctaagtacaacagaacacctttggagggttttgatcagtgaaaggacatgagctgatttactgctataaaagatcatgctggctgctaagtggaaagcacattaaaagggaggaaaccagggggctagaagaccaattaagagactattacagttgtgtttgcattgctataaaggaatacctgaggccgggtaatttataaagaaaagaggtttgattggctcatggttctgcaggctgtacaagcacagcaccagcatctactcagcttctggtgatgccctcatggagctttacttatggtggaaggggaagtgggagcaggcacatctcatggtgagaatgggagcaagagagtgtaggtgggaggtgccacatgttttaaacagccagatcctgagagaactcactcactaccatgaggacagcatcaaaccatgagggatcagtccctatgaccaaaacaacccccaccaggccccacttccaacactggcatttacatctcaacctgagatttggagggcacatccaaactaatcagcagtcatcgaggctagtgactataatggctcaggggatgttgaaataataggggagatagtgacaagtggttgaatcaggattatatttgcaaggtagactcatcctgactcactaatggatttgatgtgggatgtgagggaaagaaatacatgaagggtgacatcttggtttttaactgcgcaaccgggtgaatgggggtcccatctactgagatgcaaatgactgggggaaatactagtcagggaatgacaagggggtatggggaggcaatcaagatatgtgttacctaaaagtgaaaccaggaaccccatgtccaggagagtactggcacataaaagccctttattaaataatcattgaatgagtcaatgaatgaaaccaaatgagtaagtgcagggaaggagaaaggaagaatggaaactagctgtaaattttacaacatatgaaggagtgcatttggcaagtgatatgatggtaaggacctcaggctggaatttcagacgacagggttccagtctcagaaaatatttccaaacctcagatttctctttctagcttttattctgggacctctccctttttctttctctgcaggaaatgtgttcacatatttattcatcccagccaggaggtccatatcccttatatccctgtgcataagtgcagaatggatagccctcaagacatggaacagccagtcagtgagctcctcagctgtgggatggaacgagactgaagccccctcctgccagtgaccacactcatcaccaaccactccttccccactcccaatgtccacactcccatcgttcctacaggagctgtggagttggctgctcggcagtccagacaagttcccataaatcaattctccagggggtcttactctctaaggacatgattttaagcaagttggggacaagattagttcataccatgcattggctagtcttgagttgacagtcctactaattgttcttactgagtttcgggcgagttcctactgagatttgtagagaaattggtgggaagaaagtccattaaaagttgccttcacaactggggagggcacaatgcaaaatgagaaatacctgtgaaaatgctgtaaaacagctgtgggtaaaagccttgcctctatttcacatattaccgtgttttcacatattaaccacttttgtactggcttttccacaggatggagggtacagagtctgcctacatcagctcctttgtctgtttctcttccgacaaacattgtaccaccgaccaccatctggactagctctccacaaaacactgatgcagacactgcctccccatccaacggcactcacaacaactcggtgctcccagttacagcatcagccccaacatctctgcttcctaagaacatttccatagagtccagagaagaggagatcaccagcccaggttcgaattgggaaggcacaaacacagacccctcaccttctgggttctcgtcaacaagcggtggagtccacttaacaaccacgttggaggaacacagctcgggcactcctgaagcaggcgtggcagctacactgtcgcagtccgctgctgagcctcccacactcatctcccctcaagctccagcctcatcaccctcatccctatcaacctcaccacctgaggtcttttctgcctccgttactaccaaccatagctccactgtgaccagcacccaacccactggagctccaactgcaccagagtccccgacagaggagtccagctctgaccacacacccacttcacatgccacagctgagccagtaccccaggagaaaacacccccaacaactgtgtcaggcaaagtgatgtgtgagctcatagacatggagaccaccaccacctttcccagggtgatcatgcaggaagtagaacatgcattaagttcaggtgagtctctatccagtccactagttttctttactacaccctcacattaagaatgcagttcagtgaaccaaacacaatggaaaatttgaattttggagtgtaacacctaagttgaattataattcacaagaatttccacgagtgcaaactttatttttagtcacttaacaattttcatgattcactgtggccaattgcacctttatgacctgttttcacaagtcataatgatgctacagggaatgtaagcacatgagaccagatagcaaagggattaacagcatggctttggccaagcttcctaggtttcaactctggctcctgaccttagacaagttacttcacctctttgtgcctgtatttttccacatctgtaaaatgggataaaacagttgctactgcacacagttcttgtggagattaactgaaatgacataaagcacttagaacagttcctggcagggagtaaatgctcaggaaatgtcatttgttattattattctgctcagtgttttaaagtagtgtctcccttttggaaaccagtcaaagtagagtaggagtggagaaaacttacttattctttatagtcactgatatatttcaagggaaagacaataaattttacaagatgtcacatctgtttttattttcccaataattatatgaagttagtattatttttatctttgttttgtaatcttggaaattatggtggagagaaatcaagggccctttctgaggtcacctgcatctgacattgatgtgaagactgtacaatttagggtactgggcaggaagagtctttcatcggagcatttcaccacttagctgagaaagagtgagatgagctcattttagatgagccagaagttagagggggaaatggagctgcagcccctcccctgggtggtcctgtgagaggtgaagactgagaaggtcatttccagacagaaccctgcatggtcagttggggtcaaaggaatggccatcactgaggagagaatcacaacttttaacaaacaattgatatacatccatcacgaatggaaactgcttgacagtggaggtaggaagagatagaactaagattaatgaagacgtgattcctcatggaagagctcacaatttagtaagggaagaagtcccagagaattgcacatttttatttcaaaggcccagtatatcattgaggatatcaacaagaaaaagatagacactgagactgggataaaggaactaatgacaaaggtctggctggggaatgggagaaccacagggggtcacaataacagggctgttacaggccagacctaggaggaaaggagggagtagtaaccagaacccagaaggagaggcccagtagagttgaccatgccatcaggagcagtgactcttggctgagggacacaacaatctcaaggttaacctccctggagtgaagggaatgactactctgccctccctctccctgctcctctgatatgcagcaagaagccaagaacaaggggacccactggtgtggtccatgcaggttggcctcctagagggctggtcagagaaccacacagagaagggtggagagtggatctgcagaggtgaagggaggaaatctattgactcctctgtgcagcccatcaccccattagcaccttttttatacctccaggccagcacttaaaacattgagcttgaatgtgtatcttcagtctgtctctatccaaacccctgcaccccaggttcccagcatgaaggtaacatctctgacattggttcctggagcagagttggtgttgactttgatgcgatatcttaagaaccatcttaaacaaagggatcatcaaaatacagtgaccacattttttttctttcctatttcaggccctcaccaccacttgtctgtacaactttttcagtttttaaccagccactctctcttcactttctgtccccttcaggatactttagacctagcagattgatattcctgaccacaaaatctaagcttagcatacatgaatctctaaactgacacatctactccttcctacaagtaccttagttttatgggctgggttattcaagacagttctgttctaatatcttggcttgattttaggctctatgtcttgatttcctcaactctaggccagcagggtcaagaggccccaaattggtggcagttggctcataaaccttgaagttcatgggaatattgcatatagcagaaactcagaataaatgacagaatgcttaaatgactggggaagagaggtgtggccggttagagggacatcactgaccagtacacatttcatagaccaaagagtatgtatccttatgacctactaaatcaaaaaatatttagattgcatttaccaagaccctcttcttcatgaaaacaagtatgagacctatcctttgagattttatagtttaagtagagagaaaggacacaggacaagtaactcttaatatcagtacttagtttctaatatgagaatgaacctggtaggcagaaggatctttgggatgatgtgatagaacctgttcacttcaaaggtgaagaaactgtgtcccagaagtttgaagtgcctcacccaagatcacatggcccagtggcagcattgggccctgtgcccagggcccagagctctaagccaagtcaagtcctctctcaccactctgaattgctgcactcctcctttattagctagcagaccaagcaacattctgttggtttgcgcttcaggttactattttgggatgctcttatttagagattctttatgctgcctttagtagtggcagtaataacaccacattttgcatagcattttgtctcattctgtgtgggttcacgtagtatgtttctattaatccaaggattcactcactcaacaaatatctaaacacagtcaccaatgaataattctgaaacaaggtgaatattatgggagttaaatttgactatagaccttaagaaagggctccatgatggagagagcagggagctgagttgcagaaaataaaggaaatttgagcctaaagagagatgaaggggatttgggcaaagggagtttcaggtgctcatttacaaaggcaaggaaccaagagcacgatcattaagggtggacacacttgcattcagaatccacgcagaagttgtaagcacttaaactgctcttgttgaataatccagtgccctctacattgccagatctaagggtaaattcttagatcttttttttgtttgtttatcatttcaacttttattttagatcagtgggtacatgcacaggtttgttacgtgggtatattgcgtgatgctgaggtttggggtacaactgatcccatcacccaggtagtgatcacagtacccaataggtagtttttcagcccttcccccattctgcctccctgctcttgtattctctggtgcttagacctggtttgacctgacctgccagcagtgtctgactcagatgatcactgccctcatcgttaaagcactggctctgctcgacgttcagagtgtgcattttcactaccttctctctctgctgtctcacttcacttcctcattttccttcattatccaggtcgagcacctcaggcctcctttctccctgatctctccaccgtcactcctgcgtggatgactcttgactttcattgtcatctatgtgctgataacactgagatgtaaaattctccccattttgcttcactgaactatagacatgtatagccagctgtcagccaattcatcatctccactgggtggctcataggcatctcacacttaatatgtctaaggcaaattattgatttcctcaattctcagcctgtgccccttgatcatttcctgtcttctttcaattcttcaggccaaaaccctcaaagtaatcctagactcctttctttctcacatactgtatatcctgtccatgagatctgggctgatcgcctcccgtccctctgtcatctttcaaacgtgtcactttaatattcctgcaactgatctcactattcactgcacccttgtcgggcagatcttttcaaaactcagaacagactccactatccatccgctctcacatttcaatcactccccgctctgaatcagagaaaaagccaaagtctctaccatgcctacaaagctcagcaggtcataggacctctaccctcacctcgtccactctcaccctcagacacactggcagtcttactgcttcttgaacacactggagatactcctgtctcagggattttgcagttaccatcccccctatctagaacattctccctccagatcttcaatggctccctccttttcatcagtcaggattctgtttacctctcacctcctcagcaagcctttactcactcccccatctgaaatagtaacccccatcactactgatccctttccctacttaatttttctttttatcgcttaaccattttctgacatcatctgatttatttgataagttagtgtctgttttctgccactagacagagtcagtgtctgttttcatgccaccatgaaagcaaggaccttgtttgcaaataggaagatatgggctacaccctgaacccctagaacagagcccaacacatggtagaccttcaataacatttgttgaatacatgaataaaagagccaatcaaccaatattagggaagttattagatctccctgagccttgatcctatcatcagtaaaataggatagggatagtattcacataatgcggttattagaaggttcaggtaagataataaatttatagcatatggctgttgagcaatagctcaatcaatggctatggttgctactttactattgtttactgttattactattctgctggtgtgattatcattgttattattttatttatcatattgaagaatgcccaccatcttcaacaaatatttattgagcttctactatgagccaggcatctggttaaatactagggttatagccatgagtaatacagtcacttcactcatggacattacaatgtagtgtgcacatggcatatggcatagtgagtaacctagtttgggtcccaagctacatggagggagacactgtagatgtaggaaggacgacttcagggcaagcattagagaacactagggagcagcctaagacaattggtttactttctaggccatttatagtcaccaaagtcttttgatcaggggaagaacatattgagaatcatattttaaaagtattcaactggtgggaatatgtatgtcaagttgcagggagttcagatttggaaccatgtatgccagtttataactgttttctggtttgtcattgtcatgcactgatagtaggcacgtcacttagctactctaacttaaaaggctcttggttgtaaactgaatacaagagaagcagtctctcaggtccttttggcttttcatactatggtaattatttattacaattatcctttacagaagacatgaggttcatggtcgtatgaggcatactgagaatatgtatgttccaagaattgggctagcgactgacacaggtagccctcatctgatcctcagaacgttccagtggtgtgagctcagcagtatctgttttacaggtgacaaaacaagtccagagagactaagtgactgactcaaattctcacttgagtgaccagaccaggattgaaatccagttcccctgacagacccaaagccaagtgttcctttcacaatgcccatcctacccgaattagtagagacacagagttggggaagaactgatgggcttcagcattactgtagaaatgagctagatgggctagttgccagatgttgccagctgggtcccaggggtagagctgcccagtgggaggggaagcagatggtggtagcagccatgcaaaattggctgtgcagaagaagagttttgattgattttcattttttagcttttgtttggctcttaaaggaagagagaaagacgtgatctgttaaatttgggtcattttgttttattaaatcagatctcttcaaggatgaaaactatgactacagtgtgtgtttgactccctgaacaacattgaatggtgctatgaacaatttggtgctcagtacatgcctgagggattaactgacattgcaaaacaagtaatattcaaaacatcatcagttcttgcatatgcaaactttaaaattatagttactgtgcttgttgcaaagtagatactctcttttgtctgtaaaatccacatgtccactggtctttcactatcctattattttcaccataaagagaagcacacacaaccgtgaaaattggtgaagaccattgaacattaaattgctgatctgaaccctagtatttatccagtatgagcgatgccaataaatacatttaaataaagggcactaagtaggcacagacatctagacatctctatgtccatacctgcaagggactttcagctctacaagacacccataaaccttagatttgaaaaaagaatcaacttgtagaaaagatgaaacaataattttaaaagtatacctagaaaatttcgcccgggcgcggtggctcacgcctgtaatcccagcactttgggaggccgaggcgggtggatcatgaggtcaggagatcgagaccatcctggctaacaaggtgaaaccccgtctctactaaaaatacaaaaaattagccgggcgcggtggcgggcgcctgtagtcccagctactcgggaggctgaggcaggagaatggcgtgaacccaggaagcggagcttgcagtgagccgagattgcgccactgcagtccgcagtccggcctgggcgacagaacgagactccgtctcaaaaaaaaaaaaaaaaaaaaaaaaaaaagaaaatttcagaagcgaaaaatgtatattgtagtaagttaatgaccatcatgtttaactgacatattaaaaataggttaaaggggaaaacaattatttaattaaaaacaaaaacataggtgtgagaagaccatgttaaagaatggcaaacatttactggtcagattcttttaaaatggccagaatgtatcagaaagcaataatcctaacaagtatggtatcttacgctcagctttacaaatattagatcattgtatatgcccagacctggtcgtcttacggtgagtgtcaccaccatcttttcagttctctctctcccactccctaactcccctctgtcactgagtactgttgattttgaactcttggtagctctcaaattcatctacttctcttcatttttatctcagagctcccataatcccaccgcaatagcctctcaactgcccctcatttccccccccccgcacccatctccctactccctgttgtccacacagcagccagagtgacagttaaacacaaatctgatcaaggctcacataaccttactaccaccaccatctcagcccctgggggcactccgctgcttttagggtgaagtccacacaccttcagtttatgtgggctccacttgtcaccccagtgtcatcccacaaccctcccctcgctctctgcaccacccacactggctgtctctcagttccatgagcgcctgtgtctccctcttgacttagggccttgactcacttagacgctacctgggactttctcacaacccatcacttcacctggttaattccagctcattcctcaggtctcagatcaaatagcacctgctcagaaggtctcttatggagccccctgtccagtgttggcctcccagttacaacttgtcacaagtcaattgcatctcttcttcgcagcatgtgattatacatttttcttgtgtttatttgttcattgtcttcactgcttttaaagtacctgagggtgggtccttgtctattttggctcacaaatatattcccagcacctaacagtgtctggctcagtgtaggttttcaataaatgtccaatgaatcaatcaatcaatcaatgatttttggtgacaatatcaatctttagacaataaattcacgtattgtgttagcctcattaatcctgagctttgaaatgaaaatgaagaaaaattgaacatcctcactgtgtctgcaaagacatcccctcggatgcctttaagcagtgtagctgtctaaaggactttctgctgcccacaccaagcccacctcacctctcttctcaccattctgactcccttctttggttttcccatagactccaaggctgccaatgctatgggttgttataaactctcactcatatttttttcttttgtgcccagttctttttttttttccttccaacttttatttcagttttggagggtacatgtgcaggtctgttacatgggtaaattgtgtgtcatgcgagtttgttgtacagattattttgttactgaggtaataagcatagtgcgctatagttagtttttttttatcctcaccctcctcccaccctccaccctcaactaggtccctatgtctgttgttcccttctttgtgtctacgtatactcgaggtttaccttcctcctaagtcagaacatgcagtgtttggttttctgttcctgcattaatttgcttaggctaatggcctccagctccatccatgttgccgcaaagggcaggatttcattccttttatggctgaatagtattccgtagtgtatatataccacattttctttatctaatccaccattggtgggaatttaggtagattctatgtctttgctattgtgaatagtgctgtgatgaacatacatgtgcaagtgtcttcatggtggaactatttattttcctttgggtatatactcaataatgagattactgggtcaaatggtaattctgtttcaagctctttgagaaatctccaaactgctttccacagtggctgaactcatttgaatttccaccagcagtgtataagcattcccttttctctgcaacctcaccagtgtctatcttcaactttttaataatagccattctgactggtgtgagatggtatctcatcatggttttgatttgcatttctctaatgattagtggtgttgagcactttttcatatacttgttgtttgcctattctttaaacttagtttaaacctcaaagtttcctaaaacaagataaactctcataaggggctccagctgtcagattttattttaagtaaaaattattccgaattattgtctcttcttcttatatttctcctttggctcacttttactacctaaatcttaatctgcttttgaaatgtttccaaaatatcttttgagatatacatgtcaaggtaataaaatcagctatttactatctatttagtttgtcatgtagtagcaatataactctatcacatgttttaattgtcccaatgtcaccttttattacatttggaaagtttttgtctttatggagcaattttctttttctgtttcaaatgctttcaccagttgcatatgatgaaagtggctgtggaaatgcttcactgagaaagtgggatttaacttatagatacagctgataccattaatatgccaggatatggatatgcttgattccataccctgactgaacccgtactctaatcttccaactcaaaaaagcatgcctttttagttacaaaataatttggcagggaaatgagaatggatcaacaccctcccatcatctttatcagaaaggttctaaaaaactcatttcagagagtcaagtcaggaatattgcattaggagtgcatataatagatgctaacttaatattgtcctcagcatgctttgttccccctcaggtcctaggagagaaaaatattggccaaaagagatgatattttatttaacagtataatgcttttattgtcagactcatggccttcaaggggtagaccagaggctcaaagatgaaggcaaatttatgttaaaattataaaatctcagtaggtccatggatgtgggccatcaaaaacactttgccatatttccatgtggagaaatcacggagtcatttcaaagacaggctgtaggaaggcaagaatgttagtaacagcacaagctttggcctcagactgcctggttcaaatctcaccagtgctatttgctaaatgggagaattgagcaagtttatttatcacaggtgttccattttcctcatctatatgatgagggtaattatagtactgtacctgttttacaggattcttattagggttaaatgagacaagtatataaagtgcctcttacatagtaagcactacataaacgttagctattattattacagttgggtccttaattctcaatgtggataccaaccagcaagagttttgactcttctagactctgattttcttaacttgaagaattagaatgtttgtaaaaacactttaagattcccaaagtgattattactgtgaatattaggtaataaaagttcacttaagtacctgcctacagcataatacagaaaagcatagtccaaaaagtataaaggagaaaaatagctatgttcacatctgaaataataacagtttcagaaaacttggaaaatccaaagaaaagtgttaaagagtccaaacaactgaagatttctagctaagagaaaggcaatcttggggcgttgggggaaaaaaggctgagctgcaggatttagcctgggtcccatctgcccctgaggttggacagttgagacctagaagttgtactcttcccttaactggcatcaaagttggaaattatttttctttcccacgtttttaactccaaaactttgaattcctgagtctgggggaaattaacacttggtaaacacagtattcaaaagcaagttcctggccaggtgcggtggctcacgcctgtaatcccagcactttgggaggccgagacgggcagatcacgaggtcaggagatcaagaccatcctggctaacacggtgaaaccccgtctctactaaaaaataccaaaaattagcctggcgtggtagcgggcgcctgtagtcccagctactccggaggctgaggcaggagaatggcgtgaacccgggaggcggagcttgcgccactgcacactccagcctgggcggcagagcgagactctgtcaaaaaaaaaaaaaaatagcaagttcctgcatggccttgctgattaatgacatggagtaaggctaaatttagctagtggttcctaggaggtccctgagtccttgggactgtagtaattatattgatgtcactgcccttggtcaaggtgtcaggataggtaacctgaaactatgactctctgttccctgcccatattctgtgattaaaaaagataaacttgcacactgcttggcaaccagagttaggactttgtcctgggcttttagaagttcttccttcttgcttatgtcctctgaaccaagaaaataccagtgtggaagctctcacttgccaaggttggtgaaccccacaaggatctgagccttcaccttagcagactggatgatttttccaaaggacatatgcaaacttttctcgtttatttttccctttagttttttgtttgtttgttttctttgagactgaattttgctcactctcgtcgcccaggctggactgtgatggcttgatttcggctcactgcaaactccacctcctgggttcaagcgattctcctgcctcagcctcctgaatagctggaattacaggtgtccgccaccacgccccgctaattattgtatttttagtacaaagtttcaccatgttggccaggttggtctcaaactcctgacctcaggtgatccacccgccttggtctcccaaagtgccgggattacaggcgtaagccactgttcccagcccctttagtagtattttatccatagtcatgtcttgttttcatcattgaaatactaaagagatagaggagagggtaacaacaacagcaacaacaaaaagctcttctctctcattgttcatggagatgctggcacctactgagcaagacggtggcatgctaactgcagtccatattcacccctctaagcttcattcacagagatgacctaggagttgagattccccagcctggcctctggtgttcctcatttctggcacactccttttgatctggggagcaccattagcacaactgaatgaggggattgatcccagacacttagctggagttgctatgtgttaatcggttgttctaaggtggaagacagctgctttgccttgagaaaaggcaatgaagaatatctctcattattcttagaaaaccagtatagttcacattacaggtgtcaaaagacagctgagattgaacaatctgaacacacagttaaaataaattccaagtggaaaagaggcttcattcgtgtgggaaaagattgtaattctaagtgaagtgaagaaactttaaaaccatggtaaccaagaactgtgccgtcatgtgtgcctggtttgcattaattgcaaatgtgcgctccccaggtccttaaaatacagctgacgtgcccccatgagagagaaatgaaggaagaggaaacaagcactgggcttgcgcaagtgcaagtattttattatctcaaccaagattaatatttctagcatacatttttaactacaagctttaggtaggtaacatccttttagataaaagtgaagccagtctctaaaccaggtcttctgatgacatgaagtggaaacatatagatgttgggatcctacctcacagttcgaatcccaattctgcccactaactagcatgtagataagagtataaacatgaggtaaaacattccagccgtgataatacttggctaatttttataaagtttacctctgccactctgtgtaaacaaatgactggtagcttaatgatgtaaagattttgagagaggagtaatggggaaaaggactaatttactaatttacagagacaagcttaggttgtgttaattaaaaatacttctgtagcatacttttatgcaagctgttttccttagaaagatgctttctttttgcaacataactactaataaagttcaggtttttaaaaaatagctgtgcttcagaagaaatcagagttattttgtgaatcacttactttgggcctagacaaataataaagtataatgtggtatacctggctttaagagactttcagtctagagagtaggcagaatgtattctcataaagccactggtattacagtgtatttcatatatctatgtcttatatgtataatatgcataaccacccacagctacatatggcagtatcagttacatactaaaacaaatttactaaattgtcccatacaaaataaaacagcaaatgtctagaaaaagaggactcaagatagtgactgtcatcgggatgagttccaagagaaggttggacttgagaaggattttgcataaaaggtgcatccttattcccaaagcacttccatggtccctgctccccaaactatcaagcccaaacaccatgatccctggctttcagagtttttttgatttggtcctgagtactcaaccatttacatgatctccttaatttccattacgctttcttatatagcctgtggtcctcgttttgtcacttagtcagtcctgcagcatttcagtctccgaatccataaaatgaagacactggcctttacaaagatctcaacagccccctttgttcatgctaatttacaaagcatttgatcttcccagtagccctatgaggtggagaggacagggattagcccattttttagttaagaacaccagtcaaggtgctctgtcttcaagcccagtgcaaacccttcaagcccataaatattgggtgtctgccctcctctgaggtggttcctgcctcgatcctcctttgctgtctgtccaagtcctgccccatccatcagagaacagcttcattcccaactctttccaagactgctccagactttacaggcccacccaccttaggcaccattccacccacaggcagaaatacagaggctggcactactcacctctcttacctccctgcctgcctatcccatccaatcctgcccaccccagaatggttcccggggcctgacacttgtctccgccatggagtggtgaaacctcagggcccctgcctattgggtctctacacaccacactgtcctggcttaaggtgagcccatggagctcattcgggagaggcttgtagggtggatttggggtaagagggaggagacgagatgtgcttcccctggcatggggtggaatggaaagaagaatgggcatgaaatccaagcagacaaggccagaagacaaagagacttccaataatggtaaaattaagatctacctaggttgcagtgtctaagaactaaggttttcttttctcactttctctccatctcacaaactacaccccactcccactaccaccccactagaagcaaattgcagttaccatgtaccctgggttatttaacacactgaaatgaacagcatttggcaggattctgagcagttattttgcaccacagcacacactagaaaccaatgacctgaacgatctaaggttgctgttctagaactgttgtctgcttctaactagccctcttcccaattaatttgaattattgagcttcattcttccttcaccagtatgtacaagaggacccaagccatcacacagcctaaggcaggccctgattcctgggcagctaacagaaagcagacagaggatgtaccagagctgtaggttttatttaaaagcagttgaggatttagtactagagcccagggtggcaggagagcctagtgggcaacacatggactctcgaacctgtgcttgtatcccagttcttctacttagcagttctgtggctttgggtccttagcatctctgtgactcagtttccccaactgtaaaatggagataacaagaatacctactttctcatgaggattaaatgaactgaaataagtgaagctcatagaacagtccctggcacacagtaagtaacaggaaagtgttagttgctattatttttgttgtcgttgatttctcctgctattactgttgttctttggaggaaggagacatgatctgatgctcttgctgtgagaatgaagagcctagcataataaatagagattcggcacacacagagttctaactgtcaagccctcgccagtcgcccacttccctcctccagcacatccacagatacatgcttttaaagagaaagaattcctctgagacaaaatgttcctttcctcttggtgaccttgactgaaggagctgcggcacaccctgaagtggccacctgctcctcttctccaattcttacctaatctctggaccaggaagtggaaagaaaagcgcaagaatattgaaaaacagtcaagaggtttgttaaagactcttctcaaaatagatcagaggcatgcacacatactcaggaacttggtcaagtatttacacgcaccttctaaataagctgactggtgaattttcaaggagaatgtagctcaggagtcatctatggatagcagtgagacactcacctctttttcacctctggaaactttccaccatcacctcctccacccccagctctctcagagtaacaacaacttctttaaagagcccagcaaagttatttcttcagaggttgtttgggttcatcccatcatgtcctaatatttacattttggatacaattggtgaatattaatattttttccaaagagctcaaataaaatgtttatttcatgtttaaagtgaaataaaaagaaaatccctcaatgagaagagtccctagaggaacatttgaggtttgagaatattgctaagcccaggaatatagaaggacccttttggtcaagtgagaggcaggaggcttggacatgaacagaaccccttctgagtgtgtgatcaagaaaaggggcccatctgtgtggcgtgcgggcccatggggatgtgtgagtgtggggagagagactcttaaatgatgccacagttgattcctggactgcctcagggtatagaacagagctaaagcagggaaaggaatacccccaaaggcagcctccttcctcagggttgtagagcagtggagtagtggccgacaaggctgaccaggagtttactctggctgcttccaggatgttatctgactctatttagacaattattccttggtatggtttggctgtgtgtccccacccaaatcttaccttgaattgtaataatccccatgtgtcatgggagggacccagtgggaggtaatggaatcatgggggtgagttttacccatgctgttctcgtgatagtgaagatctgatggttttataaaaagaagttaccctgcccatgctctcttgcctgccaccatgtaagacatgcctttcaccttccaccatgattgtgaggcctccccagccatgtggaactgtgagtccattaaacctttttttatatataaattaccatcttgagtatgcctttgttagcagcatgagaatggactaattcattcctaaaagaactctcctccaactaaccaccttggtcactgatggggactttcaagtgcacagtgagaagggcagggggctggggaggtgggatcatagatgtaatcataggagtaggtactcaggtaagaactggagcaggtgattccaaggtgaataggtggtgagtcagctgtgtggaaacttttttaggacaatgattaggctaaaaaaaaaaaaaattctggtaatcttttttaagctaaaagtatatttgtttattcaacattaaatacatgagttaagtacccactgtgggccaaagatggtgccttaagctaacagtgcacaaagaaatgggaagagatgcaagatggccatgaatagaaatgacctagggaagcacataaacataatacagaatgcttgaaagaaattgatgctgagatctgagaacacagagcaacactgtaattttacccaggggtgtcagggaaaacggctcagaagagttgctatttagctagatagtgaagaagaataggagctggccaggctaagaaaagttaatgattaaaaatgcaaaaccaggactaaatagtactgggtccaaatgatagttcaatcatttaccacatgtaaaaccttaatctctctgagccttaacttcctcatctataaaatgggaataattctgcccaccttgtaaagagaattaaataagatgatagctgtacagttttgtgcatagtctcagcccaaagtaatcatctgcaaatggtagctatggttattctttagcccatttattctggtcctgggccattaaaaaaaagtggcaaaatgcaaccctgaggaattccagacttcagggaggcccaaaattcaaagaggttttggttcacaggccttcaccagccctctggataggcagaacatgttggtagagtgaaacgtgctagcacagtggaatattcttgtatctgggattataaaatatatagataagtttccttcagttcttaatttctgcccattccagggctttataacatgagtcacacccagtctctaactcacaaatcccaatgaggaagaaatgaaacgccagccaccttccccatgtctccactcccagtggactgcccgtcagtgtcccacaccttcctcataagccagaggctcccctgccccccagccacaccttcctcattttttctgtcccttcctcatattgaaaaatgtaagaggaggaggaggaggggaattccagtttagtttaaacagaactcagggggaaatggcatttgttttcacaaggaggaaataaagccttttcagtcaccctataaagttgcgctaacatgggctcagcaaccccttcatgttctcaaactgtgatgccctcaggtgtggaacttcccagggctgatggttaccagctgcttctgaaagcagccactgctgtggaggtaacagcaagctcaggatacaagatctcctaggcttagggccagataaaggttttctgcttttggaggactcttgttcccatggctggcatccactgagaagagccagtgggtaacagaatagttaatacagtggttcaaatatttaattactatctgttttatcttataccatttggccttatattgggctgtacaaactcttagaagtgcccctttgcccagctgccctcaagggcccatcaggaggaaaataactggctaattccagctctggtcatataggctatcttctgtggacatggaagggtgacatggaagagccccatttgaagattgggggtacacttggagctagagagccacccatcatatggaggagaagtggtcactctatcacttacaataaaaaaaaaaaaagatcacactttagttggagaacctgcctgatttatctttagaaagaggtggtatgtaaataaattcagtaaatcacaaagttggaggggacccaactgcttaaagttagagaagaatctttgaaaaaaggccaaacctgtgatttcctatattaaactatccctggagcaagaaagaagagtcttgcaaaaaaatcagctatattcattcttttcttccattttttaaaaggagaaattaaattaaaaggtcagttttttacactgctcttaattgcaatgactgtatctttttgaatcttaaaatactcccatcaccttaccctatggttgtaaccctcctttcataagcttttaaaagagctattacaaggcttcagtgaactttgaattgttctaatttcaacacagtttagaggccaacaagccaagaggagcctttcaaagtaggagtggaggttttccataaggggaactgacctcggactttctctgcttgacccagtctgcacatttgagcattcagtgccataattctgtctttacaatagtaaaaagggaaagagaattattctggtaattatattaatctgtctcaaaatgattccaggagcaaagaaatggatctgtgagtgttcagaagcttgtaagctctgaaacggttgaatatgatcagtctttgcagacatgacaagctctggtcttagtcttaatgttagcaatgattttttttggtctctcttttagaaattataaccagcaggatcatggatgtttgatgtagcattctttcatccagagctttttagaagttactaaagaattaacaagtggactgatttgcttcttaactgtgctacaattcttttggtgggaaggctaataaaacgaacagtaacaggagccgttcataccagcagacaaaaataaataaataaaagaagagatactaaaataatctacagtgataaatctccaaaaatatgggggagattcatcacttttgagacctagtacacaagatatgagaattggtccaggatcatatatttgcatagctctttagattggtacacctggcatctcatttaatccccttaaaatcatgcaagatggatagaacactcttattcctctgtctcagcaggtaagtagtataagagtcgtcagggttaagtaaatagttcatggtcacacagctactaatggttgaaccacactcgaatccacatattcagactccacatctctggtgctctttgcagtgtgtttaagagtcccattcatttgttgaagtactagtaaataatttcccagttgcctaaaagagtaaatggagtccctaacaccagctttagtgccgaaaactcactttaagtattaggggacaagagcccagttgattcttgccatttttaaggtgaaatgaaactaaagtatattcattattaatgcaaagctcacacaaaaagcatgttgtgcttcaaagtagtatttggaggaggtgtggttattcttacaagggtacatgctcaaagagtttttttaaactgcccattaatagttgcttttggaaccagatttcaaactacagaataaaatattcgcgtgactttatattgcaccaagatatttctacaaacaaaaaatagtgttacctatcagaccagaccttattctatatatcaaacttcactttagtctctataaaaccaagtttactattcaagaatgaaaactgaacatatttcccacagaggaatgttttaaaatgctttcacttgattgcctcattaaaattagtgcatttcctaccaagacgacccttttgaagtggatactgccaatatttttatgaaaaaaccgaaaaaaacattactttgcactgacccttgaataaaacatccaaagtctctcaatatttcacaagtaatagaaagatgaggcagagcccataaaagaagaaaataggacatcaagaaatctaaaacccactacccctgcaaacaacagcagcagcaacaacaacagattgatgtcattcttaaaaagataatcaaaatatgactaagtactcctctctaaattccaggccagccaaaaagtcttgataaatattgacgatttacccaatttcacctgcataaaaagtgttttggtaacagaattaaaatcctgggttttattctagctgtgaatgtcatgcagaatgatctgaagtagcttttccccctttcagagaaaagatgggatcaggcagaaggtggatactacgcacgccaaagtcacatgatgccccgtatcctcatgtatcttcttttctgtgcccttcctccttcacaggcagcatcgccgccattaccgtgacagtcattgccgtggtgctgctggtgtttggagttgcagcctacctaaaaatcaggtgagacgcagcttactcttaaaaaaaagggattctgttttgttgggctctgggctgagcgctgttttgctggatacttgttccttaataggtatcttagcccttagaaatattggcagagaagtgaaaaatggcgggtgtactcctacaccacacaacacaggtatagacgtacagtatctgaaccttggcaaagtagaagaagcaagctgagatatacagcatgatgatgcaatggaacaagaattaacgtggagtcgggagactgaagcctaggctccctgccccaaatgtacctcattaccctgggaaagccacatgcctcctaaaactcacctattctcatctgtgaaagggggtagaagggtgggatcgatggttcctaaattctgatgttctgaatactgaactgtggatttgtacccaatctgttaatgaggttttcattgattccaatgcaaaatgtaaaaaatataaggaaggtgtggcatttcctataaaaccgttttttctcctgagattatgtctttatatttttggctttaaaatatcttttctcctatgaaatgaagtgatagtagctgagattttactttctttagcctaataggaagttgcaatactctgtgagtcctccatttttgttttctattgctccgtgaaatcaagtctcaacaccacattactcacagtctctaagtgtccttccagctgtaaaatgccagatggcaagtgacagtcttatttcctagtctgtgcagtgcccataacaaaggacagaaagacacaagctgcatggtgagcacactcacccttgacctccaattcgttctcctcccaggagccagaaccatttctatgcaagctcctctgccctgtcattcccttcctgaaaaaccccagtggctccccttgcactgagaattaaattgtaactcctcagcgtggccctcagtcatcctggaccgtgcctgcctccccttttccaatcatcacatccctctctccctctgaagtcctgaacttcagaaactccagctccctccaattcttaggacacaccaggttctctgtccttccttccccagaccctgcaatcttgctacttcctccatgagatgcttgtcttctagctccttctcatgctgtgtacattggctttcatctcacttcctttgagagatgtcctttccagtttagagcccctgttatttactctcttagtgccttgttaagtctatcctggatgtgaccactgtctattattttattttattgctatcattttgtttttgtatatgtgttgcttgtttattgtctcttttccccacaaaaaatgtaaggtccttgaggacctggatttgtctgtgaggacactgctagggaccaagacggtgcttgatacattgaacaaatgagcagtgaaccataaggacacacaatcccatgggcactgtggcgcacacacacagacacccctgacttgtcccccaagcagccatgtttcttcctcaagaggctgtgccaccctgtccttccctcctgctcttgaccccacgtggagctcatggatatgattcctcatctcagagcacatatccactctgctgctgcctcctctcatccccactcgccacccagccccacccagtgcccactgggagcacttccctcctccttcccttttatctccctccatcttgtgttctaaatgtgcatcaaatcaatctcgataatgtcaagtgtgagagtgccttgtaatatcacctgcgtctacgatacaaagaacaggaaagccaggttttgaagagaaattggaattaaagggcccgcttgacctgtttctaataaaacattttataaaagcatccagaagtttcccccagatttaaaaaaaatatttctcttcattaagtctgcatgtccttgagcactaaacttaattttataaattatatcttactgaatgatacctttttccatctggtttaattattagtttattgctgcagatacaccgtattttaattacgagttaaattggcttttatgaactactctgggaacctcgtttccattttataacaaagtatctgttgaaaaacatgttctgcccctccttcccaaaaaggaacttacacataaattttagagtcattttagaatcaccaatgatgagttcctaagaggctacattatcaaaaatacgaccttcactgaagtgtggagtgaaatagaaacacttccttcttgctacacacttccccaaaatggtgctgaaataactggaaggactcttcctcttcactttggcaagaattcaagtttaccacctctaaacccacactggctataggcaggcagtctaaaatagtgattaacaattcagactccagaagcagggagccctcagttcaaatcctggctctactacttccagcactgtgacctgggcatgtcacagagcaccactaaccctcatttccctcacctgtaaaataagggcagtagtttctaccttgtagtgttgtttggaagcaagtatatagcactgccaacatcatcatcatcatcaaagtggtagactggaaggagccccaggaagacagtccttgatagatagctgtagagcgtcagccatgtgccaggccacattagtgatgtgacacagttctgccatcacagtacttaccatgtttggaaaattttgttagcaggccattacaatttgctctgatgagtgctgattaaaattttattttaagctatattttccccaggcgttcagagcaccagataaattaagtaaatgattaaattgaataaatcattattcttcttccccatacagcttctgtctcctaaatgtagtaagatatacagtggcataaatataaggttgctatttatctattatgctacttaagtttaagcactataaacttaagaatggatacagttattagacccttaaggggtttcagaaaccccctaaggaaagcccctttctgcttctctattaattattttggtaaaatgataacataaggagattaatcgttgttatgaatcttaaggctatgctaaaaccccttcagctgttattttgccaggttgtcggaaagccccattaatcgttcatcaaaaatactttaattgacgtgtgtgtgtgcatgtatgttcctaaggataggctttgctttggttgggaacttactcttctttcttcatcccagatttctaaaaacaataacataacaaaagatctgttttctgtggtcttttagcttgtttggctggagcagcgagtgactaaaatcacaacccatagggagccattagcttctgacctgcaaccatgggatatggccctggcccagccaagttctctgcaaatgcaaggggagaatctgcttgaaaaggcagcctcatgatcagaaaaatagaatgcttggcaagctctgctaacaatgggtggggacttttcacctttcttcccagatcctcatttcctctaaaggcattgtaaacttaagagccatctgcttttcacactccctttctccagggacccattacccctagttttgtcacaatgacccctgcctggagaaccacatctttttgtaacctgagccacttttggatgtgacttataaaatgaactgccctgaacccagggcccttcttggtttatgatcccaccttttaaccagcagcagtgtggtgtggagggaagaatgtgagctttgcagtcaagtttaatgctgactcttctacttactatttaggcggccttgggcaaattattaactccttgatcctcaatttcttcaatctgcaaaaaatagagttaataatatgtatctttcaaggttgttttaaagacgaaatgaagtaatgaatgcagagtaactggagagactagcatggtgactaagaacatgcactctggggcaagttttctttttttgagtcgaagtctcgctctgtcacccaggctggagtgcagtggcgtgatctcggctcactgcaacctccacctcccgggttcaagcaattctcctgcctcagcctcctgagtagctgggactacaggcacacaccaccacacctggctaatttttgtatttttagtagagacggggtttcaccatgttgaccagggtggtctcgctcttctgacctggtgatccgcccaccttggccttccaaagtgctgggattacaggcgtgggccactgcgcccagcctggggcaagtttcttaatcactttgtgctcagtttcttcatgtaaaatgagactataataataatagtacctaactcaagattgttacaaagattaaattatgatacatataaaggttcagtgcctggtatgaggtgaggatgatggaaggtcaattactgttactgctgtagtttttagaacagtgcttagcaaatagggactcagtaaactggtaaccaccaacacataggctgtgaggttgggagcacagtctccatcctaccatttccattcagtaggcgtagggattcaaaggacaggggagagaaggagggggaagatggcacagcagctcatttcctaattgaatattgatatggcggtcttccatgttccagtttggcagtttcgttagtgctattctgaaacgtctgtgaagttgaatccatgttacacatttataaatggaaactatctctgagcagtctttatgccagggcttgtttgcaactttaaaagaaagcaaaggccctgtctaccttttgcagaactatctttaattagtgatgattgaagaatgagataagtctgttttgatttgtttaagttggctcaaaactgttcagccaagacataatctccctgcacaggagaccgtatctgctaagaccagtgatgtggatgttgctgtaattaggtgtgctggtgacccagacagactacatgggctgttttcttcacaaaaataaatgcagtcttgatttatagacacaacaggacctgtcttttaagacgtcttgttagaagtcacctattttgctttatgtcttctagtgattgcaggttgtacaattggattccttctggttgttagagtaggcccagccagccataaaggccaagatcttctagaatttgttatacacagttgactttttcaggtcaccttttggagttctgtaggtcttgtttactcaattttctccctcagtggttcttaaactttaatgtgcataagaatcaatggaagagtttattaaaaacacagtttccggccgggtgtggtggctcacgcctgtaatcccagcaatttgggaggctgaggcgggcagatcatgaggtcaggagatcgaggccatcctggctaacacagtgaaaccccatctctactaaaaatacaaaaaaaaattagctggccctggtggcaggcacctatagtcccagctgctcgggaggctgaggcaggagaatggcatgaacctgggatgtggagcttgcagtgagccaaaatcgcaccactgcacttcagcctgcgtgacacagcgagaaaaaaaaataaaataaaataaataaacagtttcctgggtctcatccccatagattcagattcagtaggtccaggtggggcccttgcatttacatatctaactagctcaaaggtgatgccagtgctgctggtccaaggatcacactttgagtagccctgttttacccgcttctaacactccagtagccctgttttacccatttctaacactccaaacacactctctgctgtacagtttcccagatagattgccctgttgtttcatatatgtttcagatatgttgccctgtttcagatatattgcctttgtaattttgaacatgctgatccctctgtgagaggtgtttggttcacccctttcccaatctggctaatttcaagtcgtccagctcaagagagatctcctttgggaagccttcatccacctttccatactgagttccttgctgtgcatgcttccctcataccatgtgcttccctgtactgcaatcagtgcattctctaccagttttctccactagaacaatatcaagtccttggcagtacctgacgtatagtagttgcttaatgaacatttattggatgagttcatgagtctgaataggaaagtttgggggtgcagcagtaacattcgtttactcctaatcaagaagaaccagggtttggggaaggggaagccatgggaatctgttaaaccacacagatttttactagctacgtcgtgacactgagctagtttacaaataaacagatgtgccaatgtgtagaccttttctgtgatgattgtcttccaatagtaatgccatctggcagataattttttaaataaacaaatatgacctgccccttcaaagcaaaggtaattatttcaagatatgcttgaaagtaacagctttttaaaagaaacccagagtctggaaaaaaaaaggattttaaaaataaatatttggaaatattcccatcagtgagatttttgtttaaaagatggaactgataggattccttagttgtgatactcactctgccactaacttgctgtcgtaactttgggtgaataaaataaattgtaatgatttcagttttcttagccccaaaattgtggttcacaatattaatttcttagttttgacaaatgtaccacaattatgtatcaacattagtggaagctgggtgaagggtatacgggaaatctttgtactatctttgcagcttttctctaaatctaaaatcattccaacatacaaagtttattttttttaaattatgactcagtagctaccacaaagatatattgtttgcttttgcctcagggcctctgtacttgctgctccctctgtctacacggtatccctcggttatccacatggctcatccgtcatctcctctatgtgtctgctcaaagatgtcttagtgagaccttcctgatcatcatattcagaattacagtccccacctcctactgggaactcctcaccaccccacccacttcttctatttgttttctccatggacttagtaacattcaccatgttattatttgtatattatttactgtgtctccccacgtagaatgtaagctccctaaggacagggattttgatctgttcagtttattaaggtatcaaccaggtgctagaatagggcctgatagatggtaagttttcaatgaatacttaaagaagccaggcaggaaatgataatcagaaaaaaagaggaaacgatggaaacaatgaaaaggagacagtgacagctgcatcaaacagttttgttaatggacaacaagagtctaaggcttaattactcatggctaatgaactgaaagttcagctgcatttttccagcactaagccatgtcttaatcatctttgtatccttccatatttcttcatatccttagcacatggtaagcactaatgattgaatggcaagacttgcttgactaaagaggagagggctttgtggggcatagtcataaataaaggtggagacttgtggagaactggggctgacccttgtaaaggacaaggtatttcctaaaatatgttttgtttcaacgcaagaaaagggacacttcactcattttcaaagacaatagagtttcattaagtattgatgctacagttatctttaaataggtaccattttgcagtgttggagaatacctcaagccacaaatgtcaccacatcatttaccatttgtcaccaacaagtggtcaccaagtaggggcagggagtagggagtgctgctttctattagggaagagccactagagaaagagagcaatgagggaagagtttaaaagaaatcattcttcatttttccccctcgggttttaatttgcttactgcaccatatgatacagtagactcacattgacaataagcacagtgccattgattaacgggctgtgagcactgtgctaagggccttaaagccacatcattgcatgctagtccagccataatgctcttttcccttcctatgtttaaagtcaaaacagtgactttgaccatcaatattccttatgggatgttttcatttttccaattatactatacaatgaatttccatgggccatattaatcctagctggtattagccaaaccccatagacactccatatacactatctatgctgctgcatataagcagttatcatcaaatatttataaaataaccattatatcaacagcaacatgttaggtgtttcaggtagttagaagaaaagtaggacatagtctgccctcaagaagtttaccatctaagcggagccaagacacagcaaagagaaaacatggctatattgaatcagtgccagtctttattaagacttttagtaaataaaattgctttgaccttacaatgacatcattcatccagattgctgttcaggttgaaattagatgaagcaatgttgccttataaagcaagcaaagagaccttggtttcattagcagcactaccattaaataacattgacaaagtcacctaaattccttgggtcccactttacttatcttgagaatgggagttgctttgttttttggtttctgattgtctttttttttttaacctcatacactatgcaaatgccaatctgaaaacctccccatttccatccaaaatgtgccatgatttaagaggttctgacctagagagaaagttttacatgctcactaattattgtcctcttatcacacgtacaaaaaatgtgtttgtcttactcttactacaatagtatccaatttgtccaaacctggctggaatcccagtacacccaatttttcctgtttaagctcgttaatgtggtaaataagccctatgggttcagtacattcccaattttggttcatccatatctcttgtatatctttcctcacttatcagcattttactcaactcactgtttccttaatgggaaggaaaaaaaaaaaaacaaagtaaaggccaatctttttcctttattttactagtgtttgtataggaggtgtgtcttacagtataggagattcagatatagcattaaccaaatagtcttgcctaaaataaccatagccagtaaacctgatagccagaagattttcaatcctctaacccccattccaacatactaataaactttaaaaattcaaatacaataacaatcatgtaagaaactggttttataactatgcctggggtatagtttcaagagttcccagtgggaggaggttcacttttcattcaatgacattttttactatttggcagattcaccatgtgcttgtataagatttattatattaaaaatttaaaaacaatattggccaacattcattgcacatttgctatgtggcaggccttttatattcattaccttatttaatcctcctaacaaccataaagcaattttttttaaagtttctccattttatagatgaagaaacagggggttaaaaacttattcaaggacatacatttattgaccaaactcacattttatgggaataaaaatatatgatagagataaaaattctgtgagaagttcaattaccatacaaggtgaagcaggagtaccctatcaataaaggagcatgtttattgagtatattttgccaggcttgtagcagtaagttatgctgaaatttaggcagagctccagggctttagttaccggattttaacttgttcattctacagcttccatttctcaaccatcctgttaaaggatttgattggaactggaggtttcacatttggggagagtgttggccatagacagcccatgacctttgtttaccaaagctacctcccttatttctatagatcaaagaagcagtggtgtttctgggtttctatttatggtctctttcattcccatacccacagaaataaatgtgagcctttagggaaagcaaactgtggaacatcttcaggttttcaggtacatagattaggtcagctgaatcagccttcaggacataaatcagaattttgaaggctaagagtttgaaacgagcacagcaaaggtctagttctttgcaaaaaaaaaaaaaattgtctttttgcaaatacctggcagatgtaaataagcttcaaaattgcaatagcaattattttagcaacagatataagtataccaaatgctttttgcacctttgaattgtgttttcattttgtttaattttcacatctagctgagataaaaattagtgggagtggtcattttttgtactgtatctagcatacatgatttccagtagcaaggtataataattcatatgctagcatgagccttagaggtaacaaatgctcattttgtgatgctcttctaatcctgccattagttttagtcttaaaatgaccatattcctttccagggagctcccgtcttatgaacagatcagttttggggggatctctggatttattttttccaatcactgtttctttcataaacacgtattgaggacttactgtgtgtcagatattcttctgggtgctggagttggagctaagaataaacacagcaggcaaataatccatacctgcatggaggttacagtctagttctggaagagaagcaataacaagtaaattatatagtatgttagaaggtgaggagtactatgagaaatattaagctgggagtctggggtgggggttgaaaacttaaattgaattgtgttttagtccattttcacacttctgataaacatacccgagactgagcaatttacaaaagaaagaggtttaattggacttaacagttccatgtggctggggaagcctcaaaatcatggcggaaggcaaggaggcacaagtcacatcttatgtggatggcagcaggcaataaaaaagaaagcttgttcagggaaactcccccttacagaaccatcagatctcatgagactcattcactatcatgagaacagcacaggaaagacccgcccccataatttgatcaccttccacagggttcctcccacaacatgtgggaactgtgggagttgcaattcaagatgagatttgggtggggacacagccaaaccatatcaagttgttaaggaaggcctcactgagaaggtgacatttgagcgaagacttgaaggaaatgagagaatgagctgtgtggagacctggaggacaattgttccaagccaaggaaacagtcagtgcaaaggccctgaggcaaaggtgtgtcaggcatgagagtaaagagaaggagaccagtatggttatagcagagggagcaagggtcctataataggggctggtatgcttagaaaagtagctggggccagaccccatagggctttgcaaggcattttaatgatttggcttttactctgagatgaggatccattcaaaggttttgaacagaggagtgataacaatctgatttcatttcttatagatatattattaattatgcaagagggtctcacaattaattatccaccaaattctgcttaacccatattgccattcaactaaggtgctaatgagactctgagaacttgtgctctaagtgctggatttagataatggagatggggatttggctgacagctcagttggatgactttgggcacttcaattaacatctctgagccccattttccttgtcagagaaacaagtttaaactatacctgccccatggccttattttgaggatcaagtaaaaactaaatatagaagcactttataaattataagacaatataaatgtcaggagaggtggtgatagcaacagtggttgtggttgtgtcaccattatttcagggaaaattaagcccagaacctaagtcagaatgttaggaatgcaagcttccctttcccatctcttcttattaaattactatggaaatggggcctcctcttccttccccagcacttgggatccagaagacaacaaggactcagatgatgccaacagaacatgccagtcaggatcctagcaggaagagttgtcattgacagggtgtttggtagaccggggcctccacggtgggtgggtctgctgtcctagtgagagcgtcacaactttccctctccctggccccataagcatccccagttcagtgcagggcattacgctgtcctcagatgggcaacttttccaagtaatcacaaccctcttctgtttctccaccaggcattcctcctatggaagacttttggacgaccatgactacgggtcctggggaaactacaacaaccctctgtacgatgactcctaacaatggaatatggcctgggatgaggattaactgttctttatttataagtgcttatccagtagaattaataagtacctgatgcgcattgaacgacaatcttaagccctgttttgttggtatggttgtttttgttttcctccctctcctctggctgctacaacttcccctttctggtacaagaagaaccattctttaaaggtgagtggaggctgatttgcagctgaagtgggccagccttgcaccagccaggccagaccaccatggtgaaggcttctttccccactgcaggacccactttgagaaggaccgaggaggaggatttgggttgttttgttaggggttactttcaggggaacatttcatttgtgttatttcttaaacttctatttaggaaattacattaagtattaatgaggggaaaggaaatgagctctacgaggatttcaccctgcatgggagagagcagggttttctcagattcctttttaatctctatttatctggttgtttctgacaggatgctgcctgcttggctctacaagctggaaagcagcttcttagctgcctaattaatgaaagatgaaaataggaagtgccctggagggggccagcaggtcacggggcagaatctctcaggttgctgtgggatctcagtgtgcccctacctgttctcccctccaggccacctgtctctgtaaaggatgtctgctctgttcaaaaggcagctgggatcccagcccacaagtgatcagcagagttgcatttccaaagaaaaaggctatgagatgagctgagttatagagagaaagggagaggcatgtacggtgtggggaagtggaagagaagctggcgggggagaaggaggctaacctgcactgagtacttcattaggacaagtgagaatcagctattgataatggccagagatatccacagcttggaggagcccagagaccgtttgctttatacccacacagcaactggtccactgctttactgtctgttggataatggctgtaaaatgtttaaaaacaaaacaaaacaaaaaagaggcactagtctatctgcaattactcaacgaggcattttcataggaaacagactatgattaatccatttattcttcccacacacttaccttactaagtctttgctttaataaatgagcaaccctgggtatagtcttaaaattctgcacaataaattttgagaaagaattgttcctctttgtaggtatctgtgtattgcaatcattctcaaccaggaggtgattttgccccctgactccaccccagggacattcaaaaatgtctggtgacagttttcattgtcatgacttgggggtgctactagaagccaggaatgctgccaaacattctaccatgcacagcacaacctacaacagcaaagaatcatccaccccaaaatatcagtagtgccgagattgagaaaccctgatttatcacaatgcccactgtgacagaacaagacactcacagattagtgatacgttttatttttaacaaaatgaaatgatgtgttaagtttttatttccaaagtgtttagtttattggctgatgggttgttcttggtatgcatggtgacctttttatttctgtgtgcttcctagagagctttatttcatggcgacaactctgtcttcttgtaacagctgatattagcaagcagcatcttatgtcctgatttcatatagtagaaaacaaacattgggtccgacttcaaaatgtgttgtattgtcctacagtgtcataaagaacctgaaaatgaacttttgtttctaaagttggaccttgctgccatgactgtttagtttacagaaacttgaccccggctcatcctgtctctggctgtggcccggcaaagcactgaaaacccctctggtctcagagacagtaggggcagtgccactttctacaacctgccaacccacacactggagtaattctgaaaaaaattattcctaaactctctaagtgtggacggagaatgagcaagccccagaagtattttacaaccagagtgggtaatgaggagggggcttactggaatcgtcatatctctgaatattgaaaacaacaactaaaaaagtggaccttctcagaaaaaaagggcagcaaatgaccaagggcgccccttctggccgtgcttggcttgagtaactgtctctctttccccacccccatcacagggctttcagtttggcaaaggaaaagcagataaaaacagaacattccatatgtttctttctccatcggccaaaaacattttgacacaatgtttgtgaaacacctttggagaggtgcacttctgaatgctgcctctgccgtaaatcctggggcaagggatcagcctcttcccaggaaccatcgccttctataaaccgtgaactcaagcaggcattttttttttcttaccgaaaggctgctattgtgcaagggcacataatgggtctgttgctcttattggcttccaaatgtgcatggcaaagagagagatgtgggcctagagcagatatattcagcaaggtgacagcttcccataacaattctaacacttcttatcttatgtgagaataaaatatttaagggttgaaccttattttgccaaatgtatcttttctgcttttgaattgggcagaagattttagcaactatattctacaaatgttacttataacacacacacacacatctgaaatatatgccgaaaattgacgtctttgacctcagggagagcacctgtccaggtctgcctaaaggaaatggctccagtgggtctaaacaaccacatcctatccatggataggtctagtcataacactttagagagaatgtcagagcaggagggaggcaagccgcctcttctcggccatcgactgcagatgatgaaagagcgggattcaactttgttttcttttcctgtggccccagtgaaacctcctgccctccctgcacgtctgtgtcttcatttctaaaatgggggtgatgctttcatattgacctcaccccatactacctcacagatgtgttgtgaggattaataaaattatgtctatggtattttcagtttctggagaaaaatacttatagacagtttaactattacatagatatataagtgatctcagtttcttgtttgctgtgatactaatgtgttgttttaacttattccataaaatgacagttgtgtcctagccacatcagacagctatctaagctctggactacccctttgtgcagctgaatcactgcagggttgaccatgcctggtgccacagccatggtttccatttctagatgaaaggatggcctaggacataggtctcaaagactcttggatcagaatcaggagattagggaaaacaggatggatacctgagcactaacagcagtagacgtagacctctgtcctttaccatctgaggtcttctggattctttgtggggttaattttgatttgatgtcatctgtttgcccttcatcttgcttgcaagtgtgcatggttcaatccctcacatccaggaaatgaattttgcaattgggccagatgctaatttgcacgttgattcaccttctttgcctttaagccttttttttcttttttttttttttggcaaatgaatgtaccatttcaactttgattttaatagtgctagttgatattggtaataatgctaaccaagagatcaatgccagatttttctcttggggtaagttagctgaagtcatttaaagatggaaaggtgggaaaattctttgatatttgatgtcattgtatccacatttgttgtaagacatattgcataccaattataattatatcaattaaagttgataaaagcttcca

SEQ ID NO: 682 - DNA, 99598 bp, Homo sapiens
ttattttggcagccttatccaagtctggtacaacatagcaaagagaacaggctatgaaataaggtaagtctatggctcatatgttttttgttatttttatgttttcaactaattatattttttcttaatttgtgttagcagtattcccatctatctgcactaggctaaaatagcaatatcatatattttaagttgccatttgaaatatgtagtaccttgtattaaacaggaaaaaatatttctaatttttttttaaatacaggattttttttggcccaactcttcattataacttttgtaagacttaggtggaatcatagcaagttttgtttaatgactctatatgaaagaaaatgagtactgattaagattttgaaaaatagatgaataataaagtatgcttaaatatattttaagaaaatctatataaaatagaatgctacatttataaaacattactgttttctagctgaccttttaaagatcattcatcaagttgttatacaataaagtattattcatcttcataataaatatgcagagaaagggtatcaatatatattttccaagaagagttgcttaaaattactgtaatccaaaattacagggatcatatttttttatcacagtaattttaagcaattgttttaaattttgttttgatttttctagacaaaggagagtttgtttcatgacaaaaatgcattttttaagacttcccttatcaaaaaggaaagcacaattctcattattgacttcttggtagcaaagtaggttatcacttcaaatgagatttacacttatttaaagttgtacactaaatgtaactttgtcatttctcaacataacatcacgcaactgggcttcatttttcgaacagctttgtatgttacctgttgctctgtttactttacattcattttctttgaaaattactgatgcaataaacagcttacatatctggaacagaaaattgtatactaagaataaatgctaatctgcagatattcatttataagctatactaaaaaattaagtttttgcttacttaatattattctctgactacttttataatttttgctaacaagaatgtaacgatctaattgaggaaattaacatatacataaataattgcaatggacatttaatatgctatggtaaatgaagaaaggctagattaactgtgcctcagagtggtaaggaactcaccatggcatttgaattcagcaaaatttagaattcacctagaagagtggatggggagggattgaaattgaacagcaggtatgaaggcaatatgttatctaaaaattatgctgtggtgctggggataaaatgaaggcataattctaaaaatactttgaagataaagtcagatggacttattgaatgattgaatgttgtaaaacatatggaagaaggaaaaaaaggtgtttaggttgggacaactgggtacatgagttgacatagttacagaacagggaccattgtgagaccaaaaaaaaaaaaaaaaacaaaccgtgattttaaacccaataatttattaaagcacttactgtagtaattctaagttctactttggtatatgtctttgaattaagatttatactaaaatcatagaatacagataatccatggaaacttgagaactaagaaaaataagatatatgtggtcaaaattaaattaaacaaatatgctttcagataattattggagatgtgttctttcctgtctacatttgggtatcttccatatgctacctcaaaagtataatgtcttttaataataaatatgtatttttgatataagagttttgtatatctcatttgctgctgtttgatgaaggaacttggtgaaaattcaaaagatttttaaacagagtagcaactcccaaatatatactattctatcaaatatatgtatttatgttcttttcgacaatattgtggaaagtagtgttggaattagagagaggagagttcaagaaaaaaactgaagtttttaactttgaactataacttattctttgttaagcttaaagttcctgatcagtaaaatgtgaataactatttccttcatagaattgttgtgagaattgagaaacagtgcaagtggaagcctttgccttgcaaaatgctctaaatgagaaggcaagacacacctacttgaagatctttttttccatctgtattttcatcttagtgtactactactactgtaatgtgcatcagtaattcattccttttactttaaattgcatgtgttgcttacattttatatcagtataagtttcaggttattaagtacatgcttaatatattattaagtaagtgcttaatttaggatattatgtaagtgctgtcttcaactctgcattatacatagtaaaaaaaagaatatgtaatttcatgagaattgttggtggtttattatagttatatattttacattttaaatatatattcttttctgtttttagatggcaagaaagaaatttagtggattggaaatctctctgattgtcctttttgtcatagttactataatagctattgccttaattgttgttttagcaactaagacacctgctgttgatggtaagtagtacattaaaagcatggctacattatcgtgaagttaggaggaagttactccacaatagttataggttttaaaaaataatctgtgtaagatgaaacacttatagaaaaatccagggtaagttacacaattacttccactttttctattcattatattccatatttcaatgatgagctattgtaagtaaggaatccatgtgctttgacatgaattgccttccctagctacttgacaaagagcaaagaggcaaagggatcaaatcgttaatgtaaggtggaataatcgcctactggtgtgagcatcatctcattagtgggaaaacctgggtttttgctccagccttcacacacttgcaaaggaaataaggattttagcaaatattctttgttctggttagattttattttaaggagagagagaggttgtatgagaaaggcaggtagaggaaagttgaaaaaagacttggatagtttaattatctgtttctgaatattttaattctaatttagagttggtacatacggaatgctgaatctctttcttcattattctctcttgagcaaatcagtattgtaaaggatgttacacattatcttctagactacagttagcatttcctattcctgttaatcttttgttttacctacttccagaaactgagagcttactgtattatgaagcaatatattttaatgatatctcattgctggaatgttatttatatggcgttggtatctaccattcttcgctattccagctttctctactttacctatcaaattattcccttgcaagggataatttgaataactttcacctactttcctcttctctaatttcttctcaccttctctatatgtttttcataactcatattgctccatcttttcttcagctataaaatacaagttgtaaatacagtatgaatgtatattttgttaccttctgaatctacaccaagtccttttgtaaatatattttgtatttcttcagaaacagtcaataggattctacactgtcaattttaaaagtatgattggatcttttccttttgatgactagtgcttgaaattgtgggtctttttaaatgcaaaatttattttaaaattttcattttatatgaattcatgtattctttcaaaaagtacttattacttgataattctgagaaaattaatttaatgtcatgttttattttattgagttttttcctcccccagaaattagtgattctacttcaactccagctactactcgtgtgactacaaatccttctgattcaggaaaatgtccaaatgtgttaaatgatcctgtcaatgtgagaataaactgcattccagaacaattcccaacagaggtctgcagcaaaagtctttaatatttttaatgaatatatacattattatattaagataattgctgaatattggatcgatcttatttaataaagatctagacataaattaggctgaatttatcattttattatagcttcctattaaaaatgatagataatagaagttactgaccttgctttcctttatctctgctcaatttaaattaacaagttaatattcatccatatttaacaagttatagttaattttacaaatcttcatgaaattctgtcatctcaaatctacttctttaagaaagtatacctttgataatatagaacatttaggagggagtatatatgttccagtagagtatttgtaatgatagcattaagaagtatctgtggaaaacaaaatactcattttatgaaaattattaattgtttttaatttagcaattagaagtgaagaagagaaaatggagaaaattaggtgtaaccaattggattcatgtaacccaagttcactcttcctttttttccccacaaacctgtgtgggaataaaagtcattgtgtgtgggtgtatatgtacagtccttcatgggtatcctcggggaattggtttcaggacttctgaggataccaaaatctgcagatgttcaaatctctcaaataaaatggcagtatttgcatataacctatgcacattctcctgtatactttaaatcatctgtagagtatttataactctaataccatgtaaatgctatacaaataattgttataatgtattgttttttatttacattatttttattaccatgttgatattttttgttccttgaaatatttttgatccacagtttgttgtatccacagatgcagagggctgactctatatattgacattttgcaaatatttgcatttgcaaatatgatatgcaattacaaatgtcaccttctccactccaccttaccacacacaaattaactgaataaactataaaatttattttgtccctattctgtcttccctacatcatagtaagcatgcaattttctaattaatttgaaaaaaaattgaaagagatgagattttcctttgagtaacattacaagtaataggtcctatagcttacctgctgatagaagagctaaataacatagtatttactgagatacactgaggaaagtggccagatattctctttacttaaccttcttaggcagagcttgcagtgggcagagatcgcgtcactgtattccagcctgggtgacagagcgagactccgtctcgaaagagagagagagagggaaagagacagagagagagagagagagagagagagagagagagagagagagagagagagagagagaaatgattgaagctaaacatagaattctattaggaacaatatgggttttgaaggtcttatagggaaacaatatttgaaagtcagtggtttacatttttcttgcctaatattagtctttagtgtcaacctaaactgttagattgctgaagaatgttttcagtgtgaaataaactatatttgtgaagtaagcaagttaaacttcagccaatatatttatgcttgttatttataaaaatacaacttacagttttaaaagtttaacttagtatatctcaaaagaatttgagtgttttcttgacatttttaactaggaaaagtgcaacttaaaatgattttaaagagattatcatttaaatggtatcttattcacaaagttttggatttatatggaagcttagactgtttttcaaggctaaattaatattccagtgtcactttgctagtttacaggcaaaactggaattagaacagtggtatgcaaatttcaatgtgagctcatgtttcacgaactcagtagtcactgttctttaactagcatgtcataattttctaagtagatgaattttcaaggtagcatttttctattataggaaatggatttaaaaaataaatcataaaggaatgaaaaatgaaatctacctgaaattagaaaacgggcctaaatatttgcctttttttgctttaggagatgttgcaattttcaaatatgatttttattcaaactttgtcactcagggttttttgttgttgttgttgttatttatagctatgtatctttaataatacttttcattaaataccctaaagattctttaaaatacttcaaatgttaattttccaccatcttaacggatcaactaaagcaattatttatcatcttaaatatatacacttactcttttaaatatttgagaggcattccatctgactaaatattatttgttccaaatgcagtggtagagattgaagttggttaaagtaatgattttctaaaaatttccttaatttaaaaaaaaagatttatcttaggttttcatatacatgaggatagatcatgattgttaaaattggaaaattggttatattaaacttactgtataaattattgtatactagaaatggcatgtttattgtatattagaaaggacatgtttgcttattgcacaatgatgacaaaatatagaataatcaaatggttacctaggtaacaggcataattccatgcaaagtgcattagctcgggctgccataacaaaattccgcagaatgggcagcttaaacaatatcaattattttctcacagtcttggaagctagatgtccaagatcaaggtgtcatcaaggttggtttctagtgaggcctctctttctcgcttgtagacagcttccttctcattttgtcctcacatagtatttcctcttcgtgcacagagagaaagagatcttcgctgtcttttcctcttcttataaggacaccagtcctaatgaattagggccccacccttatatccttatttaaacttaattaaccccttaaaggacctatctccaaataccttcacattgggggttagagcttcaacatatgaatttcgggggcataatacagtgaatatacatatctacatattgaatacacattatatattattacatatgaaattattacatttaatatataatcacttataatgtatatacatatatatgataaaatatgttaaaatatgataaatttattatacctttatttgctagagtttaactgtgtcagatgaaggcaaaaggaaaataattagatgagaaattaaaaataatgaggaaaatgcctaaaaccctgaaaaataggaagaccaactaaacataaataacaagtatcaaaatcttcgcaagataaattaaaattactaatattttgaaagcaacaacagggagatacatttttaattaatatgttggagtgtatatgtagtaggttaaataatgttttccaaaaattcgtgtctacttggaatcgcagaatatgagcttatctgggaatatagttttccagaagcaattagttaagatgtagtcgtagtaaattaatttgggccttgcgtcgaatgactaacgtccttataagaggaaggaaccacacacagagacagacagggaagaaagccctgtgaaatggaagcaaaaattggaaaaaggcgcctataagccaaggaatgccaaggattgccaggagccactagaagctagagagagacaagggagaattattttgtgaagcctttggaggcagcatggctctgctgacaccttgagttaggacttacaacctccagtacggtgagagagtaaatttctgttgctttaagtcaccttttccatggttgttatgaaagacataggaaactaatatggcatattttcaggaaattaacgtaagcctattttactatatatttttaattatgtaaattgtgattatagtgtgcttatttctttcctcttattttttaaacttagcacctttgtgtgtttatagatgtatttatataaatgtatttagagttttatatacaaatctttcatagagactgctgtaagtaattttttttgtagaattgtctctttgtattgctaggtatttctacaggttagataactggagataaaattgcctgatcaaaagttgcacacactttagactctaataagttattagatccaattgtaccccagtttgcaatgtatatgtgtatatgtgtgtttgggtataaatatataaatacatactcaaacacacacacacacacatatatatatatatatatatggtgtttagagagattttatatatataatatatgtatatatacatatataattatatatgtatataatcatatatgtatatttattatacataaaaataaaactatgtgtatttttattctatataaacatattttatatataatatatactttatatataaataaatatatcaaaatatattttatatataataaatatacatatatcccatatacttatctatttaaatattatataaaatatataaatatatagtacatatactatatatattatatacgtgtgtgtgtgtgtctgtatctgataccattttaatttgaggataaaataggagaaaggttagtgcacactttcagctgattaaaatggaggcttttaaaaacttattttcatggaaagtaagcaaaggggaaaatcctacaatttttcaaattatgaaagtgtgtcacactattaaatttacatagatttataattatactgctattcatgcatagcatcactattttgctaaactatttataaataaacatttataatttttctttcacttcagatagtatttccatatggttaataaaattactgagaattcagtattttgctttattaattgaatgctattgcagcaactacttgtgatacctggcacataaactagttaagatagtttaaataattaaatatgaactagtaagtaggtagaattaaatcccttacacattttaagtgggtttaaattcaaggccatattttcatcctcctagtttaaatttcagcttgatacataattagtacaaaataaatatttcagttcttccatgtcaataccatggcaacagaataaattataattacttagagatcaggttcctttaaaatacataagcttacaaaaatttgtatagatacgtgattttaataatcacatctcaggttataaatttctgacagggtgtaattaattcaatttattaaatacttgtatttcttccaggtagaagaaacaaaagagcaaatgctattttggcatattatacatttgaaaaagttagattattttaaaatattcattccttggaaaaacagagactgggacatctgataatagtagtaattatataattcctttaaaaatattttatcagggaatttgtgcacagagaggctgctgctggaggccgtggaatgactctcttattccttggtgcttcttcgttgataatcatggttataacgttcaagacatgacaacaacaagtattggtaagaagtcctctgttataatgattcaatatgatatattctaactggagcgaaaatgtggaaaataccttaaatagaatcaaataagaaatatgttcctgagaatgttcaaattccttatttttgcatgattgtaacaaatttaaaaagtactcatttgtggtaaatacaataacataaatatatttaataattgttaacattataaatcaagtcactcatggcagcttttttttattctttaaggagttgaagccaaattaaacaggataccttcacctacactatttggaaatgacatcaacagtgttctcttcacaactcaaaatcagacacccaatcgtttccggttcaaggttcggtttttaaggtttccaaagatttaatactaaaagacatttgatgggctgggcgcggtggctcacgcctgtaataccagcactttgggaagctgacgtgggcggatcacaaggtcaggagatggagaccatcctggctaacagggtgaaaccccgtctctattaaaaatacgaaaaattagccaggcgtggtggcgggcgcctgtaatcccagctactcgggaggctgaggcaggagaatggcgagaacccgggagttggggctttcagtgagacatttgatgaacacacctttcatcctacaaatacattttctctcttgagaaatatttattccaaggcaaagaattaattaaactgcacttctctcaaattgtttatgcaaatataacatacgaataataatagtgtgctctgcacttatttttggaggctttaaataatatcgttcatgtaaaatatttagcttaatgccttgaagaaaataaacattctcaagaaacatttgaaaatttttattatttaaactacaggctatgcagaagattaatctaaaatttaatttcagaaaagtgttagtgtcgtatacatgcaacataatactttcactgattataaattttattcatgattttaaaaactatgattcttttttttagcacgtagtttactagtataaatattttggatttggaagtaaaaacagcaccaaattctttgtatatcacctttttagcaataatttcactggaactaaatttttctttttctcagtgattctgctttatttcagtgcttctttttagtttctataatttttttaaacaaaatttcttatctttatgggtaagattcttatctttatatagttatataaggacccaaacactgaaaagcattgagattgattaaattcacaaaggtctaatattctgtaatcaatatttggtaatactgtcatttttatatcagtcaataaaaatctgtacttaattttatacataatacttcataaccaactaattctatgtatttctttaaaatttatacactttttctgtgcatagccattcaaaaatattaaaattaaggttctgaattaatactcttctatgaaactaatcaccacgttattttttatttggaacttgcatttaataattcagaactggaatattaaataatagtttagaatccagtaatgctaccttgcttaaatctttccagattactgatccaaataatagaagatatgaagttcctcatcagtatgtaaaagagtttactggacccacagtttctgatacgttgtatgatgtgaaggttgcccaaaacccatttagcatccaagttattaggaaaagcaacggtaaaactttgtaagtgtattattttacaattatataagtttattctattattatagaattggaaagtcttaatttcaagacattttcagtagaaataaatttcctcccaaaagagggtaggtggataggtttataaaaattacggtgataaaggagtttggtttcttgtggatgaaagatactggaacataaattagaatctacaaataaaggttgaacaaagatgaaggtggagagcttcactaatgcaaccctagccttgcatatatttgtacatacctagaatagctcttgtgtctttcccccttatatttatcgtattttgttgccaatttgtagaatcagacagttactattcaaagaccaaagaggagttatttcccatattaatattaaaataatttatatatatgtagaatccaatatagaatgaacaccttcattatgattgtatgaggggtgtaggtgcaagagatttggtaatttcctaggaatggtttcaagataaatgctcttgtatccctaagaattgttaataaagcaattgtcaagattaaatctcagcaattactcttattaaatgtatcttagtacttttgtttatgactttgtgttaaatcataaaaatattaaatgccatgtgaaataagccaggcacaaaaaggcaaatactgtatgatctcccttatatgttgaatctaaaacatgttgagttcatagaagcagaaagtaggattatggtttccagaggctgggagtggaggagaatgggggagatgttggtcaaaggattagacagaaacaacatgtttttgagaccaatcaacatgatgactatagttaataataaaataataatttaatatatattgcaaaagtactaagagactactataaattctaaatgtgcggtaaaaagtatgtggtgtggtggatatgttaattagttttatcatcaaataatgtacatcaaaacatcatattgtatcccattaatacagacctccctcagtatccatgggagactgctttcaggataatccccactcccccactgagtataccaaaatccatggatgctcaagttccttatataaaattgtataatatttgcatataaactatgcacatcttcttgtatacttaaatcatttctagattacttataataatgaatacaatgtaaattatatgtaaagagtttttatactatattgtttagtgaagaatgacaagaaaaataagtctgtatatgttcagtatagatgcaccattcttttctttccccttaaatagtttccatccctggttggttgaatccatgaattcagaactcacagatatggagggctgactgtatatgcaatgactaattgtcaataaaaataaaagcatacaaatcataaacatcatttagcatttctggtagtacatatttcatctgcataacacataaaactttttgggggaaaaatgctttcaaacttaatttttaagtgtggaagccagtaaaatactgtattttaaaatctagtacctagagcaagcagaattgggtttgaaacttggctctcctgcctaccagtttgtgatccctaaaaacatcaattaattatcccagtttgtgtcatctttgaaatgtgattgataatggtagttatgctttgaacttgtgatgaaaagtaaagaaatggatgtgaaagatattggcaaaaattgtgttgatgcagtgaacaaatttcttttatggggtaatttgtgtgtttctaagaagtgaccaaagctaaccactggcatgtttataatgaaatcttctggatgatgttaacataaacctgtatctggtagaatatcatatatatatatatatatatatatatatattagattatttctttatttcttttatggtgcaggtttgacaccagcattggtcccttagtgtactctgaccagtacttacagatctcaacccgtcttccaagtgattatatttatggtattggagaacaagttcataagagatttcgtcatgatttatcctggaaaacatggccaatttttactcgagaccaacttcctggtgatgtaagaaattatttttcttgttataaataaaatcactatattgcagcagatgaaaatcttagcatatttgaaaacagcatttattttaactgatcaactaaactatttgaatgtcactgataccaatatagaagcttgtttagcttgggagggacaattgataggttctaaattgactcagtgaccaacagattttgtaaaggttttcacaggatttccagtttaaaaatgttttattttgactttcatgatcgtattttattattcctttttcactcaccttgtacttatatccatcaatagctagctattgcactagaataattccaaacactgttttacatgtcttcatataatacaatgtctgcctagctaccagatattatctcacgcatctctgtccttcttactgttctataatatatagtcattttccgtaacttcaaatctttgcacagtttgtttttttggtaactactgaaacttaatgttctttatcactcatatatcattcagcactcaatgaaaattttatctcataagaacttctcccaaactctcccataagggcttagtctttatctttatacttgacttagtataataatcctattagtgtattattcctgtatatgtttgtttttatgtttgttgctcaaaaaatgtgagatttttgagaccaaacatcataactttaaaaaaatatgtttgattcatgatggatttgggtcaaacgtttgtcagttacttctttttaaatggcaatgctaactatttctatatcaaagataaaccagtgagtagttgttttaaagagtttcatttggtacagaattattaataaattttactaatctctgtttgcagcatcactatctataatcgacaccagagtgagactgtcagagctaatttccatacatcctttcctttaaaaatccatatctaattagtcaggaagtctttttcctttcatcatatcagtgtatttccagtttgtctctatcatgtcagctcttcatcagctctcaagaaacagactactaaatttttattaaggtacatatcattttggaagctcctgcagtaccttgggcatacatgggcctaactgataaacatgccattaccttatcatgactaagttattattttatttatttttattttttattttatttatttatttttgagatggagtctcactttgtcacctaggctggagtgcagtgagggtatctcaaatcactgcgacctccgcctcttgggttcaagcgattctcctgcctgagcctcctgagtagctgggattacaggtgcgtgtcaccacccccagctaattttttgtatttttagtagaaacagggtttcatcatgttagccaggatggtttcaatctcctatctcgtgatccacccacctgggcataagttattaaaattaatgtaattaaaatgaaataggacagttaagtaatatattaatagtattatatatgttatatattttatacattactatattaataatgttaaaaagtttgaagttttttgttttacctataatatttcactggtacatatagtgaagacaatttgtgtagaaacaggagaagtaaattatagcaacaaattaattcatgaagagcatataaaatatataatctttttgtgttttaaacatatttgaaaatcgtattttcaaattcttgccttatagaataataataatttatacggccatcaaacattctttatgtgtattgaagatacatctggaaagtcattcggtgtttttttaatgaatagcaatgcaatgggtaagaataattcatttgataatatatttatagatttcacttgaaatgttttaactgctctctttatttcaatcattcatattgtatgtgagagtaaactctattatagttaatattaacatgtgacattattataagaagattttgaaattaaagacaaaatcaatttttgcatgccagcgcatctattttggggagagtatgctatgctgtggtattcaggcactctattttcctttcaaaggaatgttgaaacacatccatgccaatgggtgttttcattcccacaatctcatttgtcgagataagtaaacatgccactacaaatgaaaacaaaaaagatgtctatggaagtagaaaaaagagtattttttttagtttatcataactcatataatgtagtattttattttgtaatattatgagtgtagtatctaataggtgaattggtgataataaaaaattaaagaaattaatcacatttcagcaggatcagtttattacatggttttccagccagttactgtgtcttacatttagaaaagttaaattaaaacttttgacattttgtcttttagaaattaatatgtgataacttgatctttcagataatcttcaatttaaacgactaattaaaaatgcagttttagagaaaaatcttttggtcgccagagaactaatcctttgcaactaaccctttgcaacacaatatccaggggagcttttgccaccacctgtgaaagaaaatagctgggatattttattataagcctcagacatgttggcgttttacttttttcctatgttattcctgcattcaatatttcattatttcttaattatttaaacatattgtaaaataatgtagttaatacaaattaatttaaatggactttgcaattaattactataatccttttcactatttacatataagtttaccaattttattttgcagagatttttatccagcctactccaatagtaacatatagagttaccggtggcattctggatttttacatccttctaggagatacaccagaacaagtagttcaacagtatcaacaggtgtgtttcaggtctattttataaaattttttctgcatacttttatttcatctaacatgaccacatatttagatgactttattttacatagtaggggcctcttagctaaatgttttcgaaaatcttatcatatttaagatgcagctgggtgttttttttttcccctatacaatgaactctacatatactcaagtatctatgtttctgaattcaaaatttcttacctctaggcagctgagttcaagaattggaattcattgagatgttgaatattatatatttacttattaatgactttatctgatggaataaagcaaaaggaactatcttatttaacactgaggataggcaataaatgtgtaggtcatatatccttttggtcaaaatcctagaggtaactgagttgtgagaagaccaatgaatctagccataaattcacagcaggtaaactccaggaaaattggctcttatcctggggacttcagaaggttgagtttgaaacctagcctgaaactttacatctccagttactatctaagcaactcttatttacatattaagtaacatcttgtatacctgagcccaatatgggctttagagaggtggggaacccaggacctacactgaagatgattctaaaactttcatgtaatttctctcttttcactgttgatatatatgattcctggtgttacaatggaaaagaaaattattttcattggtttaagattttaagattatgcctattttaaaaatattattttcttgatataccttttgacataaaattcccatttgcaaaaatgatctcaaaagataattgattactataaaaaattttaaattaggatccaaaaagctgaaatgagagcagctaaggttttttgcagtttaatcatttacaatgtctaatcattcccaagttcatgtttataaatgtaaaatttagaaaagaagcgcagaaagtttacagtatctgtaatataaaatcataattacagttctaggctggcctacatatagactttgtgtgtgattatcacatgaacaagagagagaaacaacactctgatattccaattgtcaaacataagttggcatagctatctcccacatgttaagtaaagtcagcagaatgtcaaactatttcaaaaagaatattgttacatatatgttgattcttcacatatatatgagaaaaaatttatgtcaacatatatgttgattcttcacacatatatgagaagaaatttcaatcacatgtctaaatctttaattctatggaacatatggtgtttaggagtatagtttaaaacatactaattcttgagagctttatttgatatcaggtttatttgatatcaagtttgaaataagtttagtatttcatttgaatagaaaacaataacccaacatgagtaattaatttctttttgattgttacctagtaactttttacatatgtatcatggagaaatcatggatcctatatatatatatatttttttttaatatatataccagatatatatgtatatatataatatatatatgatatgtatataaaagcctaaaccaaagaaaatttattatgttgagtatgattatgcatcatatataacctaactggtgaaaaaaaaaacaccagttacatccaaatttccatgtgcaaaattatatcatctgttgtaatgtgacactgatattctcttgcactgagattgcctgggccattacagaaataggaagagatggcgatccatttgtccccaggaggaagaaatgaagctgaggcactgcatgtgaataagaaagagcctatgcaataactgggtgggagcattgcagaacatatattttattaacatttttgcaaaccaggagatagataactgccaaaatgtaaggaaacagaaattctgtacttttaaacatcttttctgtttttcttgtatggtgacttgtaatagaaaataggagtgtggtggaaaattttcccttttgttatttatttgttgcttttcttgtattatcttatttaactttctacaatagacaaaacatatcttggcaaaagctactttctgatatgctacactttctaatttttaaacacaaactaaaacgtgaagtacaagacatgaacttgttaaaaatttcataacacattcaaatagaataggaaattgtttagaatccaggtaacactaaaggtttgtttaaattatataaacttaaatgaattttagagatataagaaaataagaggcacattaaccttggttattaatgctaaatatatttatttctattcaaactaattacatgctcatttactttaagcttgttggactaccagcaatgccagcatattggaatcttggattccaactaagtcgctggaattataagtcactagatgtagtgaaagaagtggtaaggagaaaccgggaagctggcataccatttgtaagtagaataaagggtccgtgggaatatatatcaagttaaatattgtcacataataagaactgtaggaaattgtcaggagtatctactatatacattatatcatataattaagaggctgccttttaattgtaaagtatattttatctcatatgtaatgcccttgcctcctgaaagtacaaatatatgcttttgaagaatcaattgttagttatactagaacagaatacatattccactgtaaacaaaatcatatttagtttttaaaatagaccttaattttagaatctacatatttttaaaaaattttctgaaaagtgtatttttgatttttgtatgttgaaatccacgtatataaaaacaatgcattctagtcattatcactgacaaatatgaataatcacttaatgcttttgtacttaataattagaaaaaccagtttacaaacagtacaattgcttctttagtgaaatgaaaaggatggacgttcatttattttttaagggttatgtttataatacacgttcaatggagttaaagattgacttgattagagagctctttcagtactatgtattgaaatacaatcttctaactttcaggatacacaggtcactgatattgactacatggaagacaagaaagactttacttatgatcaagttgcgtttaacggactccctcaatttgtgcaagatttgcatgaccatggacagaaatatgtcatcatcttggtaataatcaattataccttaatacatttttagtgtttacacgtgtaagttaatagattttgcagtttctgctttctattattaggaccctgcaatttccataggtcgacgtgccaatggaacaacatatgcaacctatgagaggggaaacacacaacatgtgtggataaatgagtcagatggaagtacaccaattattggagaggtaaaatatgatatttattaaaactatgttgctcaaattttcttctctgaaataataaagtttctgtggatgtgcgtgtgtgtgtgtgtgtgtgtgtgtgtgtatgtctgctttcaagtctgaattttatattttaattgtggagaaaaatattagacaaagaaactactccaagaatttataaaacagttcttataagaagtcatgaaaaatgtaaagatataccagataaatttcttcatggtttaatcttagtagattgtatgtgtttaagaatttatgcatttcttctaggtattccaatttattggcatatagctgctcatagtagcctctaaaaattatttacatttctgtgttatctgttgtcatgtctccttttcaatcactgattttgtttatttgggccttgctttttttcttagtctagctaaaggttagttgactttgtttatattttcaaaaaacttttcatttcgttgctgttttgtactgtttgtttttcaatttcatgtatttcttctctgatcattttttctttccttctactaatttagggtttggtttgctcttgcttttctagttctttaagacatatgattaggttgtttatttaaagtttttcaacttttttgatgtaggtacttactgctataatttttccccttagcacttctttcattttatcccatagactttggtacattgtgtttccattatcatttgttttaaaaacatttgtaaattttttcctaaatttattcattgacccagtggtcattcaggagcatattgttcaattttcatgttttcatatagcttccaaagttattcttgttatttatttctgattttattccattgtggtgtaagaaaatagttgatatgatttcaattttttaaaaaaaaatattttaagacttgttttttggcctgacatatggtctacccttgagaataattcatgtgctgaaaaaaagaatgtctgtagccataggatacaatattctgtaaaaatctatcaggtccacttagtttataataaagattaaagacaatgtttctttgttggttttctgtctgtctggatgatctgtacaatgctgtacaaagaattctctttagcatatcttataggacttgtctggtgttgatgaaatccctcagcttttgcttgagaaaggctatatttcttttccatgtttgaaggatattttcactggatgtagtctactaagataaaagttttttttttttttttctctacagcattttaaatatgtcatgccactctctcctggcctgtaaagttacactgaaaagtctgtgccagatatattggagctcctttgtatgttatttgtctcctttatcctgctgctttttgccttctttctttatccttgacctttgggaatttaattattaaatgtcttgaggtagtctcttttgggttaaatctgcttggtgttctatatctttcctatacttcaatattgatatctttctctaagtttgggatgtttcctgtcattttccctttcaatatactttctatctctctctctctacttcctctttaaggccaataactcagatttgcacttttgagactattttctacatcttgtagccatgcttcattgttttttattctttttttgtctcctctgactgtgtattttcaaatagcttgtcttcaagctcactaattctttcttctgcttgatcaattctactattaaaagactctgatgcattcttcagtatatccattgcagttttcagctcaagtttctgcttgattcttttaaattatttcaatcttttcattaaatttatctgatagaaccctaaactcctccacgttatcctggatttcactgaatttccccaaaacagctatttcgaattttctgtctgaaagttcacacatctctgtctttccaggattggtctctggtaacttatttagttcgttttgtgaattctggttttcctggatggtcttgattcttgtggatgtttgtcactgtctgggcactgaagagttaggtatttataatagtcttcacagtctaggcttgtttttgcccatcctcattcataggttttccgggtattctaagggacttgggttttgtgatctaagtctttgttaactgcagctgtatctgctttaggaggcacctcaagcccaataatgccatggctcttgcagactcatagcctatggctagcgctgttctaaatgctccacctatgggtgtaagctgatttctgcccctttgtactttctgctgtggcaggccaatactgagctccaatgcaaaagaccacaatcactttgctctcccttcagaaagtgcacagattctctctccatgcaccatgggcactgttggggaatgtgagaggggtggtgtatgcaatccaagactctctttcctaccctcttcaatgactcttcacttgatatgatgctaaaatcaggtactgtgatcactcacctgaatttggttcttaggaaggtactttctttgtgtatgggtagttgttcaatttgatgcttctgcagggggggatggtcactggaggcttcttttcagccattttgctctgtctctctgccataagcttcattcttatcacattcatccaacttaaagtttcccgtgaaagtcttttaaataattatgaactccttttgtaaaaaaagaaagcccacacaatttcctacccttaattaacatttcacagaacacatgttaacaccagctttgttccttatggacagatcagacagccgatttgaaatgtttggatacaaaacaatataatttagctcaacttatctgaaattaaattctccttgcctaatgtgattattgtaagtaataagtcaaataatgtaaaataatttcaagaagcctaaatcagaaaaagacagcataatacacatagtgtttaacagcatggactcaggtgtaagactgtttgggtttaaattgctgctgtacctgttattagtagattgactttgaacaacttacttaacttctctgggcatcacttctctaatctgcaaaatgactttaattacagtacctacctcatctgtaagtggtgataaaaatagtacctgctttcaaaaattctaatgaagattatatgttagtaattatgaaagtacttgaaatagtgcccagtatgtatcatattcatgtttattcatacaaataaacataaaagacagtttttaaaattgcttggaggcatacacctttggaaataagctaatgtgctttattttatgggatataaaatatattatatagaatatttattgtgtatgtattaaactatcctacaaggatgcttaaaaacaaatttacagtcaaaatagcagccttataccatgttctgataatttttttcttcctaaatgcttcatgatttcacctttttttaactgctcttctttaaatgcattttaaagtcatgatattcttgtaaatttatatatgagtcacatatacctaaagaagtagaataactttatttttttttactattctcaactttattaatttgaaattccatttatttatttttctattttttatgtatatatgtgaatgatctattcttctaggtatggccaggattaacagtataccctgatttcactaacccaaactgcattgattggtgggcaaatgaatgcagtattttccatcaagaagtgcaatatgatggactttggattgtaagtagctattttaaaccaatggttttggtcaatgaccatagacttatttatctgtaaaaattactaagtcaacaaaatatttttttctgatgtattcaatgtaaaatttaaagctactataatgttttttcccagaatggataaatatacccatcgtgtgcataagtaagaaaacaaaacaaaacaaaaaatgccaatcaaggtttttcttttttagcaatacactgtatagaataaattttatttctgtatgcaaggttttgttcctttatgactaatactttacctgaaaattagttaataagatttggtgataagcctattgcagtgcaattagcaaaacatttattaaagttgacaacagtcaagcaacagcagcaatatgatctgaataagcccctgccctttagagacttctctttagtaagctatggaagagaataaataaaaattggcaataggttaagtattactatatctcaaaaaagcaacaaacagaatcctagtttgctcataaacttattaaagaaaaatacagtcttgtgtgatggctcatgcatgtaatcccagcactttgggaggctgaggtgagccaatcatttgaggtcaggagttcgagaccagcccgaccaacatggtgaaaccccgtctctactaaaaatacaaaaattagttgggcttggtggcacatgcctgtaactgaggcagaagaattgcttgaacccgggaggtggaggttgcctgtgagccaagatggtgccactgcattctagcctgggcaacaagagtgaaactctgtctcagaaaagaaaaaaaaatacaagtgtttaagagtttctttaaatgaagttgtgtatctgtagttattgatggcctgctgctagggatagaaactaaattaccactggcaagaatttggaaaaagtacataatggacacactaaggatgactatattttctttggtttttaggtccacaccatctctattttccttaagtgctcattattgattcaatcattattctaattattcacttatttattaaatcaatcaatcatttagttagcaaatatttattttgcaccatgtatctatcagacatgttgttgggaatacaaagatggaaagattatgtttctgctgacaacatggatttgggtaaaggattagcataatcttcaggattcctatgatgacagtaacaaaatgaagatgaaaagccttcagttatttaacataaaatcagtgatatcacaccactaataactagcaattggtagaaataaaaaaaatttactgtgatcttgagctttatttttaattctagttcttatattatttaacctatattgaaagtttctttagtcttttatttttttcttagttaggagccactttgattacggtaaagttacaagtataaataatactgtaggaatagtgagacagagcctgattgtgttatagaaagagagagtgttgcatttcttgcattcattgagaactgaaattcctgattcacctccaaagtgtgggagagaaggttatctgagaaaggcagagtatttccaacactgctacagaagcactgtaactaagccttaaacaaacaaacaaaaaacacaagaagcagtataatttcaaagatcagtgaacatcagtgaactaatatatatcatggataaacagtggatattctacttttagctattacttatctacttgccatatcacactgctaagtggtttatctaattatttcactttcttcagattattgtttctgatccagctaaaacaagttgttattcaactgataaagttttaatatttatgtcaagtataaaaatagttttataatttactagatttgtaatttagtttccatgctaatatttgtgaattttaggtttaaatattaaaatcactttgggaaatgatgtgagcttaattgtcattgaagtatagtttttgtgtataaaatataataaatttgaattctctttttttacatcatttatgggataatcgaatagttgagaaacaaaagcctactgtacttaatgtaattaagaccaaaactatgatttcaaaacaaaagtgttagtcaatatttttaaaattaaaataccatttccattttttgaatacatatgcatattttgatatcattgttgttattttggttctattcttaaaaatctaataagcaaaattattcaatgaaaaaactgaataatttaatatatagtatttggaaacataaattttataagaagatatgcccaaataagtttacatatccaaataactagaagcttatttggttatattctttctacatttcatgtgaatcttataaaaatgaaattcttttacaaattcttttaaaaatagggctatatatatttagatttagtttaaatgtgagtataaaatgccatcagatcactatcacaatttttaaggaattttaaagaaacttgaggtacattctcagaaacaaagttgacgatttttttttgttttttgagactaagtcttgctctgtcacccaggctgtagtgctgtggcgctaacttggctcactgcaacctccgccacccaggttcaaaagattctccctgcctcagcctcccgaggagctgggattacaggtgcacttcaccacgcccagctaatttttgtatttttagtagagacggggttttgccatgttggccaggctggtctggaactcctggactcaaatgatccacccgccttggcctcaaaaaatagtttttaatagacttaagatgatttgaatgacacctacatatctttagatgtttttattactatcagtccactgaggcttttgcctcatgactacaatgttccaaatctactagttgtaatattaaaaatcttaatttaatgcagtggtatatgacattaaataactgtagtttcacttaaatcatttggataaattagagaattaaaatgcttttataattttcaaaatgccacttaaaaacactacaatagataaattcttttaaaatatgggtagtaagtttaatttaatacaatcttgctatatagacatactttagacatatttaaggaaggttactaaaatattaaatgtcatgtattatgtaaaatatggttaaaattatgaaaaaaaattttgcctcagtaggttaataatttatattcttggttcaaaaaactattttcccttttattgtgagctggcaaaataatcacattctgattcaatcatgttgaaatggtcatacaataaaacttttaaatatttttaaaattattttcagtaaaaccaattaattattttctaaaaaaaattttcatccttaaattacataataatgtttactttcattgatgaaagattttgtgaaatttatggcaaatttacacatatttaactcaaatagaaatgatattaatatcatagatgagtgttttacccttgcaattcctcaactatattatatattcggatgttaaaattgtttagaaaaagactcttttaaaatttaaaataatgcagctcactattcccaaattatacatttcagcagcagttttttaaaaatttaatgttattggcggaatcatgaagaaaaatgtagtttacctacacttatttgctgtgtaactatggtataccattattaatttctactggacacaggaaacaaaattgaatataacattccagacaatttcaaaaaaataactcaatgtagctttagatatttttgtactttggaataactatattaatttctctcatttctgcttactctgaaaacatttgggaagtggaaatatataccgattaaacgtgtcatgataacaaatctattcttttttcccttgagcaccattaatttatcatttcaattccatgtatcaaatttccttagcttctttttatatccatagttagaaacttttatgagaatattttgagaataatagagatgaataatcatattgagtgtgcttgggtcagaggaactcaatatttatggaagcttttgcaaactaaataagtatgtctagttatagttataattttatgaaacaaatgactacaatacaaatgattcaccattacatgtgtttaaaaaattattttattagtgtctttgagtgacaccatcggtctcagatattttctaatctgttaataaatattatctgggaagtctcagaaagtagtatgaaagataggtttaatgattgcaaagttaatataggagtgttaaggttaaagggaggattgaaagctgaaataagaggggaaggattcaagaagctgaaaagcagtgagtcttaaaatatgggcatgatgtggatggggaaaaggaaatgtaattaagaaaatctactttttctgagagaaataaaagtaacacagacaaggatgtgactgaatgtgatgtctttatgtgaaaggagactattatagagatgagaaaaataaggcttatagaagtcctcaacacagtttgcagagaagaaagatgaaatgcatatttcttgagtatatgtactgtgatatatgattttataaaatttatcttttttagtgcaaagacttaactgggttatggtcacatagctagcaggcagtgggacaagattggggcctatgttaaaatggctagaaaatccatgaacataatatcccaccactatttcttcaagagatgtttaggtcttggttctcagagtgtgatcatgctcacctggggttctctgaatgtttcagagattctgtgaagccataactattttaattaaaatactaaaggctatttgcctttttacagctttcattcttttatgagtgtataggagctgttggtaggcaaattttgctgctagcaatgtgcttagcacatcatagaaactaggtaagtttaaatgaaaccaaacatattgaatcaatgaatatgcaaggaatgtgtatattaatggactcataatgagaagactaacagctatttagaaatgacttaatacttataattaatgtaattatatataatcaaaactagacacatgaactacattttgattgtttaaaatctctctatcccatctaagatacttatctgatatagacattctgtttatttttaggttggtagcttatatttatcttctaggaattaacgagcattatggttatcttatataaaacattttcaaacaactagagagtttctgctaataggatttataattatgtaaaatctgctgttcttcattttgtatccattcaggacatgaatgaagtttccagctttattcaaggttcaacaaaaggatgtaatgtaaacaaattgaattatccaccgtttactcctggtaaaatttatttggttatctaattactgttttaattgagaataattttgtagttgactagtaatttctaacatatatttctaaattacaatttttggtatagttctaaaaccataaaatcaatttgtttatcttttcttcagacaaatattttctgcctaggattatatttaaatagacaaatctagtataaggctttaaaattggtccataaatatatgatgtacaatatagtttggtataggtatatttctatattgttaaaggttatttttaaagttaaattatttgttatcgaagttaggaaacagagtatttgccaatgtaaatataaatctaatagttaatccaagtttagcaagagtgaaagatgaggacctaattggaacttattttaggtttaattggattgtcctttgtcattgtttttaaccaaatatggaatttcataacacaaatgaaaaggaatatgacatttatgatggaaaatatataacttttataatggaaaaatataagaaatgtttcttatgtattttctcaaagatattcttgacaaactcatgtattccaaaacaatttgcatggatgctgtgcagaactggggtaaacagtatgatgttcatagcctctatggatacagcatggctatagccacagagcagtaagtgcaatttcattcaaagacttctttcatatttattgcttaaaaatgtttttgataatttatcaatgtattcataattaggaaatagcaaagttgaaaaaagaaagataatattttatgcctgctaaaaagttatggcattcaaaatatcagttctcttactaatattcatgaatttgggactcatttattaagaatgacatggtaggctgggtgcagtggctcacacatgtaaccccagcacattgggaggccgaggcaggcacaacacctgaagtcaggagtctgagaccagcctggccaacatggcgaaacccagtctctattaaaagtacaaatctagctgggcgaggtggcaggcacctgtaatcccagttacttcggaggctgaggcagaagaatagtttgaacccaggaggcagaggttgcagtgagccgagatcatgccactgcactccagcctgggtgacagagctagactcagtctccaaaaacaaacaaacaaaaaagaatgactctctctctctctctctctctctatatatatatatatatacatatatatatgtatatatatatttaactaagactcttttttgtaactcctagatttaaattatccttcaaaattttaccatttctgaatataactgtgttttaagcttgcatctcacaattagcctgggaaaatattgccccaagaacaggtctttaactatttttcaaaaagaagtattttaattaaaatgtagttttctaattaatatccttctaactaattttctaatacatttttataaaatatgatacaaaacaaaagaagaaaacaatcatatgttcattatctactaattttcaagcattgtttatggtcctgtgatacaatagtcagtaaaccaaatactattctcaatatacttacgattttctcataattaaacagttgtgattgagtgtttattcaaatttgtatttttatggtcttaaatcatactgataccagaactcttaaccactgtattcatggtgttacttcaatttactttgtaaactcaatggagtattacatgaagcagtgtttaagttaatatatcctaggaaagaaaaaacaggctatgtttcaatataataaagattataacatggaaaagcacttgagaatgtagttacacatttcctaattgtttccaattatgaaaatgttatcaataatagttaggtaacgtgagtgatgcttgtagttgtggacagtggttaacttctagaaaataaaaaaaaaatcttcttaattatgtaagttttatcccaaccttgcctgctaatatttgaaaatgtcgaaataaatatataattggagtcatcacactacaaaaaatgtattaggttcaagttcaggtataatattttctatttataagggaattcaattactttaaatattatatttcaaaaccaaatgttgagtggataccaaatgcccatgtttatgtaatttgataaaggatgattggagtcattcaaaatttagtgatttctaaaaattccttttcactgtattttaccagaatatatttaaataagtaaatattaataacaaaatacaaaattgatataaaattttgacataattattataaatattatggcatggtgtattagcccagtttcatgccactgataagacatacctgagactgggcaatttactaaagaaggaggtttattggatttacagttccacatggctgggggggcctcacaatcatggcagaagacaaggagaagcaagtaacatcttaggtggatggcagcaggcaaagagagagcttgttcagggaaactcctatttctttaaaaccgtcagatctcatgagactcattaactatcataagaacagtgcaggaaagacccacccccataattcaatcatctcccatcgggtttctctcacaacatctgggaattgtggaagttacaattcaagatgagatttgggtggggacacagccaaactatatcacatggctttggaattatgaaattttagaatttaaataccaactttattttttaaaataaattgtatttgttaatttggttttatttttagagctgtacaaaaagtttttcctaataagagaagcttcattcttacccgctcaacatttgctggatctggaagacatgctgcgcattggttaggagacaatactgcttcatgggaacaaatggaatggtctataactggaatgctggagttcagtttgtttggaatacctttggtaagacagtttcatagagtgttactcataaaagctacaattacattaatttttaatgtaatcttaattaattttagtaaaatgatcaaaaggcatgttacagaaataattcagttttttatttttatggagtttatgaggaaaataagaatacagatggtatctataatttccaaccattaaagtgggaatgtagaactaataaaattcaatgaaatcaagataattgaggaaaacaaatataaatataaacagcatataaaagcttatatgaaagatgtaaagaaaaaaataagatggtgaagaaaagttcaaatacattggttataaaaataaatgtcagaagtctaagtctacttaaaatattagattaccagtttagattttaaaagataatcttttgtttacaatatatataaaacataagaacagaaaaaaacgtttaaaatttcaaaagtggagaaaatgtgtactaggaattgtagacatgaaatatctgagaagtctaactctatcaaacaaaaacatagcatccaatattgatattcaagactaaagagagacactacataacaaaaataatgtagaaggtattataaaactatagtgatttgttttctttcatatgcacaaataaaacaaacaccaaaaacccgatcaataaaagtaacacccccacacacaatcttgtgtttgaaaattgaaaaataggctggacaaggtggctcactcctgtaatcccagcaatttgagaagccgaggtaggtggatcacttgaggtcaggagtttgagaccagcctggccaacatggtgaaaccctgtctctaccaaaaataccaaaagacgggcatgatggcaggcacctgtagtcccagctacttgggaagctgaggcaggagaatcgtttgaacctgggaggtggaggttgcacagagccaagattgggactcacttttttgagaccctatctcaaaaaaaaaaaaaaaaaaaattgaaaaacatattatcaaattcattcatgagtcaaaagataaactgaatagaattgaaaaaaaaaaacaacctaagaattaactgttaacaattttacttattaaatcttgggaaatttcagctgttaatatttaaagaaaaacttactgatttaaatacttaaaaagaaagaaacgctgaacagtgagtgaagtgcatgaatttaaaaagtggaaaaggagaaacaataaacctaaagaaagatgtaagtaattaaaataagagaaaaaattaatacaatgtaaacaaaatctctagaggaaaaattttaaaatacaaaggtggctcttcaaaacttttaataaaatagatcaatttatagcatatttgttaaaaaaagaaggaaaaacaagcaatattcaaatgtattttagtataaggtgtcacttattatagcaaccaattaataaactgtaaccaacagtcaatattaaaactaaatgtaggactttttgagaaaatataagtgatagctaagtaaattaaagatataccctgttcaataataagaaggctcaatatattaggaataggcattctctacaaaatgttatcaaaattttgtggaattccaatttaaacaataaaagggattttgggaaacataaaaggtgactctaaacttcatatggaaaacaatacattttaaagaagtagagaaaaagaatgaggattagttctaaccagataaagctgtagttattaacacaatgatactggactgtggatatacaaatagattaacacagcaaaataagacacaggcccatgcatgtataatttgttaaatgacagcagtgaagggaagtatcaactatttatatggactattgactcagtatttaggaaacaatataaaatgtgtcaatttctcacaccatgcacaataaacagtcccagatagattaagggacctatgtgtgtaaaataaactttatccatttcagaagaaaatataaaatggtaaatttatgacatcaggttagagaaataatttcttaagcagaatacaaggagaataaatcttaagagaaacatacataaatttgactacaacaaaatgaaaacttctgttcatcaaaagaacatttgaaaagttaaaaattaaaagcaactcaccaggaaatgttattttcaattcacatagtctataaatgatattcaatttgaagtgcctaccttaaatctgtaaaaattaagaacaatagaaaaataagtaaaagatataaacaggcaattctatagaaagagtaatctatagggacccaataaaaatatgaaaaacttctcaatttccctgtaatcagagaaatgcaagtaaaaactgtggtgagatatattttatgaagaaaggtgataaaatttgtctgaaaatatcaagaattggcaagaaaatgaagaaggggaatcttcgtgtgctatatagtgcttgcaaatggttacaaacagttccgattatacaatgcacattataagtaaaccagaaaaataatcctatgtatgtacaccatagaataagaatatgttttttacatattcacaaggatatctatacagggtgagtaacccctatccaaaatgtgtgggaccagaagagtttcagatttcaggtattttcagatattttaatatttacatatatgtaatgaaatgacttaaatgagcaaatttatgtttcatatacaccttatacacatagtttgaaggtaattttatataattttgttcaggaaacagttttgactgcaacctgtcacttgaggtaaggtatggaactttccacttctggcattatgttggctctcaaaatgttttggattttgaagtatttcagattttggatttttggattagggatgctcagcctatatataaatttcacggaagaatttttatagtcatgagttcccatatactggagaactagagtgacattaatataattgaatttcacacaaaaaggaaattacattataatgcatacaacatgtcatttatactgttaagaaaacatgcaaaacaatgctatatattgtttatagatacatatatacttacacagaaaaaataaagaaatgtttgtaaatggtaaacactaaattcaagatagtattttctggagagtccttgaataaggataatgcagtcttacatgggtacacatcgggcaaagctcaattttattcagaataattaatttcaaagctcaacatgaacacatggtcacagtttgttattttattcctacagttacatattatattataaataagaaaaatcaaatcaaagaagttgagttagggattaagaagcaaccaacatattttaatacagtaatttcatcttttacaatgaattaatgagaacatcaaaataaaaaatgagtaaaatgtaaatacaaaaggataagaaaatgcataaagggacaatgaaggaaagaacatataaaataatgcaactagagacaaggatagagcaaaaatggaaaataaattggtttaaggaagcatatataaaaggagtaaaacaaattgtatataaggcacattcatcagttgaggcatacagtgtgatgctctaggcaaatttgagaatcttaacattataaatagtaaatatatttgttatttaggttggagcagacatctgtggatttgtggctgaaaccacagaagaactttgcagaagatggatgcaacttggggcattttatccattttccagaaaccataattctgacggatatgaagtaagagcctcttgttctccatgttgcgaaataaaaaacaaccatagtttttattaatgtacttaaattaaatctatagagtatatggtctgaaagattgtagcataattcataagacattgttagaagtccctctctcaagtcctatacatattttgtatatttttacattttttaaaaaacggtcaaataaggaaatcatgaaatgcaatgtattcacagcacaaatattttagttgagactaacgcataactgtacaagtatattaagttaccggtattttaaagtagagccaaagcttttagagtatgaattcttggattctaacaatgtaatttccaggtaacttttatacaaagaaaagttataatatactgtcatggattttgagtttgtgtttagttcatgtaaaacaagaatttaaagatagtcacaaaacaattagagtccagcgtctttcaataataaatagaactggcatagagacaaaaacaaaactaacacttttaaaacacggttttggactggtaggagcagaagtgccagacaatacaaagctagtctaccagccgtgggaactcagcatactgtgggctcatgatcataggcatgtttttcggagagaatagtaaaattcagttaaaccattaagtcaattaagtatctgttggttaagaaaccgttcagtgttcacacactggttgcatacagggcttatattgtgtttgagaagagggacaactactgagctcagcctggaaggaggcatgatggaaaaaaattaaaaggtacaaattggagattagtttcttcctaatacaccgaaatgatactttcagaaaatgtgtgtccatgggagattttgatagaaattacatgacactctgcgttcacttgtattctccaaaatgctgatgataagacagaaataaattttgaaatttattggtgaaataatgtgaatgacaaagggagtgggcatgagaaaatgaggagagcctgcagaccaccgttcaggtctgaacttgatgaagatgaagggaaggaaggtggtttggtaggcagaatcccgaattgcgcctagttctaaccaagtttcaatcaagtgagtggggagtccttcagggaaagttgaccactgacctttcttgcatctcccaagaataggcctgcatggtgttcttactatgctcattcaaggctgggagcagcactgggaaacatggttttcagtgcaaacttaatagtggattcagggagacagtagttgaggtcttcagttaatattgttatccaaagcaagaggtctaaacaggcttgtccatatcagtgttacttggctgaaggagtcacttatctaccctgagctcagtagagaggctgcactacaaattgtaagtctacaggctgtccaggtagctctgttcactgtgttcctgagccagcaacctatctgtgataattctaatagcaatgggataagacagtaagtccttaggcaagcccatttcaagcctctgctttagtgtgtcacatataataacatcctattggccagagtagtttgcatgactgagcgccacatcgaagcttgggtaggcaccctccaccttcactggtagggattacaacattccatgataaaggctgtgggtacaaggaagcatgaaacattgatttacaagataaaaattctattttgtaaaaaaaaaatttattttttctgtggcaacgctttaaatatgttgaaatgtccacttcaaaattaagtttaattaaaatatataacaaaacctagaaatattcattcagacactttgatgatgaaataggaataattttaatttctcataaacaagctgaaatttatgtagttgctttaaaaagcagattaaaatgcttctactttaattttcactcatactttagctttcttattttaatttctctttctatctcacagcatcaggatcctgcattttttgggcagaattcacttttggttaaatcatcaaggcagtatttaactattcgctacaccttattacccttcctctacactctgttttataaagcccatgtgtttggagaaacagtagcaagaccagttcttcatgagtgagtactacgtacaataattataataataccttttaaagtatgttcaaacatacacagaaaagtttaatggaggtaaatcaagatatcaattaaacttctgctgcttgtttttacattggtgtaaatgatttgaagagctatataatgatgccagtaaatataattaattggacaatatttaggtagaaatgagagaattaaatagaacttacaaggaaaagatatataaaatatgttaggatattatatcagtaaagagattaagcatagaatttttaaaaatacatcaactaaatattgaaagtataaactaaatatagatcaagagtagagtataaaacttacaaaaaagggaaattgtgctcatctttgcatgtatctttgaccagagcagggcctttctgtgatgacttaaagatccttttaaattcaggtaaaaactagagcttaccacaaaaaagttaagtgaagaaagtagaacatgaaagatttccgatactttatgaacctatcttataggagaaaataatttaacagaagaatttttgtataaataaaaagtaaccttgtcatctgtgatagatttttctgagtatgagataaactttctccttctctcttttcttccttccttcttcccttccctaccccttttctactttccttccctctgttcccatcccttcctcctatcctccctcccctccttctttccttcatttcttccttttcctttctccctcttctactccccccttcttccttcttcccttcctcccttccttcctgagtgtcagatgaacaataaaggatgtaagaaccatgaattgaaaatgtcatctgaaacaagcacaattcaagataacaacaattcccaggaaaaaactgaaaagataaactgaaccaggaatttggataaacttattttttcattattatactttaaacattgtcattgttcttaggttttatgaggatacgaacagctggattgaggacactgagtttttgtggggccctgcattacttattactcctgttctaaaacaggtaggctctacaggtttaataaccttattgtttgaactttgtataactaaatcgaccctacattacaaaacatctgaataatagatgttactcagtggactgtttcaagctgataaacatcaagttggaattctacgatgtgacacaaatttcaaaatgttataaaaatattaagtagattgcttaccaaatatgtgatatctaactggggacaagaaaattgtatgaagttatttttctcctgaaaaaaaaaactgtattatcaaatcaaaatcaattcataataacaaagagttctcatttaagtagacatatacattgaaattttgctcaattgtaaataaagaggaactggaaaactcgctgatcagatgaaaatgttggagaaacactggagtgggttggtaattattacctatttttaaaaggtgcatgtgtccattgaggtatacagaaataaacatattcacattcacaatgaccatgtgttttataacaatacacatatatgcatgcattattttaattgctatctaaattacttttttatttacctctttgcttttttaagttttacaatatgatattatctaaagctaataaaatagccctttgattattatctataggaaatattggagtgtaacaacataaagtttttttcccttgactatgaaaacccaacttaatatttgataagatcctccttgttaaaaattgaaattaaaaaatacatattatctttattttagggagcagatactgtgagtgcctacatccctgatgctatttggtatgattatgaatctgtaagtaaccttaacatactaatggactcacaagtattatattttcaaacacttctacatagaaacttaattccatagaaacttaactacatagcatacatatttttagaatttctgtcattactataaaaaataataatttcagactttaaaaatgtgttaaaatttgtgtaagtataccctttgttgcacatgagctagactcaaatatgaagttatattatttagcataaagagatattatttatttttaaattttggaaataaaaggttagcagtaatttaggaaggagtggcaacttattttaatgctttttcctattttacatatttatcttattgccagaagacttgagtactgagctagtcttatatatttgtttttatatggtatattcaaatatttgaaaaaggcttttatttcaaccttgaagaggcaaaataacagcactcaaatacaccatccattttttcaattgaacaagaccttttgagcaatatttatttattttttttttttgaatttttttttagtagagatggggtttcaccatgttggccaggatagtctcgatctcctgaccttgtgatccgcccgccatggcctcccaaagtgctggaattacaggggtgagccactgcgcctggcctgcaatatttattttaaatgatattattttgcatatcacttatattggctaagtataccctttatttttacggaaataatgattttaagaaaatccttcctaaaggcataaactttaaaccaaaacaaagaataaaaaagctaattaaagtactgttaattattgtagaaagaaaatgagtctctttttgttgatttttttatttttgagaaagtgaacttatttttcctctactttgttcagcaaactgaaaaaaaaaattctcctaaagttagaaaacaatatattcgtattcatttggatgacatgaattgctcataataaaaatgccttttaattcttgtgaaatagagtttaaagtcttcaataatattaagaatgtttttaatcttccaattattagggtgcaaaaaggccatggaggaaacaacgggttgatatgtatcttccagcagacaaaataggattacatcttagaggaggttatatcatccccattcaagaaccagatgtaacaacaacagcaaggtaaaatgaaaaatcattagttgaaatctaaaataaaattcaaatcttaatatttcatatttgcattaagaattagagataatatttagtttctgcaccagaagatatttgacatacagaggtaatactgaactataaccatcatagctataaaaagaatgaaattatttatattattataaatatcttgattttcaaaatttctaatttacttagaagttaacttcctgtatcaaaaatttacccacattagcataattaaagataatatttgattcttaataactatacaaaatgtgaatatttgttatataattgagtgaagtatttgttaatttttacatatttgaatttccatacatacataaatcccaatgtatttctttctgctaaaatgctttaagttcataaatgaactggatattttatgttaggtaaagagcgagagagaaactaaattgctcactaagtgtaaatctcagaaatattttctaaaaataaaagaaacttgaaaatgctggtgctccatttcacatattcattctgagtacaaagagcacagaaagtgccgtattgaatttacatacttttccctattctgccacaacccaacaggaagttactctttattccttaccctactgtattttcttcataacattaagaatatctgaaattatattatttattcttttcttgtatgtagtatgttagcgatacgcattagtaattagtaatttaactgttttggcattctggaatggactagtatcacaatgtaactgatacaagagtatgttctcaaaaaattgttatacaccagagctgtaatgatcaacagcaacaaacactttggtaaatgcatactggaaggaatacatcctatacagtccaggagatgcctggtaaaatgtaactaaaaaaaaaaaccatatttcttgactacatctcattactcctgttataatcatttcatttataagattcttacagattccactaaactttttttaaattttaatcatatttttttttctcataagatgtagacttaatacattgagatttaggattacacaggttgagttgagccttaataagacatttaatttttcttgtttgaattaaaatattatattatttcaattttgcaagtatctcagccttcaaaaaatccattattgcatttattacatttattcttttgacttattttctacatgtataaattatttcggtattcacataagaacattggtatcggtaaattattaatacatataaatacaaatttattgatgtcaatgtccttactgaattcagggcccataaaacagacaggttgaagtggacttgtttataggatattgtattattatggatttatttttaaccatatatgcacctaatttttcttaacagccgtaagaatcctctaggacttatagtcgcattaggtgaaaacaacacagccaaaggagactttttctgggatgatggagaaactaaaggtaagtctgaaagtaatacgctttaaatgttcactctgataatgggaagttttggctttattgatataggttgtatcattttttaaatatcacgaatttttatttttaattcctaatgttttttatctgtttcaggcttttaggctactttaaaacttttaacattgttatttgctttatctatatgtaactaaaatatccagttttgtgcttttgtttgttgtaagtctttggcaagatttttaatctatctttatctattagattaaaatagtcaataaattctcagatatactaattgcattatattttcaactgttttaaagtaaggtagtgattataactaaaattttgttactgtaaacagaaaataaaaccaacatttaaagatttagttatttaatgtcaaattatttgaggtaagaatatcatcgtatcaattgtttacaatttattttccttattatctttaattgaatttcttgagctccaaacttgggaattcagtataccaaacaaaatgtttaaaagtaatcttctgctatggtatttctaattatgccatagtaagtttgtctatttgtatttaactattcacttacaattttccttatacatttttagaaactttttagaaaaatctcgtttcttctaatagagggctgttaggtatgtgttttatatatgagtataaaaattataatttatcttctattttaattaactacttctcaggtgtattaaggaatatccttgtacaaattttaaagagttacagataaatataggaaggacaacaagaagaaaaagactatcctaaatgcctttaaatgtatatgaaacatgtgaatatttatttatttttgaaaatgtgtatatttaaaaattaccacaggattctataattctctcctaagacttacattcaccctcagttaacattcatttaaataaattacatttatttatggcattatttcaatgtattagcaatcaaacttattctaaggaaagatctattctctgggtgattttctcaatgcaagctatgaattacttgtatcattaacagctattaattataaatattctctgtcttttaattattactattctttaccagtagtcctttccttgataaatgtagtcttttataccatttacctgactttcaaatttatatctccaaaccagtcttctatgtacttctctatttgtttgtctaataaaaatctaaaacataatctgccaagatagaacttggatcttaccaccatgtatctgctccatctatcgtgttccctttgtcagttgatggtaacttcattgctacagatgccaacaccttggaatgggctattatctctcacaacctaaggatttcattggttctactttgatctgaagcctctcatcagttcccccactgtcaccaccatctttcatgttaatttagggcaataacttcctaactggcctgtagctctttttaaccccttttaaaattttattacaatccagcaggtagagtaatcattttaaaaggtgattccagtaattgcatctcttctcaaaaccttctaatgatcctccattttactcagttaggagacggagttttatcgagacctagagagcttattatttgtgctttaacatgtgcacacgtgcatgcacgcacacacatacacgcacccacacacacacaaacacattatcctgtattgctttctatttctcattcaattttagcacaccaatcttcttgctctttcttaaataccctggggtgtaagcacactagggtgagctctcctgtgagattagattccaaacctattctctggcttatgtagtaagccaaaacttagtacatagaagttttgtaaaagtggatttcagctgaacttaacattgcttgtagtcatcaatcaaacaatgttgagataatacctccattgatagcatgtgtggagcaattataagattattcctattactcaaattatataaatactccaaatacatactgtctactgataaagatgcatatgaatagcttactttcatataagtaagtagttaagaatatgaataatataattcaatcagttatctaatatgatacctatgtagctatgtgcatttaaaaagtgaaagaaaaccagaattctgattaatggatttgtaagcaaacatggagacagtaaagtgatcttcagttcaggttctgaatataatattatttcctaggactaaaattttaagcaaattaatgttatggaaagtatattatatgaatcctaggattccctttatattttaacactgtttatgacaaactatttcagtccttatcttcagtttttctttaaagagatacattgaataaaagttatattacatatatggtacagaatcattgtattcatccattttcctcattaaagtttatttaaatttcagactaaagtttatttcaatcttcaacatgtctccagatttattgttttccttgaataaaaaataatagaaaaaaataaaaagatgcaaaatgtattataatatgccatgtcttcctaagaaaaatgtactgttatgaggtttacaagggagagaatatctttcaaaataatacatttttaattatatattatttactgtaagttttgctttctcttaatttccagaaataccttggtagtctttgaaaaaataagcaaggcaaatatgtattcattacctctacttgctgtgaaaatgaaataccattattatataatttagagacaattaaaaaatttaaaaacaaaatctgtttgggatgcttcattaataaacagcatctagtttgttcaaatttcttaagtgttgtataagtgtaaaaccagagcagagaatttaacattgcattttgtactgatcacgatatttttcatttcagatacaatacaaaatggcaactacatattatatacattttcagtttctaatgtaagcactctctttgtacatatacttaaatgcataatttgttcatgcctaggttattcttttatgataaattttttggaaaagatgtttacatttgcctacagattttaatggaatgtaatgaaataaattgttcaattaaattgttatatttaaattgttaaattataaataaattgttaccttaaaattttataaagtttgtgaccatgtaattgatggaaagaaacctttagacttcttgacatgttatgattggttttaggcaacatgccctaggaaaacaatttcaacatatctgaaaatgttttaatgaattagtcacagtaataattggtgtggattttggtttattaaattttgaatagttaatagaaatgattttttcatagattttgggttttttcatacattcttctttagcaaagctaaattattcttcatcaatgttaggactagaatgagtatatatgtgttgcatatgagtaattaaggttatctctgaaaataaaattttctggcatatatataaaaatgaaaatagatattaatgagtatatttctatgtgctacttggatgaggagagctggtgggaatagagatgtagatgatgacctttttttgctatttcttatcggtattgttatttcaggtttgtatctgatgacctaatatataatatcttatactatttttctcagaacacattagatattgtgtgcacacattcatcatatcaggaaggaactaccttagcatttcagactgtaaaaatccttgggttgacagacagtgttacagaagttagagtggcggaaaataatcaaccaatgaacgctcattccaatttcacttatgatgcttctaaccaggtaattacaatcttttaaaatattttagctatcatataatctcatatttaatattatataaccattcaggcacttatcctatttctcctcacagtgtgtattcctttcttcccttcgttgcttccttcttcccttcatttttttcttcactttttctgaacaatattccaatttatgtcaatccaatttgtatttagatatcaacatgaagggaattccttgctatttctctctatatatttcattttctcatgcattctaattatatgggactttctaatattttccataaaaattcttcaaatctgaactctaacctacctattgcacgcaaaagaaaatcccaaatgttttagctgctttagactctttaacaaattggttttgttcatttctttagtctttctcctgtttcttttttagtgaggtctcattgtcctcaaaatatatcttgtacttttctaactttaattttgtgtttacacttttcttctcctgtagaaagccttccttatattgtgatttttgtctctttttacagttgtagtatagaggggaaaaaataacaaaattggatgcactgttattggatgcacagattataactctgctatctctgcttctaaacgcattaaatcaatctctcattattttagctttctcatttgcaaaatgtaatatttcaatcataatgttgctttgggtagtagattgatgtattaaaaaagagactgtagtatttaaaaacacgaaagcaattatttttgtcatttatcttttctccatttatataatactaaattattagtaatattaccataaataatttctaaattatttaagatatagaacattgtcttataatatttttgttttaactcataagacctctggcccagggcttttcaattattagttttcagaaaatatgtactggtcaattattttttatttaataggcatattatgatttatatttcctagcactataagaataaattgatataaattaagtaatacaagcttattgtgaactttatgactctaatagagattaaaagagggaataataaaaaataattttattggttatgtatgcaatataaaggtctatctgtggctatttgtatgtccacttttatgcttataaatatatatatattatatatatataatcttcataattctgctgtgtataccttcataattctgctgtgcatagattgatctttatatgaattttcattccttaaagttttgcaattatgtttggtgggtatcaaaaagtaagctatgcagatgaaaatctaggtgtgggataaatcttgctcacattattcccaaggcatataagcaataatcaaacataattttgaaatcccaattatagacataattctatgtgtgtgacatatgtacatatatgtatatatatacataaatacacacatatatattgcatatatattttctgtttttctagtattttatcaaaactattaatgatttaatttgaagaattgccctcgttgccacattttgtgaaatgtaaaatgtttttttaaatcatccaatgatcagatacagtgtttaatgtttttgtttgtttgtgttttttttttctttttttctttttttttttttgtcttcaaaggttctcctaattgcagatctcaaacttaatcttggaagaaactttagtgttcaatggaatcaaattttctcagaaaatgaaagatttaattgttatccagatgcagatttggcaactgaacaaaagtgcacacaacgtggctgtgtatggagaacggtaataataattttaactattactcatgatatggttatcacataagcattttggtgcaaattttacatattataattttaaatctgcagcatataaactaaattcaagtagataatcatttggaatttgaagttagcatctctgacaggcaattcacttttatcttaattaattatccaaagacatatcttagtaaacgccaggctgaattgatgtgtaaattgctttccaggaactttggataatgtaactttacttaaaaaaataatactctgtctgagagttacactctacttggtgttgactgtagctgatttgcttgtttgggtaagatatgccagtagtggacactattttgaaagagttgtctcaagttattaagacatatgatgttgagtaacgggctacttctcttccactaaggatgataatctcttgccagttattttggctttcattttaacaaaatgatgatggctgaggatggcaggtgtttttaccaatgtcacaggaaggacattgtaaaacattcctcttgctatgcctgtttttcaaattctgggcttttcattacatcattgagttttgtcaacaaatatatttatttaatataaccaaataactaaatgcatctgttatatcactgaggcgagtcaagacatatttgtcagcaatttcccagagacatttacatttgtataaagagatgcatagaatctctgcctccagagaaattatcccaatttctctccattaattgttaaagcagcataatctgtatcactagtgaagaatagggaagaatataagaacagaaaaagtaaggagaagaaaagattctaaaatcaataaaagtcaaatagtgaagttcacttctctaaaccttctcttaagttgcctcttttcagccaaatacacatccattcccctttgcattcaaagtatgctaactttatcaaaacgaatataaaggacaggtgggaacaattcattttgctaaagaataaatatcttctaaacatgaaaatgtgaaattttatctttcctattaaataattttaatgttatatatatatataaggctaatgttacatatatatacatatatatgtatatatatacatatatatgtatatatatacaccacagtttttttatccactcattgattggtgaacatttggtttggttccacatttttgcaattgcaattgtgctgctataaacatgcacgtgcaagtatcttttttgtataattacttctttttctctgggtagatacccagtagcaggattgctggatcaaatagtagttcttcttttaattctttaaggaatctccacactgttgtccatagtggttgtactagtttacattcccactatcagtgtagaagtgtccccttttcactgaatccatgccaacatctattttttttttattttttgattatggccattcttgaaggagtaaggtggtattacattgttgttttaatttgcatttacctgatcattagtgatgctgatcattttttcatatgtttgttggccatttgttcatcttttcttttgagatttgtctattcatgcctttagtccactttttgaagggattgtttgtttgttttttcctgctaaattatttgagtttgttgtagattctggatattcgttctttgtcagatgtatagatggtgaagattttctcccactctgtgggttgtctgtttactctgctgactgttccttttgcactgcaaaagatcttagtttaattaagtcccagatgtttgtctttgtttttattggatttgcttttgtttttggtcatcaaatccttgcctgagacaatttctagaatgctatcttctagaatttttgtagtttctggtcttagatttaagtccttaatccaccttgagttgacttttgtgtaaggtgagagatgagaatctagttttattctcctgcatgtggcttgccaataatcgtagcaccatttgttgaataggatgtcctttcctcactttatgtttttgtctgctttatcgaagatcaggtggctctaagtatcagggtttaattctgggttctctattctgttccattggtctatgtgattatttttatacagtaccatgctattttggtgactatggctttatagtatagtttgaaattaagtaatatgatgcctccagatttgttctttttgcttattctcacttttgctatgcatggtcttttttggttccatatgaattttaggattgttttttccagttcggtgaagaataatgatggtgttttgatgaggattgcattgaatctgtatattgttttggcagtatggtcattttcacaatattctttctatccatccatgagcatgggatgtgtttccgtctgtgtcatctataatttctttcagtagtgtttgtagttttccttgtagaggtctttcacctccttggttaggtatacacctaagtattttagtttattttattttctgcagctattgtaaaagaggttgagtttttgatttgattctcaccttggttgtttttggtttataaaagagctactgacttctgtacgttaattttgtatccaaaaactttgctgaactattttatcagttctaggagctttttggaggagtctttagggttttctaagtaaacaatcatatcatcagcaaagagcgacagtttgacttcccctttactgatttggatgccatttttttctttctcttgtctgattgctctggctaggacttccagtactatgttgaaaataagtgagaatggccatctttgtcttgttccagttctcagagagaatgctttcaacttttccccattcagtattacgttggctgtgggtttgtcatagacggtttttattatgttgaagtatgtcccttgtttgccgattttgctgaatgctggatgtttaaaatgtttttctgtgtctattgagatgatcccgtgatttttgtttttaattctgtttatgtggtgtatcacaattattgacttgcatatgtgaaaccatccccgtatccctagtatgaaacccacttggtcatgttgggctatctttttgatatgttgttgaatttggaatttggttagccaggattttgttaaggattcttgcatctatgttcccagggatattggtctgtagttttcttttttggttatgtcctttcctggttttggtattagggtgatactggcttcatagaacaatttaggggggattccctctttctctttcttgtggaataacgtcaatagattggtaccaattattctttgaatttctggtaaaattctgctatgaatccatgtggccctggacatttttttcttggtaatttttattaccattttaatctcacttcttgttattgatctgctgaggttatctaattcttcccgatttaaggttgtgtcattccaggaatttatccatctcttctaggtcatctaatttatgtgtgtaacggtgttcatagtagccttgaatgatcttttgtatttctgtggtgtcagttgtagtatctcgcatttcatttctaattgagcttatttggactttctccttttcttgatcaatcttgctaatgatctatgaattttatttatcttttcaaagaactagatttttgtttcagttgtcttttgtatttttttgtttcaatttcatttagttatgctccaatcttggttatttcctttcttcttctgagttttggtttgatttgttcttgtttctctagttccttgaagtgtgaccttagattgtctatgtgtgctctttcagactttttggtgtaggcatttagggctatgaactttcttcttagtactgcgtatgttgtatccctgaggttttgataggctgtgtcactattgtcattcagttagaagactttttaaattttcaacttgattttatttttgacccaatgatcattcaggagcatattatttaatttgcatgtatttgcatggttttgaaggttccttttggagttgatttccagttttattttactgtggtctcagagagtgcttgatataatttcaaatttcttaaatttattgtgccctatcatacagtctatcttggagaaagttccatgtgctgatgaatagaatgtatcttctgtggttgttgggtagaatgttctgtaaatatctgttaagtccattttttctggggtatggtttaaatccattgttactttgttgactttccatcttgatgatctgtctagtactatcagtggagtattgaagtcctccactattactgtgttgctgactctctcaattcttaggtctattagtaattgttttataaatttgggacctccagtgttaggtgcatatatatttaggattgtgatattttcctgttggacaaggccttttatcattttataatgtccatctttgccttttttaactgctgttgctttaaagtttgttttgtctgatataaaaatagctacttctggctttcagtgttcatttgcatggaatgtttttttctacccctttatcttgagtttgtgtgagtccttatgtgttaggtgagtctcttggaggcagcagatagttggttggtgaatagttatccattctgtaattctgtgtccttaaagtggagcatttaggccatttactttcaatgtcagtattgagatgtgaggtaccattccattcattgtgctatttgtttcctgtataccttgtttttttattatgttttataggtcctgtgagatttatgctttaaagaggttctgttttgatgtatttctaggatttgtttcaagatttagagctccttttagcagtttctgtagtactgattctggtagtggacaattctctcagcatttgtttgtctgaaaaaggttatatctttccttcatttatgaaccttagtttttctggatacaaaagtcttggctgataattgttttgtttaaggaggctgaagacagcgccccaatcccttctagcttgtagggtttctgctgagaaatctgctgttttcttttataggttagctagtgcttttgcctcacagctcttaagattttttccttcatcttaactttagataacctgacagcaatgtgtctaggcaatgacctttttgcgatgaatatcccaagtgttctttgagctctcttgtatttggatgtctagatctctagcaaggccagggaagttttctttgattattccttcaaatatgttttccaaatttttagatttcccttcttcctcaggaacaccagctattcttaggtttggtcatttaacataatcccagacttcttgcaggctgtgttcatattgtcttcttcttttttctttgtctttattggattgagttaattcaaaaacctcatcttgaagctctgaagttctttcctctgcctgtatgattctattgctgagactttcatttctgtgtttaaggccatgtggtagcatgatatcatcaacgaaataagcttgaatagatgagaagtgttcaaagactaaaccctgggcgattacaaactttagccaaggaggaaatgacaaaggaggcttagaaagaacagctcaagtattgggttggaaataacatgctgggtcctggaagccaattgaacaaagcatttagaatggaagaaatgatcaactatgcaaattgtttgtcagtaagataaggactggaaactgacatgtggatttggcaacatggaagtctttggtaactttaacatgcaaacattagatgtagtactagggataaaagcctagttagagtgagttcaagagaaaatcaagggacaaattagagatagtgagtatgttttgctgtaaagaaagcagaaaaaatagaacagtagtcagagaagttactgaagtgacatttactctaaaaaaatgagaaaaataaaatcagtttatgctgttaaaaataacataatgaatgaaatattattgatgcaagagagagggtggagaattgagggagaaatatttttataggtaaggaggcctgggatagggtacacagatgaaattgttcactttagatagaagccagacagtacacccttaagaagatgagtcaaacagagtatctcaatttagtcagcttaggcccctttcttttaaagagcttttatgaggactcacacaacttctttaaaaggaaattggaaatgtagataaatataatatttctctccaaaatataataatttaataaacaaggaagatagggagaatggattgtggtatggcaaccagccatcaatgccagagtttataattctttttcttaggttttatctctcacttctatgttaaaccaatcaactctgattcttggccagggttcctatttcaaatccaggtcaggatgtaattaaccagtataagaacatgttaaaaaaagaaggattgagagtttcattataagtaacagaattctagcacttgccctttagaggcatgttataatgccatttttatacacaataatcaacaatcaatatgaacagtaagaacaaacatggaatcaaaatttattagtaatatacttgcttttgcagacaacacaatttaatgctattttttgagttaaaaaatgtatgacatttgatccttctgctctaccattctttctctagagtgtaaatgtaaatattttgtataaaattttagtacatgggatcccaaattgcataaaatatattttgtgttataactgttatttcatttttgtattaatgaaacttgtaaatcatacaatgtgtgactaaacgtcagtataattttaaagagtaaaatattacaaggcttataatttctggcaatgaacatgcattgtgtttttagggttcttctctatccaaagcacctgagtgttactttcccagacaagataactcttattcagtcaactcagctcgctattcatccatgggtataacagctgacctccaactaaatactgcaaatgccagaataaagttaccttctgaccccatctcaactcttcgtgtggaggtgaaatatcacaaaaatgatatgttgcagtttaaggtatgcttgatataaactaccccaaagcttaactcatcttgtgagatgagattttgaataatcctgtgattgatatttaatgtaatattaaaggttattaacagatttgataatattttgattttataaaaatattttttcctacacaactcatagctaggtgcccaataaatgaaactgctcattcctgctaactttgtgattaatacaatgatgattttaaaaataaatttaaattcttacaaaatacataagtcatttattatcaaactatgctgatagtgtcattaaaataaacaaaattggatgcctactgtttccattatttttaagttgtggtcttaattttctggccaatgcaataagacataccaaagcaataatttcattcaacttttagagatagcattttttaacttaagaattccaaaggaatccattaagaatagtattagaaatttaaaatatcaacaaaataactagatgtaaaattatatttccaaagatattttcttgtgtattattgctcattatttagaagcagaaatggcaacaaatctcattagcaaactcaaatgaaaaaatcaaataataaatcatcaaaaattataggactaagtggagtatctgtaaggagaaaaactattaaaaatgttcatattaagtattttaaaattataaataagagtaaacgatattttaaatgttaattcactttagctcagtcgctgcttttaaagtattttcatataaatcttagtgaaatatcttttgagacttcataaaataacttttaagtttgtctgaaaaaataaacaccttgcaattgttaaaattcagcaatgggtaaagaataaaaattcatacaattaaaacagtgtggaactggagatagcattgcctggttgtttattgaaacgagacggcacaaaagcatggaagattttgtgtgtgtgtgtgtgtgtgtgtatgtgtgatggcacaaaagcatagaagattgtgtgtgtgtgtgtgtgtgtgtgtgtgtgtgtgtgagatggcacaaaagcatagaagatgtgtgtgtgtgaagaaaggttcacaaattaataatgaagaggtaggttatttaaaaatttatataaaaaagtgtctgtttttaatcatatgctaaaataaaatttagaatgagttccatgtgaaaactaaacataagcctaaaataaatttagctgcatatttattttgtatctggctagcaaaggcctttcaagccacagataaaaaggcgttaagtgacataggtaaaaatctacacattttctaacataaaaataaaatatgttttcacatcaaaaaacactataaacaattagaggacaaaaaaatgggtaaacatctgataaagatgtgacatagggaaagcaattccaactcatgtaatcaagaaaaaatatcaagacctctcataagaagatatttaacagaagaaactaaaatatcaacataattacactcattaaaaattccaggagcaaaatgcagtttaaagtacagtggaacataaatgttgaataataatgtagaaaaagatgaaacctcataagtaggaaatgaaatgattaacaatgaaaaataaatgcttttaatttaacataaattagcattagagtacacattttggtgagaatattaatcagtaaacaaattctggaaagcagtttgtcaatagttatcaaagaccctaaaacggtaagtatactcagaccctagtggtatttaagaaatgtgctgaagaaataaaaacacaaataaacataaattagcattagggtttattgtataataatatgtatgacaaaaaatattgaaacaacttctgtttttaaccatgaaataattttggtatacccatacaacagaatatttagctctaaaatttttgttttgatttcttattatttagaaaacaaatcacaaaacattttttaaaggttcaaaaatgcagtattcagttaggacccattataaatgtgtatgtggaattctatattgatatggttatatggaccatgaatgtagaattagaaattatgtggagaaaaattctaaatattcttgtttgagccattatttaacttagttcatgatatgtacatgctatgtcagcaatcagaataaacttttttactacttatctgcaatagatttatgatccccaaaagaagagatatgaagtaccagtaccgttaaacattccaaccaccccaataagtacttatgaagacagactttatgatgtggaaatcaaggaaaatccttttggcatccagattcgacggagaagcagtggaagagtcatgtaagtaattgaattatttgatataaaggatattttaattttagcttacgaagggaaaagtaaaatgattaacagccttcactgtcctagagtagcatcacacaaaaaaatttaagacgtgttaaataactttgcccattttaatatttctagctaaacatagtccatgggactattttaaaggattggcccacaattttatctacactttggaggtgttcaatttcactattagtatcagactcattcttctaatcaagttgagaaccaaaaccaaaacctcttttaaaaagcatgataagtgttggcaaaaataagtatttggaaacaagtgaagtaaatattttattgaaactgttgaaatagtttattggtgcttgaatctgatagaattaataatttatctgccaggtattagtgaaaataagttacaacatgtaagtctagatatatttttatgttacaatgaataaatttaattttaaaattgtagtctttattttattcaaaagatctataaactataatatattaaaatatacttttatgtaatttaagtttgccatgccattccttagatgatgttatcaggatgttttctggtattgtcaagatatgtacaaataatatctaaaactatatctggattattttaataattttgttgttatgacaatatttttgttcaaaagcatgggaagctaagtcattttataaaaatatcctggtgcaagggcattatttattgtcatttgacaagcattattctcgattaaatagttttccaaaataataaatataaaaagttaaaatatgcccagattacttgtaatacttacgcttcctctccttgcccatgttactttccttcctctttatgttcttcttgcaaatgagttgaataataatatgtttcttgtaacacatttcttcatacacagctatttttatgaacataaaataaaggaagaaaaacacaattgggagtagtaataggagagagttaaacatttgaatatctgttaaacttaaaattcattataatattgatgtatttttattccatatgtagaaaaaaatgtattgtgattatctcaagggagcaggaaaattgaggccttttaatttctaggtcacacattactaagtcatttatgatttcatattaattttatttttaaaaggaatacttgtctaaagaaaaacatgtacaatcatattatttatattatgattctcctataagtatatgaagcatattttacatattccttaacttagctaaaagaaaacatgtattagattaatcatctatttccatttggtacctgggtataattaggaatatggaaaataatattgatttttagataatctaagaaagaattaccgttattatttgtgatactactttgcatatattttgacagacatagctttgttttcttttgttttcagttgggattcttggctgcctggatttgcttttaatgaccagttcattcaaatatcgactcgcctgccatcagaatatatatatggttttggggaagtggaacatacagcatttaagcgagatctgaactggaatacttggggaatgttcacaagagaccaaccccctggtgtaggtaccaacatatgaccactccacgaggcaactaagaccatgagtagaatccaagccacttctttatgggcctgtgctttaggattgaagtaatgacaaaggcattagctagagatctccagagcagctatagcaattttctgagaaacaaacccaaaaagtcaccataaattacaggtggaagtagaggagtggatggataacaatttgcttgactactgtgagaagccaggctttgactcaataccttaactgtttcaaatgcatacaaagaatatgctgattctgtattccctgtcaagtttacctttactccagcttttagaaaataactgcctaaagttttccttgattgtttttacttctcaggtactgatttgatcttttttccctttataaccttcagttgcagttgggtaactttatgtggccaaagtgctaattacatctttacaatgtgtttttatatactcatgactctttttccaaagatttgtctcgttaatgcaacacattttatgaatatttaatgtactgtgcaacaaataatattatctataatattccaaacatatcataaaaaatatattttaatgaaaattattctatttgtatttttcacatgtgatgtatacttaaaaggatatactcagtaccatactataagtctgtgaactattgtaagcattttttattgttaggtgctcaaacagcttgcatttatatcataatactccaaacttaggttattgaaggctgttttctattaacactaacttgaaagaatacattttaccaaaactgatttcttaaaatcccttcagcatttgtaccgatattattagactaatatacttttgattcttgatatctaaaattacttccactagtaattttgcatattactaaaaataaattactataaaatctatttcactggtaattttatatatattaagaatcaaaagtatataatctaataaaatctgactatgattacagtatgaaacaatgaattaaatattttataaatataaaactttaaatgttctataaatataaaatatataaacaagatattttctggacagtttaattgtattcatcacttttatcatttctaggacattttactatggaaaaaataccaatttatagataagttaaacacataacctttggaaataaaccaaactactctaatggcaatagtattctatgtcatttaatgtggaagcatttgcagttgttacatattgtatattaatacaaatatatacatatttgtatattaatttctattaatatacaaatattatagaaacatatttgtaaactgcacgaaagcagaaaaaatttaaacaattatattctagggagacacatttattttaactgaagcatagtttaaggttgggaaacgggaatttaaatatcaagtctcgattgtataataaattttaaaataacattgattaaattcacatgctattgttacttaaaatatattgtgcttatttttcgtatttcagtacaaacttaattcctatggatttcatccctattacatggctctggaagaggagggcaatgctcatggtgttttcttactcaacagcaatgcaatgggtaaaacaatcatttgttgaatgtctcttattttatgtgactttttcataaactagtatacatagatgaaaatgggatgttattttggatttccagatgttacattccagccaactcctgctctaacttaccgtacagttggagggatcttggatttttatatgtttttgggcccaactccagaagttgcaacaaagcaataccatgaagtatgattgcatatttcttttaaaaaaattaaaaatttttatagcataaagtaattctcttagttcacacatgaattttttttaaaggtaattggccatccagtcatgccagcttattgggctttgggattccaattatgtcgttatggatatgcaaatacttcagaggttcgggaattatatgacgctatggtggctgctaacatcccctatgtatgtatatcaattttaaaacaatgttaaatatggaatacgtaaaagtagaatgaaataattaaacatgtatactttaatttaagcagctggtaataatgcttagctttttttactggcaccttatgtattggatatgagatttataaacagtgtctttgtcagactgataaaggagaggaagaaataccattccttttccttttccctccctaatactatcatgctgtgttgtgctaaacaagtcactgtgcacttgatttcctctcacaaactctgggttgtacaggcagtcactatgttctcttcatgttaaagttcacagaaatatgtatcatcaataagataagaaatctgtatcatcaaccagagaacaagttggaggtggaactaattttttttttgccctggaatagataatagttgtaatatataatagagattcactcaatattcaggaagctaagtattccaaagtatccacaaatgatcaatctctgaatttcctcattttttatcaaaattaaggaatcctagggatgctgctgctaacacccaaacattaaaatatagaaggcttgatatataagagtttattctaagaaaaatcagaaaaacctcattataagacattggtatttatagtagggtccaatatagagttcctgaataactagtatgggaaattaattatatatgttgacaatacagaaacatgcacgtggaaatttattatttaaaaggaggtatacattattgaccatactttctataacacatagaagaagaaattgagataatgtcaactaacagaaaataattaacaaattttgtatttaggcttcaattgaatattccatgatacaattcaaatatttgttggtttaaacatacttgcaattacctatcttaaaacaattcttgcttagataagcagggctgttatcctaaaagtgactttgatggatattacaagaacaagattatagtaattgatgtaattgttaatactccttttgccaatattagaattatttgaaattacccgatatttgctgtatacttcccggaaacagcaacatctctttctgtatatactgtacaaaagtcctatttgtcatttaacctaatttcatagtatcataaatcctattgctcagtgtctttctgtttcctttgaggattacataatatataccaatttagaacagtttttacctctaaatcaaaatgactaaatgaactgttgacaaaacagaacatttatagaaagttgttcttagaatactttacatctttacatgctacttttattccttgaacactaaaccatttaattctttttaggatctagtgaagaggaactcaaactttcatattgctgttacttttataagtatgataaaatatgatacacttactattttgtattttttgccctactttgataatttttggatatttcaggatgttcagtacacagacattgactacatggaaaggcagctagactttacaattggtgaagcattccaggaccttcctcagtttgttgacaaaataagaggagaaggaatgagatacattattatcctggtcagtacttggagtttacctgagtcttatttcttgtttccattaattcacctaaaatgagcaggtgggggggaagatgtttcaaaatagaaagtatataactttgagtaacactcccaaatctaaaactctcttcctttagcacttcattttatttgcatgggttgtgatcagctacctttgtatttaggtatatccctagagatttaaaaccaaagctgagttaaagggaagctgttttctagttatcatccaagctacaaattggcctctatttatgggagttatcaaaatgtaatggtagattttctatttttatacaattattagttcattctctgggattgcttctgatgtttttcatatttaaaaacttgccttcagattggtgattcagtgaagataattttttatcactatcttataggaagtaagctagttagccagatatctcaccatagaaataaaaacaaaataaaaacctctactaatctttcttgaaatgatagctgatgcatttccaagagtccttagaatttccttctaagaaatttggagggaaatctagctagaacactgatgtttgtatcatttgtcatttaatgtgagagcacattattatgataatgtagtaatgaaaacttatgcttcataatcactgtccaagtagttacgcttttttcatgtgtaccttgtttatatttcattttaattttaggatccagcaatttcaggaaatgaaacaaagacttaccctgcatttgaaagaggacagcagaatgatgtctttgtcaaatggccaaacaccaatgacatttgttgggcaaaggtactaaatcgatatcttgaaatagaataaatacaaaaattatatttcaatgaaagtttccatttaattagtaaaagttaaaaccgttcaggagagctatacagaaatgtaatgatttaataactaataaaataatgtatagtctttggttcaatccaaattagacacaaagaaagaattcatataagtcacatgtccaaatatgatttgtttcatctttaagacatattttattatatttattggtaccacttgtaatttattataagactaccattagtaagatggctactcattattctgtactgcaagttatttaaatgttcacttctcttgaaaacatatgttaatagtagcaacaacatgttttgacagctatacttatatttaaaacttagatcatgaagtataattcactgtattttatataaacaagtatattcagacctgatatattaatatattacaaaaatattttgatttggcttttatataaagcaatcaagaaaaaaatctcatagtaaaaactagaatgaacaacaatgataacaccatcaaaaaaatctatgatgagggccaggcgtggtggctcacgcctgtaatcccagctctttgggaggccaaggcgggcggatcatgagatcaggagatcgagaccatcctggctaacgtggtgaaaccccgtctctactaaaaatacaaaaaaattagaagggcatggtggcgggtgcctgtagtcccagctactcaggaggctgaggcaagagaatggagtgaacccgggaggcggagcttgcagtgagccaagatcgagccactgaactccagcctgggggacagagcgagactccgtctcaaaacaacaacaacaacaacaaaaaaaaatctatgatgagagacacaattaaatgaaatgtgagaggctttttgaatcttgggccaaaattaagacattagtgattaaatctgcaaaatgcaaacatgttcaataaatgttgattgtactgtatcaacattaatttcctggttttgataagttcactattgttatataacatgttaacattagagaaagctgagtgaagaatatagacagggctgggcacagtggcacatgcatgtaatgcttgcagtttgagtggctgaggtaggaggattgcttgagcccaggagttcgagatcaacctgggcaacatagggagattttgtatctacaaaaaatttaaaaattagctaggcatggtggtgcatgcctgtagccccagctacttgagaggcatattaatccagaggtttttttttaacttcctactttctcctcattctgtatttctacacattttgtcagatttctaccatttctccccttcctttagagcactattctctaccatcagctaatcccttgtaaataattcctttttggtggattatttatatttttatataggactttcaaacttctacaatatagatccaaatttccagagctttcagcaaattgaatttcagctctgttttgtgtgtttctggtcagagtagaaggaaaaaaatgttggtaggcaatgaggtcaggctgggaatagtggtgggatgaagggagaggaggatttagtactaattctgaaaatcactgggatgtttgattcagcatgacattattcaatcggatctttgcttcctttcaaacaaaaagatttattgtttttagtttttaaccctggagtaattctacaaataattctaatatactatattaaattaaatttaacttatatttttcatattagtttttgaccagaaccttttggttatatgtattattttcaaaattactaactaccataaaggttggcaatgctattttgtatttgccatattaaagaggagactaacatggaaaatgggaatagtttgcaaatggtatgtgtgtcaataataatgagatttgaagggattgcagatctgaagactttgagttaataataagcctctaatactccattacacttcatctacatagcaatcatatcatgctgactatgttttgatcagcttttccatgtcttgtctcttgtaggtttggccagatttgcccaacataacaatagataaaactctaacggaagatgaagctgttaatgtaagttttacacgggctaactatacaatgagaagaaattcaaaacttagacttgattattttaatcaataactaaatttgaatgcttttctttaaaaatagatggccattttaaattatcgatatcagaccatatttagataaaatttacctaattttcctaaataacaaagtaccagtcaccctattaagcaattttatattttgctttatttaatccaagcaatcattcctttatttaaaaagttatggcctggcacggtggctcatgcctgtaatcccagcactttgggaggccaaggtgggtggatcacgaggtcaggagattgagaccatcctggctaacatggtgaaactccatctctactaaaaatacaaaaaaaaataaccaggcgtggtggcgggagcctgtagacccagctactcggaaagctgaggcaggagaatggtgttaacccaggaggtggagcttgcagtgagcccagatcgcaccactgcactccagcctgggtgacagagcgagactccatctcaaaaaaacaaaacaaaacaacaacgacaaaaaattattacagtaataacatttaacattagatctaccctcttaataaatgtttattcatataataaatcatcgtaaactataggggcaatgttgtgctgcagatctctagaatttatttaccttgcgtaattgagattttgtgtctatttcttagcaagcccttattttctcccacttacagtcctgggcaactaccattctaccctatgcttttatgagtttaactgttttagatacttcatgtaagttgaatcatacaacatttgtctttctgttactggtttatttcactcagtataacatcctaaacattcactcatgaaagcaaaaggaatgaataagatattaaatgcaaatgataaacagaagggaacaggagtggctatagttctatcagagaaaatacattttaagacaatcactgtcacaaaagacaaaagaagtcattatataatgacaaaagggccaattcattaggaagatacgatgattataaatatttgctcccaacatgaaagcacttaaatatttaaagtaaacattaacagaactgaaatgagaaacagcaatgctgtttgaagactttgttgccacactttcaataataaatagaacaataataaataaataataataataaataataaataaataataacaataatgaataaataaataataaatgataatacataaatagaacaataataaataaataataacaataataaatagaacaaccagagagcaaatcaacaaagaaacagcagtttttaacaacaccgtaggccaaatggacttaacagacatacgtagaactttctacccaaaagcagccatatatacattcttctcaagtgcccatagaacattttctaagagtgatcacatgttaagtcacaagacaagccttaaaaattgtgagaagatagaaaacataccatttatctttcccagccacaatgaaattaaactagaaatcagaaaaagaggggaaataagtcaattcaaaaatacgtggaaattaaacaacccacttttgaacagccagtggaacaacaaaaagatcaaaagagaattagaaaatttcttcagacaaacaaaaataaaaatacaacttagcaaaacttctgggatgcagcaaaagcagtactaagagagaagtgtataacaagaaacacccacatgaagaataataaaaatctcaaataaataacattacctctcaatgaattagaaaaagaataaacttaaagttagtagagggaagaaaataaagattagaggagtaaaaattaaaagaaaaacacaaaataaatagaaaatatcaacaaaactaagagttggtgatccttcttttagccagatgaatttacaatcattaaattatacaagtttaggtaactgtgaaaaatttgggagcttaaaacttaccaaaactacttctaaaacagagtcagataattgaacctactgaactatgtcattgaggaaaaaagtgttatttcaacttgagttccacccactattcttgagaaccactagagagacaggcatggatttttatataggtgttggaggacagtgtcaatttacgtagaatggcttatgcagaattccctgggattctcttccacaaaaggtatcaacagtgttggattacatgtacctgattgattttctggatataatcaatgattttatttaagtgatagaagcagccagctaatagaataagttaaactaaaaaatgaattatgtaaagagcagaaaagtgaaaattaatgaaaaagatctggcactaccatttgttattaattatcatacgggagatccttgcatagaaaatattcaatataatcccaccaagccttctatccttatgagtaaaatgtaattaataggtaagatgataaaattaagtccctttctactcttgaagatattcatcataggccaggtgcggtggctcacgcctgtaatcccagcactttgggaggccgaggcgtgtggatcacctgaggtcaggagtttgagacaagcctgaccaacatggtgaaaccccgtctctactaaaaatacaaaaaattagccaggtgtggtggtggacatctgtaatcccacctactctggaggctgaggcaggagaatcccttgagcctgggagacagaggttgcagtgagccgaggttgtgccattgcactccagcctgggcaacaagagcaaaactctatcttaaaaaaaaaacaaaatccatcatatgtattttgtaaatctctatatttcctactctctgcattttctgtatgtcctccgatatcttgttcataaagaagactgttaaggccgttacaacagaatcttaacatgtgccaaaaaagcatccaggttgtcatgtcatttttttgagacatacccaattaacttagctgcaggtcaatcttttgctaaaacacggttactctgacactggaacttttatgtttcgactggcaagtagggaatattcttagtagagattggaataaaacacctcttctctgttgggatgagaagggctagatgtgagagacaaaaaaagaagcagttgatgagggtggtgagatggttctgggaaatgagaaagctatataaaaacaggctttatactatggccctttgctgtttcattgtgctccacaaaggtaaacctgaagtatgggctctgcagtaacagagaaaaaaagcttccccattactctaggaagcactaaaaataatgcttttgtgggttgtgaactgttcctttataattcacataggattccaaaatggctctattatctccaccgatgtccctctttactctattgaagtgttgaggaagaaaccacacacatttatgtaattaagattgatgtcaatttccttcattatcagtcatacatgacttgtggatctgtcaaatacattcagatttatatgtatataatctctcttaagactttccacatgtgagcctaaattttggttttacaggcttccagagctcatgtagctttcccagatttcttcaggacttccacagcagagtggtgggccagagaaattgtggacttttacaatgaaaagatgaagtttgatggtttgtggattgtaagtaagctttgaacaatctatgttttaagttatttattgtgcagtgattatgcaaaattagtacttggctcaaataatgtcaacaaaatattttatttgaaaactagtccacttttttcccccacagaactttcttacacaaacaactgctaaagtaaagtgttaaaaactaaatttatgtgtatggatgctatttcctggactttttcaatttgcaaaattcaaaaagcaaaatattctatatattaataaatccttgtaaatatttatttcacttttatttaatataggaataagtgtcaggcttaaataaccattagtcctttgtatgagagataaaaatttcttaaatttggtaacattgtcttttaaagtttcttttttgatgtaatcttaaaatgttagtagtaagatttttaataatatatttttttagatagcataaaaataatttactttgctacaagtaaatgcttaatacagaaaattttatgtaatatatttcaatttccggaggaaaaattttttactttgttgatttttccagtgtaaagcattaatttacttattttttaaattgaaaaaagctttatacagctgtcactatgtggaaactttgtagatataagattgtataaagcatatattttgtttaaaaattcatggaacatctatgtttattagatgtagcaattggtataccataagggattctcttaagtatattcctgagaatgtcatctggatccagagaaaattatctttttcaggtggaggcaatccattttaaatggtggctgacttatttatttagatcatgattcttttaaatatgactactgagattctgagatatgtactcaatagagatacttcttgaaattatctgcatttgtaaactattaatatatcttgtagttttagcaataaaagcaattgatatcaggctcagggcaggagtggaggggaaggagatgatagggcacatattattataatgctatgtcttaaagatatgaaaataaactatttttatgggtataatgcataatacagagaaaacaaaacattttatttttcaaaaggaaactgaaaaaagcaatcaatgagataaactaatatcattgagatgttttacaattttgtttgtttagaatagtgagtatatataacattgttcaaatatgttaacctacttactttttgaactagctcttttgagaatatatgttgtaaatttatcttttgtttacctttttctttcatctttttttaaggatatgaatgagccatcaagttttgtaaatggaacaactactaatcaatgcagaaatgacgaactaaattatccaccttatttcccaggtacaatattgttggtatgcctttgatattatcatgttattattatatattaataggtatataatataaactgatatatatcagttagctatacatagaatatatatatagaatatatatgtatatataaaaaatcagtttgatatatatagaaggtagggaataggattcacacacccaattttcactacccacccacacactggaccacaccttgacccattaccaatattatttaacactattttgagaaaaaaatcaaggaatatattttatctacatgaacacaattctaaatttgtttgaagttgttattttggtttgcttaataattttcccagattcaaaaaatgttaaatactctttaagataaaaaataaaattattttgaaaggaagtttttagaagtgtttctttactaaggataagggaaagaatgctaacacttatctgtttacctttgacatagaaggaaatgaagatgaatgtgatgtttcatattcatcatcattctcttatgcaggcagaaaacgtcacaaactattagcatattaagtgatggcaaaactctggaaaaaaatcttaaactgagaaaatgtggatcaaaaggcagtgttataacatttgcctagcccttaaactctgggctttatgataccaagtgaatttttaataaaactctaatcagtgttttccatctaaatgcactagaaagagtagacattgaggagtgtacttatttttcaggtttttattaattcatgtaattcagttacaatttcaggccattttaagttgataattaactcatacaaagtatacaaatggttaaaatatacataggttttataaaacactgattaatttctttgtcaaggaatacataattatgagttacacgtttcattgtagggcactgtataatatattaatattttttcattgattctttccagaactcacaaaaagaactgatggattacatttcagaacaatttgcatggaagctgagcagattcttagtgatggaacatcagttttgcattacgatgttcacaatctctatggatggtcacagatgaaacctactcatgagtaagcaatgttctgaattatcctctctgactcttttattctttggttcttacatttaatgttatcattttaacagtcccgacaatcttctcttgtatctctttacttcccaattgttctctgtaacttcttccttcatagcatttagaaaaaatgtgtttctttctatctaatttatctaaatatctttattgttattattctaatttctatactattccaaaataaatcctagaccatttttattttgtttctatgtgcccagcatagtgcctggccaattgtaggtgctcaataaataatattggattaatatttataaatgaattaataacatataatttgatatcattaagacataaagcatcaaacatttggcgaaatctgttatttgaattcattgtcagcccaggcacagtggctcacgcctgtaatcccagcactttgggaggctgaggcgggcggatcaattgagaccaggagttcaagatcagcctggccaaaatggtgaaacctcatctctactaaaaatacaaaaaattagccaggagtggtggtgcagagctgtggtcccagttactcgggaggctgaggcacaagaatcgcttggacctgggcggcagaggttgcagtgagccaagattgtgccattgcactccagcctggcaacagagcgagactctctgtttcaaaataaaaataaaaacataaaataaataaattcattattagtaaattagagcacttttaatgaacttctcaaatattaatgatcatagtaattatctgcatttttaacaaacttttatgtaaggccaatgatgatggaatacagaccattcactgaaaatcaattctttattagcactttccaatacaagttttgcagtgattgaaatcttctggccaggcacagcagcttatacttgtaatctcaacactttggcaggctgagatgggaggatcacttgggcccaggaggttgaggctgcagtgagctgtgctcctaccactgcattccagcctgggcaacaaaacaagaacctgtctgaaaaaataaataaatatatagaaatcatctataattctgggtgccaatgtggtacttaccagccatatatggccatggaacaatgtgtctagtgtgactcaggaatggaattttaaagttatttaattttaagtagtagtatacaataattaaatatgaaataatagataattagtggctaccatattagacactgcagttgtagatccctggcttttgactacatattataatcacttggagattttctttttagggtttagattttttttaagtgtcatgtgcacatagtaggtgggtatatatattgggcaagtgagataccaagcatgcaatacacagtaatcacctcatagaaaacagaaggatttttcccctcaagatttatcctttgtgttacaaacaatccaattacacttttagggttttttttaagtatacaattaaactattattgactatcatcctgttgtgctatcaaatagtatatattattcattctttctaactatatatatagcacccattaaccatccctgctgtattagtctattttcactctttcataaagatactacctgagactgggtaatttaaagatgtttatttaaagactgggcaatttaaagaggttgaattgactcacagttctgcatggctggagagtcctcaggaaacatacaatcatggcagaatgtgaaggagaagcaaggtgcatcttacatgactttaggagacagagatagtgatgggagaactgccatactttaaaaccatcagctctcatgagaactaactcactattacaagaatagcgtaggggaaaccgcccccatgatggaatcacctcccaccaggtcgctcccttgacaggtggggattgcaatccctgatgagatttgggtgggatcacaaagcccaaccataacacttgctttcccctcacccccacacaacccttcctagcttctggtaaccatccttctcccgtctatattcatgagttcaatgttttgctttttcaaaatttttagcagccacaataagtgagaacatatgaagtttttctctgtgtcttacttaattcatttaacatttaatgacttccagtttcctacatgtcgttgcaaatgacaggattttattcttttttatagctgcataggactccgttgtatatatgtaccatatttactttatctaatcatctgttgatggacactaaaggtgcttccaaacttggctattgtgaacagtgctgcaataaacatgggagggcagatatctttttgatatatctttcttttggatgcatattcagcagcaggactgctgaatcatatagtagctctatttttattttttggggaaacttcaaactgctcttcatagtggttgtatgaatttacattcttaccaacagcgaaagagcattaccttttctccacagcttcaacagcatttgttactggctgtcttttggataaaagccattttaactagggcgagatgatgtctcattgtagttgtgatttgcatttctctgatgatcgatgatgttgagcacctcttcatatgcctgattgccatttgtatgtcttcttttgagaaatgcctattcaaatattttgcccatttttaaatcagattattagaagtttttcctatagagttgtttgagctccttatatattctggtcattaatcccttgtcaaatgattattttgcaaatattttctcccattctgtggtttgtcttttcactgcgtcttttgattggagtgtttaatccatttatattcaatttcattactgatgagtaaggacttactcccaccatttgttatttgttttctagttgtttaatggtcttctcattcctctttcatttcttcttatttcccttttctctggtgttatttgatttcttgctttttatattttgtatatctgttgtatgctttttcatttgcaatcaccataaggcttgtgatttttaaataaattattatttaattggtctcttttatagcctaagcatctgaatatttaaaactttccaggcagttctaatgagcagacagggttgaaaacttctgttctaacaaatagctgaagttgataaaagaataaaaagcattttgaagtaaagagtatggataaaatttctcgcttagtaaaacctacttatcttatttctatcaattaactcttaatcaactcagaatacatgaatgtatgaccaaaaactcacttgttcaccaaatccaaaaataaaacactaagttattttaagagtgaataaactggcattgaacaatgccttttcactggggcaaatgttacttttgattaaccctgctggaacacaatattggggcataattatccacagctaaatttactttaactaaaactgtagacattaaaaagaacaaaaatattgaaaattgagtgatgatcttattgacaaaaattatgtgctttgagttgaaagtatgtagcttaacaaaaattgaaaaaaaaattcctctccacagaagacaggaaataagtatacttctgaagcacattacagagtcaaacatgattcttgacacattgtggatgcttagtaaatttaaataaattcatcattatcctgttataatcacaggtatcaaagttgttttgataagttcaaggtagatacaggtaaatttccaaatagtccatatgcagagatatttaagcgtatgtaaagtccatttccacttttaagcaaaattatgaggaggaaatcagcacaatcttccatggaatatccttgaaaatgaaatcaatatacatatacttattagtgctaattttgctctcgttcataaaacttttcagtgcaagtttcaatcacattacttaaattgagtagattaattggattaagtattaagtagcctattttatacagtcttatatttttcatatgtttcagatactttcttaatattttaattttttcagttacaaaaaactgctgaactcggaaaattttagagattaaataattaattacatgtataaagaccttgacaaatgtaaaaaaacactataaataaggtacatgttacatttaagcaaattatgaagagtaaagtctttctgtttatcattgaggaaaactgaacaaattataaacacacgtttttttctcaagttatacagaccatagcattttgttttttagtgacttattttctgtcttacaaactgccacatatttgacatttagctatttcttgctactgtgttctttcacttaacatgaaacaaacaagaagcaacgaaagaatagcatgcatggattcagaaatgggatttaatcagcttgagaaattgcagatagttttacacaaagaatcatggacactaatggcaaataaaaaaagcttcatatagaaatcctgcacaaaaagttttgagtcttcaattgctctcatctcttgtaatttgaaattcaatgttgtattgaaataaagcctattcttcaaatgtagaaagaaatacattcaaaaatctacttcaaattatgggttcaaatttcggacaaatattcaaggattatgtaactacacatatattattttcatttttaccaaaagctttaaagatgttagggattagtacctactattcattagagaggacttagaaaattaaacatctttgactccctctgaatgcttaggttgtgttttaatatacaatttttaaataagtgcccaagagttttgtaatcataaaatggaatggaaaaagtcaatatttataaattatttttgcagatattcttataaactgggataatttgcaacttggaaaattatatttaatgtaactttctggaaaaataagagtgcctttttgaagtgggggcattgtaaactataggaagtggtctcttgtatattttttttaataaacaaaaactagtctatgaaaaaacaaacacagtatacctcacctcattcactaatttagaagttactttagttatagctgtaactttctattaatcagctgttcgtctcaagaccggatagtaaatgcatgtctttcagacattagattctgaatgatatagatgaatagaacattgatacaattggtatatcaaaatataaaatttgagatatgaatctataaaactctttccatgatatagtgtttcacattgtcttcttgctaaaggaaatttcaaatttcattaatttgttatacactaaaacataattaaaatattttagcctacaaaatacttatccaatttcaaaattaaaacagatattacattttctgatctaatggtgactatttgaaatgtgagttgggaaaatttatatttctaacaaatactaaatatattgccttcaaaaataattcaataaaatatctttgagttttcaaagagttgttttcatgaaaatgaggataacaattctgtaataactttcttttctctactatacagcagtctgtattctaaaataatttaacaccatccaatcatgagaacaccgtccagtcatgagatagaagtgtttggaaaatgtttataaattgatttcatcagtaattgaagataatagtcacattaattaatttaacattttcttttagaaactatgactaaaataaagatattaattattggaagattaaaaatatgttttaaatttttaaatttaatattctcttcacatatttcatttttgtaatatatatgtagagtttctggttttacttctataaaaaacttttttataataattgaagatatattctaatttttaaaatatatttcaagaaaatgctcctgtaggcaataataaacacacaacaaaaatatctctttcttataagctgaactctccaatgtcaagtggtaacaaagaacaaactcttctggcttaaagctgtttctcaagaataacttaaactaagttaattgtgactgaacaatttgtaaaattgaaacagtgttggaaataattagaatatatttaccgtgtttgaactttatatctttagtggcgtcaaatacatattctgtgtgagggtttacagaggagattcctcttatataagagtttagaattcccttaagagaaaattattatgaaaatacctcatttattttatagttttattttaatttacaattaacaatagtaaatatggagtacattgtgatgttttcatacattatacagtgtgaaatgatcaaataaggctaattagcttatttatcttctcagatatttatcatttatttgtagtgagaacatttaaaattctttcttttagctattctgaaatatacaatatattaactatggtcatcttgctaaatttattcttcctatctaactgtaactttgtgcccattgtgtgaaactactttatgtagaatccttatcaacctgataagcatatattcagctattaatttaaagtatcagtaaagaagtttttcaagtgtaagatatataatagagaaaaaaaagaaatcctccagaaacataattttctttcatgtgaacacgtgaagaatttgtgacaacactgtccttgtaaataatttttatattaaacaaaactaattttgtttgcaaatgaactgaactccaaaaatacattttcatatagatttatagaattatcaccaattattactcttcatatttatatatttatttcttattaaatttcaaaaaaatatatgtaatgtatatttaaaagattaatattcctaaatggccattttatatttgttatgaaaaaataaagcagtgaagatcattttcttttattggttttttaaaagagtgacaatttagaagtagaacattttaagttaactaacacaatattgcctttattagcaagtgatggttcaatatgttatgtctgtttaacacatttttagttgcttgcacttttgacttgagacatttgttaattccgaactttcttgagctactattacatgccaagcattgcattagatataagggatgcaaggaagattaaagtatagcacttgattttaggaatctcaaggtgtcatggaaggagctttatatacatacaaacactgggatcctgctgtaacaaggaaatgactcaatacttttgataatgtgttagtgtccagtaaagtctgcctaattatgtatttgtggtatcttcttctaagatagttctgtagctcttattcatattcaaattatttgagtaatataaaaataaaatttttatttccaactaatattagagtaaaactttattgatactcttataatataatctgtgttcagtcagagagaaaggcagagggaaaagaaagggagatagaagaaaacagatgaagatgatataaaaatacttattttttttctaaaactagaacatattttaacatgcatgtcattaaattcattctccaaagactgagaagggaaataaatcatatgatttcatttacacaacccattctgttgagaagaacttactcccaatagattctacacttgaaatggagcaattctttttagttttaagacccgagaatactttgctctcttcaaattaaacctttaaagcaaagagtatgatagtaggcattgtctgcacagtaatatgtacattaagtgttgatatgttacagttgagaggcgttggggcaatgaatagttagagcataagcctttattaaaaatacattaaagtaaaataaaaagctcaatgtgatgaatttgttgatttcattcaattaatagttgatttaacttgtattcattgaaggaatatataaaggcctcttaatatctgcatgtcactctggtaaatgttggaagggaaaaagacgtcctttatgttttgaggattttataatttaatgagagaagacaaacttatcaagagccagttgtaataaatgacaatataagcaccacaaatcactatttttttttacaaagtagtcgtaagtagatatatttggagaaaatatctcatgtaaaaactcaaaaatacttctctactatattagtgcattgcagaagacaactggaaaaagagggattgtaatttctcgttccacgtatcctactagtggacgatggggaggacactggcttggagacaactatgcacgatgggacaacatggacaaatcaatcattggtaagtgaaagtcaccatctttattattattttgtgttttctattagatactcacttttgctggtgctaggtcataacatttataagtcctcagaattttgttcttcacatcgtactttatgtcatatagcatcagaaaaagacagtgggccaggaagctggattgagggtgctgtgtagaaactaatgatcttcaattagtttattttgaggaaatggtgtcattgttattggcctgagtttccttactgaaaagggcagtagctggcaaagataaggtctagagctaatagagagaaatgaatagaaattctagatttcatagctattattaaaaagtcaaaaaataacagatgctttcaagattgttgagaaaagttgacatatatactgttggtagtagtgtaaattaattaaactattgtgaaaagcagtatgatgattcctcaaacagctaaaaacagaatgaccattcaaccccaaaatcccattagtggttatatacccagaggaatagaaatgatcctaccataaagacatgcacaagaaggttcattacaacactattcacaaaagacactcttcgacaaagacatggaattcgccagttcgctattcaccaaagacatggaatcagcctaaatgcccatgaatggtagactgaataaagaaaatgtggtacatatacaccatggaatatatacagccataaaaaatgagatcatgacctttcaagggacatggatggagctggaggccattatcttaagcaaactaacagaggaacagaaaacaaaataccacatattctaacttataactgggagctaaacactgtgtacacatggacacaaagaagggaacaacagacaccagggcctatatgaagttgtggcgtgggaggagggtgaggattgagtaacagcctgtcaagtactatgcttattatctgggtgacaaaataatctgtacacaaaacccctgtgacaagcaagttacctaaataatacacctgcaaatgtacttctgaaactgaaatttaaaagattctagattctagggaatataaatcactgatagatgctaaaaaaaaaaaagaaacatttcgaaccaaatttggaaagaaatttgtgacaatagtagaataagtgctaaataagacattaccattttaatagggaaatagatacttttgtgctctatatttagtcttaaaatttgttcaccattgataaataaattcaaggaaaacaattaattcttagaaatattcctttaaaataagagctcagaaatcatattcattgtattttatagaattgattactccttaaaggatttgtttaataagaatggttcagtttttttcaaatgatagactgaaaccagttgaacctatagttcaatcagacctatagttaagtaactgcagaaatagcatatttattttcaaaaatgaaactgtggacaccactttcttctcacactataatgtgtttataatgtatttgttgtctgaatatgtcaccttgcaagtgtcaaggaagcttatagtatcttatttttgtaaatatcataaatgctacaaagtcaaaatgtgtgagcattatgagaagcattatgagataattatattaataatctgaaaaatgtttcaggtttggaggttgatattaaaaacagaacatcatcataaatagaaataaaaaacaatattaaaatatatgaaataataactttctaagatattttttctaactttttcaggtatgatggaatttagtctgtttggaatgtcatatgtaagtagttttattccttttatcttcataaattataaacattcataaactattcaaatttaactaaatataacaatatattttagactggagcagacatctgtggttttttcaacaactcagaatatcatctctgtacccgctggatgcaacttggagcattttatccatactcaaggaatcacaacattgcaaatactagagtatgtaattactacatttactttcagtattttcttacttgggctatgcttcattatactttagtgtacatggcttggttagctggtatatttattgatgttatatataattttggagtagtgaggaaattgtctggaggaactttttttgagtatctggggagacattactaaaaattatggaagagtaggaacagttagagccaatatctaaataagcactaaatttcatgatgctgactttcagtgaagaaatgcagaaaaatgataaattagcaaaatgcgcatgatggacaggttaaagacagagctggcctttaaaagatgtgctctgcctatagtaagtaaatggcagagctcgtgatgtgctgtgaaatctacatggtccccgcactggaaacttgggtagaaatagagagtaggatttattttagaaaatgctgaaatacaaggattgtaggcagaacggaaccacgtttgaaagaatttgaaagctggacaatagagacataacttgatgaaacagtaatatctcaacaggaaaatttgctgtcaataatgcaatttagaaagctgtaatattgggaaagtagagcatgaatcaatgaaagcttggggagagattcattattgagaatatactatttcatatttacgaagtccttgctcaaatgatttatatattctaaaaagggatataaataatagaccattttatatgtaataggtcagatacaaataaatgtctataagggaaaatagattaaactaaagtgatggagttttatagagattctgctttaggaaaagtgctcagaaaggtattaaatgaaggaatactagagctgagatgggtgtggggaacagtaaccaatataaacgtatggagaattccacatgggagcaacaaagtaaaatacccaatgattgtaatgtggttggtgtttttaaggaaaattcaaatgcagaaggagggaaagactgaggaagtatttctaaataaaaatctagaggatagaaaactctacttaagtttaaatatgagttggtacaaatgaactattgaaatgtattactcgaattgtatagtttagaattagatgcttgtgtatcaacatgttaaaactaaaatcatattaatgaggtcaataagcaacagatatgatctttgccttttttcttcttatttaactttggaaataccagcaataggattacatacagcttaacagttcttggaccatttttactttcaagattttctgtattctaatactgcatataacagctatgacatgaaattttcattcaaactttcttactcttaaaatacagaaaaattggaatcatcatcgatatgacacaactataaagggccccagtcatgctgatgtcaacgaaaaacatttaaatgttacctcgagctttgtgatggccttgcttattcccctggtgcagatcaaaatacaaaatagtaataacttttcttgcctattattttttaactaatatgtgcaagaattttttttgtagacttttaatcttccactctaaactttagactaaaaattttagtcttttgagctggagtgtgcattccagagcatactcaggcacattatttcctttcattcatctttatgccttcccttctatctgtactatgtattctttagtattctttagtaccataatctgttcatttctcctgagaacccacaatgtgcatggtcaccatcatttgctctgcttgtctatgtttatttcaatcgactttggatagcctatcatttcatttatctcctacactgatcactctaacactgactatcacctaattgacaacatatttgtcatccattaaaatgtgaacttttctttgggtatgttcacttaaactaaatcaagccatggatttaatttgaatttctcttattaaaatgttgtgtaccttttctctttatcatgtgatagaaatattattgtgtaagattttgggaagaaagtacatagcacatgacaatcaattaatatcatgtcttactttttagttcttcaaatatgaatatgaatattatgacttaaacaaggaccaaagcttataactatgttattttgctttgtttcagagacaagatcccgcttcctggaatgaaacttttgctgaaatgtcaaggaatattctaaatattagatacaccttattgccctatttttacacacaaatgcatgaaattcatgctaatggtggcactgttatccgaccccttttgcatgagtaagtacaaagtttgttttctcttatcacagagagatacttttcacttaatttacccaatgatctcttatagtgcaatataaaatattttagattggcagtttttccattgttatattagcacacattttttattaataaagcatttacacaaatatgtccattaataaatagactagcataagccattaaagaatgaaccacattaattagttattaaaaagtaatgattctatttcagaataattactgtatacaaggtattgttctacatgctttgtatatgtgcttacattgactattctcaacatttccagggagataagtaatgcccctcatgatttaattaatcacggtttactgcagttacgtaaatctactatatacagatgtcttactggagaccattccaccttttccttgatgtatcccaatgagatacacaggaacagtttcaacattatccttataaatttgttttggattcacctcttaaagctcaaacttttatatgaccaaatcttaaaaattctatttcatggagcatatttgcaaaaattttcatccattttatttttaagttgaatacaatcaaattcttattgtagatattacaaaaagcaaagcatgcagtcaaacataaaaacaaaaaaaccccgaataatcacagtatatttagctttttgagcaccctatattaccagagtaattgaatgagattatttgttagatttcactattgataagcccatttaaaaaaggcaaatatttacccaaattaaaacaatacccaaagtaaatttaccaaaataagaagtgaattggtatgccttctcttttgatgataggataagcgatccagttttcctaaaacaacaacaaaagattctttctggattcaaattatgttctggttgctttattaatttatcatctaccataatcccttctttatttctgataacattttattgatctcctttttatttacagactttacccctttttgttattcttatttgcttcccaggataatggagtatcacctctgggctgagtcactagtcagaaatattattattaactatacagactgttgttctattgagattacctcggtttctactttcatgagtttatggaggtgtaagcccatctttccaattcagcattaatctcagcttttaataaggcaaaacaaaaccacaacaaaagaacaaacaaattttaagaaacagcttttctttttcatttcaattggagaagaaatgtgaacatttaatagtggctcttaagccattaaaaaacaaaacaaaacaaacaaaaaaaaaacctttgtttttcctagccatttgcatctcaaattcagaaatccattaacatgttacagagcctttaggaacatgtaaatctactatttagagagtttattaagtaagataagcaaactctttttaaaattaatgaattaaaattcttacagtatgtctcacaattttcttccagtgtttttaatatgttttttaatttgttgatcatatactaggcaaagttaatatttgtacctctattagttctcttccaaagtaatttctcatttagttgatgttacatgtccatcagaattctctattttctccggaaatttagtcatagtctagatttactcataaagtattatactgctgagcattgtactattacattccaactgatatattttttaatttttttacagttttgtttttattttaatccacaaaagtccatactacaaaatgtaatttgaataatgattttatggtattcagaagaaagttatttgttttaatttaattatttgtgataattttgtcgaggttctttgatgaaaaaccaacctgggatatattcaagcagttcttatggggtccagcatttatggttaccccagtactggaacctgtaagtcctaccacatatttttgtttacacaattttctttggtttatatacaactaatggctatttatttacattccagtatgttcaaactgtaaatgcctacgtccccaatgctcggtggtttgactaccatacagtaagtatttaaggaattctggggaattaactaaacagaaacgggtaattgtttggccctagccttttcattaacggtatgttggatttactttccacttaaaaagagtggaaagtaacatatttccggtaaattatagctgaattgaattaatccacagtgaaagagagttaatttattctgctacagtttgttatgtagtcattgatttattttagcaaataaacatggtaactacacattacatacaaaaagataattgtcttttattggatatataaaatgatcattaaaggtagtgcagtctttctaagaataatgtacatggcaagtcaagcagagcttttgtgacttttcaaaaatccacacactttaggcatgtgaactccacaaaaacaacgctataaatgattttcaaagctatcataaagacttatatttaactagattctaaagatatgcttttttaaaaagtaaatttcaccatgtatatttaaggtatacaacatcatgttatgagatatatatatagtaaaatggttactatagtgaaacaaattaagattttctgaataaatgtgaattttttaatctaaaagtgtatcatttgattttttaaaatgtatatcctcaactaccagtgttgctgatgattccatttcttgctccacctgttctttccatccctttcatttccagggcaaagatattggcgtcagaggacaatttcaaacatttaatgcttcttatgacacaataaacctacatgtccgtggtggtcacatcctaccatgtcaagagccagctcaaaacacattttacaggtaagtgaactgtttacaaagctcaggttaaattttgagatacatcatgctagcattgttaagaaatagaaagggtttgaaattttaacccatcgccaagctagtacattagcctgcctcagtaacatgaatgccaggtcagagacaaaagtgtttgtggtttatagcatagcaagaaacaggaactttatcttagcatcaggttttcttttccaccaagtcccatggggatgacatggagcgacccaggcagatgttgcacatgtaggaggtctgtgtcacaaataaggaaccccaggtttaggaaaaccctgtctttaataagactacaaacaaatctatccattatttgcttcaaaaaaaatattatcttttttatattggacagtcaaaagaaatattaagaatttttaaaaagaaaccctgccgtccaatgctattcatttttttttttactatactttaagttttagggtacatgtgcacaacgtgcaggttagttacatatgtatacatgtgccatgttggtgtgctgcacccattaacttgtctttttaacattaggtatatctcctaatgctatccctcccccatccccctaccacacaacaggccccggtgtgtgatgttccccttcctgtgtccatgtgttctcattgttcaattcccacctatgactgagaacatgcggtgtttggttttttgtccttgcgacagtttgctgagaatgatggtttccagcttcatctatgtccctacaaaggatatgaactcaattcatttttaaaacatccctgaaaatacagctcagaagacaggctgtcaatgcctctgcctatgacatataaaaatgcaagagacccatggaaaactgtcttccaacaggatattccctcttaaagtaagaaagcttcccagataaaaatataaatgaaacctttatgatctctgtctataatatgcagaaagtaatgacaacttaatgtcttatattttgaatggctgcctcaacaagatttttaccctacttttctgtttctgacatgtggaagatctagtattatgaagatcactttacgaaaacatgaaatatttattaacctgtttttcaaagacttattttttagagcagttttatacagcaaaattgagaaggtccagagatttcccatttaccccctgctcgcccacacatgcatagcctctctcattttcaacaccccccgtaaaagtagcacatttgttacaatcattgaaccaacactaacacttatcacccaaagaccacagtttacattagggttcactgttgatgttgtaaattctctgggtctaaacaaatgtatgatgacccgcatccaccactggtgtcctttagaattgttttactgacctaaacatcctttgtgtgccacctattcattgctctttcaacccgtggcaaccactgatattttactatctctgtaatattgtattttccagaatgtcatatagttggaatcatacagtatgtaacattcaatttgactttttttacttagttatatgcatttaagattcctccatgagatacctgggttgtatctcatttctttttagcactgaataatattccatttgatgaagctttttataagctttaagtcagtattgcttggaggtgtctctttcctttccattaatttgctgtttccctttctctgcctctcttcatctgtcttgtgatatatttcctgactcattatagtacatgaaaatgtagacattcactggcagtatcactactccatcaaactactaagtgtcctgctgtccaagaggaaccagacctgtttctcttctcttctttctcttctcatttcttctcttctcttctcctctcttctcctctcctctcctctcttctttctttcctttctttctttctttctttctttctttctttctttctttctttcttcctttctttctttcttcctttctttctttctttcttctttctctcttttttttgacagagtcttgctctgttgctcaggctggagtgcactgccttggctcactgcaacctccacctcctgggttccagcgattcccctgccacagcctcccaagtatctgggattacaggtgcctgccagacgcctagctaatttttgtatttttagtagagacggagtttcatcatgttggccaggctggtctggaactccagacctgtttcttttttttttaattatgtatttatttatttatttattattattatactttaagttttagggtacatgtgcacaatgtgcaggttagttacatatgtatacatgtgccatcctggtgtgctgcacccattagctcatcatttaatgaccttgtcccatataaagatgaaggctatcccagatttctgtctatcaccatttttataactgattgtctggccaggcccttctcttatttgcctgagaacctctacctggatttctgtttctctccttcagcaatatgtccaatttaccagggacaatggatctgctctgtcttctcagactgacataggtgtaaatctcttattcctgtcacagtctttatttccattgcaaaattccttgctttgacattcaaattctagaggaccctgtctctgtttttcttctctttttatgctatatcatctctcttggtgatgtacatgctgacagcccctgttggcatgaacagaatcttctaatctactggacccacccaggtccatttctactaatattctatcctgacatcagttaaagaggagagacattattgcacctgaaaagtgagggcttcatggaggagaccattcataaggtgtgccttgaataatccttatttttttatgagagagaagacagatcattgtacagtatagaaagttgtaaaactctttctaatcacaagttttagtatatgttgggaaattgcaggttaagccatatttttgatgtttctaaattatatttaaaccccagtgactgtgaactgaaattcatatacatattcatggtaaggtatgttaatatatttcactggaaaatatctaattactgtggagatttgaactctagagattctggaaattttaggagacttccgtggctgtacattcttcaacatttgtgattagaaaaggcagacagctaaaacaattggtctggtaaattatttcaaacaatatgaggctgccaaatcaagttgcttctcaaggattgctggagatgtaacatggaagcaagtatttagttcacaagtagccctatgcaggaacatgcttgaaaggtattctctattacagagatagaacttagaacttggaggctactttatacattcttattaattataaccagtgataactccatgatttatgtatggaaatatgaggaaggcttaagtcagaaaagattttaaaatgctattaaaattgtttcatgtttaatggttaatgacaggattacccaagagaagcatgagtaaatatatgaataaaattaatgtggttttaattactttcaattaggccacttctgatttgttacattacatgaaaccttgagatcaaaagacatgcatcacatttcctattaaatgtgaagaattttttttttgatggagtcttgctctgtcaccaggctggagtgcagtggtgcaatctcggctcactggaacctccacctcccgggttcaagcaattgccctgcctcagcctcccaagtagctgggactacaggtatctgccaccacgcccagctaattttttgtactttagtagagacggagtttccccatgttgggtaggatggtctcgaactcctgacctcatgatccacccgccttggcctcccaaagtgctgggattacaggcgtgagccaccgcacccggcctaaatatgaagaattttattgttttatatcattcctgttaactaatttagaaaaatggaaatgctttaattttcttagtctaagtcagtttgcacactccttaatgcttgggttcctatagatccttatgtggatgtcatatcataactagacatatgctattctacaaacatgggtaaaattatatatttctttcttatagtcgacaaaaacacatgaagctcattgttgctgcagatgataatcagatggcacagggttctctgttttgggatgatggagagagtataggtgagtgctcgatttagtagataaatttaattgatgtcgtattctatcacattacttttacgttatctattattgttctttggaagctgagtacaaagctattaatattattcaaggctaaaagattttactaaattcactgaatcaacttaaagagataaacaatgtcgcaaacatttaaagacttctcttatcctaaatatagtcaatccctatggtaagtgtctaggtaagaaatttgtgtgggcagaattatgtatctattatctttgtactttcagaagctagcacagtgctattcacataatagacacttggcatatatgtaaagttaacttagctgaataaccacattattatatgtgcaaaatattgatactatagtgacaaaaaggagtgacacttttcctcatttatcataagggtcacagccaacacctctataacaaagcacacgttaacatgagaaaagcataacaaacatatgtaatcatagttttatgtaaaacaggaaccttcagaataaaggcccaaagatacagagaatgctctcaggctttattcttaggttcaatgaaacaggaactgccatgtagaaatgtgattggacaaaaagtgtataagctaatggaaacagattgagtgaggaaatctagtaaggcctgtccacattcttgttggcttattaattgtagcatttcttcctctcaggtatggggtaagacccctctggaaggaggttgttaacttcttcatggccagctgttacacagaaaagcaggaaaagagagtaacatttctaggctttatagctagctttgggggaaaaggattctagtttctgtgacttgcctttgggaaaaggaattctagtttctatcactagagagtaaggagcaagagacaggagggcaggagaaggtcagagagaaactttcttccagtgttgcttctgggacctttattctgagaaatcagtttttgagcccccaaaatgtacaagtggtgcctctacaacaaggaggtagtccagaaaccaatctcaagtaaatttgatttctgtgtttttatatctactcttttggcttgtttgcttgtttttggtagtatttagcatttttttacatgaggagatatattttaatttagatctaggcttattccattcataactgttcctcaagaccatactaaacttctaaactcctagccatgtgaaattcactaaccgttgttatcagaaacacctgggacagcttgctaagaatgcagattataggactcattcaagtttcattaattttaggagaaactcagaaatctcccataggagatttttattctgtatgtaaacactgatagaggataggtttactgactgctatttaatagtgtcagtactactagatgagcgttctgaacattttgttgacacaaactttaatcaaaaaaattgatatctgtgtgaagttgacagttctctgcaatttaaataacttatccgaagataatagttttttcattaatagcaaagacatgcatcttttatcttaaaggtaaatcatagttaatattctgcaaccataagaaataatccattagtaaataagtgtaataaagttgatataagaattatatgctagacagcaagacttttgggaaaaataaatccctctttttaacattttgtgacttagaaagtgaagatatcaacacaagttagtcctttgcttttagagctctgaccttcatcaccgcaatgactgagggtctatgaagttttcagcctttccctttgtgtccagcaggaaatttgcctacaatttcccaggggtgtaaagtttaagtatgcaacttgggatctttgaatctcataattaacaaattaagttaattcatttcatcagttaggcagacaaagcttctcttagaattttctccagctcctcctatccaactacagcatcgatgacaacatttggtgtggactttaccctattcaagtttcatggcagactttttgtaatcactggaaagtacctgagcataatccaaatatttctctatgatctcctcatgcaagtataaaaaattgttttttgccaattggatctacttattttgttatgtttcacaatatcagtatatttggtataatttagtataaatatttttaaatagtcccttgaaatttcctgagttaacagcgaaaaccatatatagcaaatgcttattctctggatttgttagatcagaatctccaaagaggttttctctcacagcaaacacaacaatctagttgatgggcatccaatctgaaatgatgtctttcttttaaacaaacatgttcaaattttgtgatatattataatgtggtaacaaattatcttgaaataattaaaggtaaatcaaaatgaacttctcctaaaacttgttaacattaagtaaattttaaccattcttgattaataaagttatagcttagtaaaatgttaatttttctacttatcttaatgaaatagttatatttgtgtccttgaccaagatcatatgtgagatctttcttcctcttattaaaaacaacaaagctacccatatcttcgtaatagctgtcacttttgctttttttaactcagaattctatacttaaaagattgttcatgaaaacttaagttgtaattgtatatttgaaaataagaactaaaatggttaaggaatattgacactaatatgtcttgtaatacatattaaattagccatacatatattagcatacataaaaaagtcttaggcagaatatccattttagtataggtaaaatcaatagcaaattaattttagtgggttaatgaatacagccctgatgtgtataagtagataagagaataaaaatatcctgctttttcaatgttaccccaatacttcttttatttgactctactttgctctatcttatgtatgcttatttgtttttttacataaaaacacaatcttagaagtcaaggaagactgggtttgattccagacattgacagtaattagcttttttgtttttttacttttggcaatttatttaactgctttgaaagtcactttactcttctatacggtgggaataataataaaatatcttttagagtaaagtgatacagtatttagaatttggcaaatagtcagcactaaacaagttttacctgtaggatgatcattaaaatgagttttaaatatggcaagattatactttaaactgatggtggtggctcatgactgtaatctcagttctttgggaggctaaggcagaaggatcatttgagtgtaggagttctagacaaacctgggcaacatagggagaacctgcctctacaaaattaaaaaaataaaaaagccaggcatggtagtgcatgcctgtagttccagccactcaggaggctgaggtgggaggattgcttgagcccaggaggtccaggctgtagtgagccatgattgtgttactgcacttcagctgggacaatagagccagactttgtcttaaaaaaataaaaactaaaaaataatgattataccttaaagaggtggctataaacctacattttgccagtttaattttagttgacctgcaacaatctctaactactgaatttgttttttcaaatgacactagaatgtattgctaccatgttcttttttcctttatattattttgtcagtcactaaggtgacaagtaagtgtcgattgctatcatcactgaattctgtttattcttgcattacttgtgcacttcttgccaccttcccactgttgtgtgtgaaaattattttaaacctgttactgttttatcattacccctacacacacatacaccacctagcttgtcctcttaggaccttacctggtgactcatccttcatttccaaggctccttggattgtatctgaattagttaaataggcttagagaaaaaataggtacatcttgataatatttgctactttttatactgggaaagagaagcaaagtatacaggtatttactatggttcttctttggaaataacaatatatcacattttttttctctctctacagacacctatgaaagagacctatatttatctgtacaatttaatttaaaccaggtatgtaagattatttatatgcaattctgttaaggaatatttgaagttcacagctgggtggggtggctcatgcctgtaatcctagttcattgggaggctgacatgggaggattgcttgaggccaggggttcaagacctgtctgggcaacataatgggaccccatctctataaaaacattagccagttatggtggcatgcaactgtagtcccagctgcataggaggctgaggctagagggtcactggaatctaggagttcgagatggcagtgagccatgactgcactattgcactccagcctggcagtaatggattcacctccccttctcttgcatatttggtgactgaatccaaactttctgagcctgggtggcagagggagaccctgtctcaataaatagatacataggaaaaaaggaagaaaatttgaagttttattcatgtttattatgtaaaataccttatatcaaatgcacaaataaacaatttattatactacgaaatacatttttggttaaccgacatatttttaaagttttaattgcttttgcaaataaagtgtttatgttattcctttttctttatttatagaccaccttaacaagcactatattgaagagaggttacataaataaaagtgaaacgaggcttggatcccttcatgtatgggggaaaggaactactcctgtcaatgcagttactctaacgtataacggaaataaaaattcgcttccttttaatgaagacactaccaacatggtaagtaatgtaagaaaatatttttcaaaagcgtacgtatttaaagcatctacatggacttcttatatccctcatctgtaagaaacataattatgagtcaattatgacattcttcatatattccttttcattaggcctccatatttatttccttattactatccttagtaaactgtcatacaaatcaatctaatgacatctattttattcttattatgatacaatcacagcaaaattaacttaaaactttaaataactgttatccctatatgataaagtgcctcagaaaatacttttttaaaaataagatatctgcatttaaacattgactatgtcttgaaaatgtatttgaaaattcttgcaaacttaataaaactgtcagcacccattaatacaggagtgtgatacatatgatacagataatacacaaggaatcaggattcttgcgttaaagcatcattgctgccagtatttagctctttactttgaacaaaaaattttaggcctattattctatccaattgaatagaaaaaaatgcaagtaaatgatcaatctcttaagctccttccagttctaaattctgtgaatctatggcttgcaaaggtgaatttcaaacacatgttctagaaaacagctaactgttttaggtgttcattttaagtttaagcctacttatgcactactaaaactgtgtaaatttgtgtgcacccacccttaatcgtttaaacttggataaaaacaaagagcctttaatcagtcactttagatgaacttaaattctaaaattgtcagatgttcgactaacttgaacctaaaaaaatatatatatatgcatttggacacagtcctaggtccttgtaggtgtcagaggatgtcagagttaaacagcacctgaaagtctgttccatctttttgaaactcaacacccatcctactgctactgctgttttgttgacaagtggggttttcctttaatatggaactatgtttttcttactgcttttgcactgcaactcgctatttttcttaaaactgtatcaagaataggaaatataaaataaaatttcccaactttgatatatttaatgtccttcctcggtaaaataaaagttaatatcttagtgccttacactcatatttttatttttataatttgactgatttataaaattccagaatacctgatctagtccagtagtcttatgtgggtgacaaagaaattaagtccccaaagaaggaaattaattccccaaaacaactactcaatagttatcaatcacaattagaaatcacttttttgcacggtccaatgttcaatcagataaagaaaagacggtttggcttagataatatcttaccttttatttactaaattacaatggcgaaaattaagctcacaacttttatggtaaaaataaagcaaataaacaatgccaaataagatattttaatattttggggtgttatttcaaggtcgttttgatcaaatatgtagcataaaaacaaaccattaaaaatcatttttttctattctctttaaaaacattcacaaagaattttaagtgttgagaacaaatatttgacagtgtttcattacctcagtgatgaagaaatatacatttactttaaccaacaactctgggcagttccttctaagtgcatttaaataaactcagtatttatgagtaatcactgttttccaagccttcatagatacataggaaaggaagagaggatggtcaatttctttctccaccctgcttgtcctttaatttatgcaagagattatttaattgctctagcaatataatttcaaaagcatttttctagtaacaattatgtccagctgatttatgtaaaaagtattaaaagctatgtggtgtatttttgctttctacctttaagttaaaaaaatagtttaagttttgttacaagatggatctgttttaaacctgtctaacgaatactcaattatttaactattactttttaaattaatttatcaaatgtggtaaattaatccaaatgtgctgtgctttaaggaagattaaattttataaagcccttatgaaaagacctggtatgtggtaggtagtaaaggattcacctccccttctcttgcgtatttgatgactgaatccaaactttctgagctaaagcacagaaaatcttatcagttcattggacaaaaaggagcaatggtaaagtctcctgaaatcgtcatatcataaaactatgacagaagatcatttgactacagcaacttaataatctccatgatagagataataatctctctagagtctactttagattatctccagtgaaataaagtaacacatgcaaaattgaatcattggcaataaatgaagcatcataaaatcttttttgattgagttaaaataacacttttaaatctaaactttggctgaaaatgactggataatacttgacaaagggatgcattgagattcatgcggtgcagttataaataactccatatttcaaaattatgtgaaaagagtaaagtcatagaaatcaataaaattggctgagagttttgggtttttcagtatcttttgacagcaacttcacctttctgagatttattttaaccttaggtaaaatggataggttgggtgaaattgttgctgaaatggttgcaaactttctgagagtaaaaatttctcaagatataaaagaaaataaaggtatatactatttattagaaaacttttttgaaatagcattcatgaaaataagaaaaatgtggttgtgattaaacaactaattattattttacttttttagatattacgtattgatctgaccacacacaatgttactctagaagaaccaatagaaatcaactggtcatgaagatcaccatcaattttagttgtcaatgggaaaaaacaccaggatttaagtttcacagcacttacaattttccctcttcacttggttcttgtactctacaaaatatagctttcataacatcgaaaagttattttgtagcgtacatcaatgataatgctaattttattatagtaatgtgacttggattcaattttaaggcatatttaacaaaatttgaatagccctatttatccttgttaagtatcagctacaattgtaaactagttactaaacatgtatgtaaatagctaagatataatttaaacgtgatttttaaattaaataaaatttttatgtaattatatatactatatttttctcaatgtttagcagatttaagatatgtaacaacaattatttgaagatttaattacttcttagtatgtgcatttaattagaaaaagagaataaaaaatgtaagtgta

SEQ ID NO: 683 - DNA, 71081 bp, Homo sapiens
accccttcaccccccttctcaaacacaaatattatcatataataaaagcctgcttctctatgcttataacccagcctccattccttcgacgccaccattttaaagggatttactgcacggacttctcccaagttcctaggcattatcttctggaccctatcctgcagaggtgaagcgtccctttggggactctcgctgggtgagagggacaagaaacacccactaggacccaaccccggcagccagcggctcgagcatgcgctgagagtttgtgcagctggccctggctgccgccgctgcctcgtccggactcggagaggacttgggagggacagcggcgctgggaggtggcttagcagagactttccagcaactgctgcccaggacttttttttttttttttctttttcccaggaggcggcgacggcggcggcggggggagaggaagagaaagaagcgtctccagctgaagccaatgcagccctccggctctccgcgaagaagttccctgccccgatgagcccccgccgtgcgtccccgactatccccaggcgggcgtggggcaccgggcccagcgccgacggtaagtggccacgcgtctgtcgcctttcctgcccgctgtcccgccagcccgccggcggctgccctccgcgctgtgtgctaaactacttaagggctggctctggggctccctgccgccggcgcttcccctcgcgccctgccgggggcgcgcggacgcgatggctgggtcggtggccgcgctcgctttgtgctccgcgggcggctttgagcgaggggtcgcgggagcgtcccgggcgggggaagcggggtttgaatgactaacccggcgtctgcacagctgcatcggccctaattccccggcgccccccgccccccgcccactgtcccaggctaatccatcattctggggccgaaaacatcatttctcacgttctcccagagaaaccctagtagccgggcggaatctcaactccgcgctgccccctcgcccccgcccccgcccccgccccgccgccccagtcccttgcattcacacccgagctgcgggacggggtagaggggtgcggagttggagtgcccaggaactgtcctaactagaagggcgctcattctctcgggcttgccggtggcgcctctgacgtgtccggggtagggggcagtgtggtttctcaccttcaggacagtgccgagcacagctgtcctcgaggaggggcgtggagtgagggaggttttcaagagcgtctcatcagaatgcacagggctccgccgcgtgtcccctgagaacgcgagtttactgtgcgacttcattcatccggatagttgctcttttcttttcccagcaggtgttatctgaagccggtttggaacttttgggagtttagttaccattatgattttaacaaatgatttttgatgaggcgatgtctcgaatgcactgggcctcgggaccctctggaccctgctgagggcgggtggaggagggacgggcaggctgtgggaagcgtgatggtgagatgtcccgtgttctctctcccccgccccctgcagatcgctgccgttttgcccttgggagtaggatgtggtgaaaggatggggcttctcccttacggggctcacaatggccagagaagattccgtgaagtgtctgcgctgcctgctctacgccctcaatctgctcttttgggtaagtaagtttcactgcaccaacaggtgggaacggctggctctggttttctgcagccaccggataatgcgccaaagggcatggctaagcattaattaattacatgggataacaccctttatttttcagagaagtaaaatttgaccttcttaaaatgcctttgatctagctcaagttccatttgtaattagaacaaagaaatccacccctggatactactggcagtaaaattagacttgaagttaatctagggatataaataaatgcacgtgcttctactcatagataagaaaattatgacatactacttagggaactgcttgtttgcgggaattttagataattgtgcaagccataaattgtttctttacatctctgtcgcctgtaaaatctagttgggccaagtcttaatatattttttgtgggcggggacgagggggaggtggtggtggaattcacacccagataacctatcacagaaaggctgagtagatttgtctaggggattccatacggtctgaagggtgatttttatgtaactaattctaagttggcaaagtttaaggaattgtgtgtatgcttttggaaaatcccataaccatttaaggaaataaaatacataaaatgtaacaagctcatggaaatctttatgccctatgagttaatgactttttatgctttaaatcttaataaagtatgattaataatcgtattattacttataaaacttaggaaaatgtaacaatttaaacagtaaatgttgcttcaggaggctgccattcttaagcaaattgttctttccatttttttgtgttctattaataattttattcaaaattttctgttacaaattttattgtgcaatttatttatgtggctgactggctggcgtgctgactggctggcattgcccagcctttttttcatagggctattacatgtggtctctagaagatgacatttaggttgaactgcaccttatagatggccccattttaaaggataaattaagtcttacttcagtgagtaatctgaaaatatctaaaatggcagcattccttttctcaacattaaagcattaatttctcaaaattaaagcattgggtagttaaattcaccatttggaaatgtaaaatcacaagttgatcttattgtagtttatacttcttaaaagcttgatttttaagtgaatcattaaattacctggatcattaaaagttattaagagtttaaactccatttctttaagatgtatgataattatcactcctgtttactagtttttcacttttctacattgtgctttttaattatagaatcatcacattccacttctaaaaggagctttaaagatggcctggttgaacgtccttcctttgtgagtgaggaaattaagtgcagattaagtgacttgccaaagatcagatagtccaatggtggcagtgccaggaacagaattcagctttcttgcccctagacagtgtctttcacttgacccttactgagttttgaaccttagaattactaagattgttgttgttgttgtttaataaagaataaagctttgaaaaatttgttaatactttacattgtgtgggaaaaaagaaccaaatcattcaacaaaaatatcactcctcttggaaatgaaatttgcataaaagcacctattcctgaaactcttccagggctctttgtgtccccagagaatgtaaacgttatttctttgttgttaccctgtacttaaaccttctaactttctatgtttgtgtgtggtgtgtgtgtgtgagtgtgttctggtttattgacttatttagattgcttccctatttctccagccctcctcttctcccaatatcacctacgcttcaacaaaataatccaggttaagcatcttgtatacgtttttctttattttgtttcatacaaagatagatttactcatacctgtccacaacagatacacaatgctatacatgtaaattcttgatttttttgctgttaaattagtttctcatttgggttagagtcataggagtggaattgctatgtaaaaaagtatgtgataacaacaacaaaaacaaaagtagccaacctatctaactaacatacaaaatagctaacgcttcttactatgtttgccaggcacatttagtgtctgtttcctagcctgtaaaataggaatcatagttccctatcttttagagttgtgaggaggattagagttaacatatatacagcgctgagaacagtggcacataataagtgctatctctgcaatagcagtattgcagttattactataactactacaatgatgatgatgttctagcagattaccaggaggtggattgctactatcattatggtactaatcatagtaattgttactgttatgattaatactgctactattgctaccactactgcaattcctttgacccaacaatcttgttctgggtatctgttccctagaaataaaagcagtaattaccccattatatgtacaaaaatatttgttgccatcttgttggtaatatggcacttctaaatctttgccaatctgaaacatttaaagtattatctcattgttactttattttgtacctaccctactaccagtgagcaggagcatcattttatgtatatttttcatatacatcatttcatttcatattcattaactatttcatatttatcatttaggtttgccctatattttaagtgttaatttcatttatgttatctgtttctatacaatagttaaacaaacttttctatattctgtgtaatataactttcttttcttttcttttttttttttttttgggacggagtctcactctgtcaccaggctgcagtccagtggcgcaatctcagctcactgcaacctccacctcccgggttcaggcgattctcctgcctcagcctcctgagtagctgggactacaggtgtgcaccaccatgcccagctaatttttgtattttttagtagagatggggtttcatcatattggccaggctagtctcgaactcctgacctcatgatccacccacctcggcctctcaaagtgctgggattacaggtgtgagccactgtgcccggcctgtaatataattttctacaggattttatatgtataaatacgaatatattatgtataaaaataaatataaatatatgtctaaatataaatatgtgtgtgtatatatatatatatatatatatctgcatttcttgacttggttaaggtttgtttttaaaaatgttctttaagattattttatccaattaaaaatatctgttgaggctgggtgcagtggctcacacctgtaatgcaagcactttgggaggccaaggcaggtggttaatgaggtcaagagattgagaccatactggccaacatggtgaaaccctgtctctactaaaaatacaaaaattagccgggtgtcgtggcgtgcacctgtaattccagctgctcaggaggctgaggtaggagaatcacttgaacctgggaggcagaggttgcagttagcagagattgccccactgcactacaggctggtgacagagtgagactctgtctcaaattaaaaaaaaaaaaaaaaatctgctgggatttttgttagaatagtatgaaatgtataataggctaattttagggaaactgattttacttcttcagtgttaaggcaatgtttgcagatcctatcattaccaagtcagaaggtgttttcagcctgtgctggagacattcctggccattgttaacattactctcatctagttctcataatagacccataaaatagttttctttcttagtctctctctctctctctcttttttttagataaagaaactggtactcagtagttcaataacttgctagtaagtagcagaacaggaattgaaagtccagttttgttttttatccaagtgtagtagaagttaaattgctggaaacagtgatggatttatttgcatgagagaagtcaagtaaacatcctcagaaggaagggattagctgtccacctgctcattccaagttctctagaacagtgcttctaaaacctcagagtgcatgcacacctggagatcttgttaaaatgcagatttggatttagtatgttgtgcgttctatctgagagtgcatttctaacaagctcctctgtgatgccaatgttgctggtctgagtgccacaccctgaggagcaaggctttaatactagcttttagttctcatgggaattacaagtagaacaaaccagtgtggcatatgaaccccacttcttaaaccagactttacattctgactatggagagggagattgttcctccctctgggtctgcaagattgacaaccttgtccccattacccatgaggtgaaaagctataggcttttactctccactggcattttaagtagtcttagtttttttaaatctatttttactatattggtaccttcttaccttttctaccccactaggattttagggaaaaaaaaataaatcttaatcacaaaaacattgggaacccattcaattttgttttcctgttctgagagtcaaaaatcaaactgagagttttttttttaagttaaaaagtatatcttgagtactttttaaaaaatgtaaggcatagatgtgtttttaagtgtaagctataaatgcgtctaagaagaaacaatccatagcacattcaagatcacacatgctctgcattctctttattgtatggatccagtcaccttgatttgccatctgtagagtgtcttttccacatcatgaagaagccagattctagtactattgtactggggtcggcacaaaagtattgggccttctaggtttgtcatgagtattgtgggtctgtgatgggaaggagcacataggagatggtgtgggtaggtgaactgcctgagggttcttttgagaccatgattcaccttctctccatggtggagtaaggacgtgggttacctttccttcaaatttatacgcttttattactagtaaaatttaaatggcatattatttaaagaaatgagagctttctaccattttaaagacagtttctgtagctttttggtcatttgtatttcttagatggtaattttctattattgcaaatatagataaatatggttctccttgaaaatttctgacattggtgaacatttaaaattcatcaaatatgtgtttgtttctaattttctaaatgtataatataaactcccatatctcaccattatataagaaccattgttttttacttaccgttactaaagataatagcaatagagaagaactaccctgattaaatatgaaaagtaacttataaaagaaagtctaaaaaagtagacaggaaatttagtttatgcttttgagatatatgcgtggcagatgaaatgacaggaggctcaatgctctctttctttttctctggccatccgtagtgaaccttaagtgtttgatccacacagaatctgaagagttagatccttggcaagtagaagtttgaattcacaggaaggacatttatgaatcatattaaaatactacattttaaattggtgtccccaactttacgctatgaatggtattcaagtatttttgaactcttcctaaggaatagtggaaagccctccaacaaatatttgtggtcttttaaaataaattttcaccataaaaaattcctttagtcagccggacgcggtgtctcatgcctgtaatcccagcactttgggaggcccaggcaggtggatcacctgaggtcaggagttcgagaccaggctgaccaaaatggcgaaaccctgtctctactaaaaatacaaaaataagctgggtgtggtggcatgcatctgtaatcctagctactggggggactgaggcaggagaactgcttgaacctgggagggggagattgcagtgagccaagatcgtgtcactgcactccagtctgggcaacaaagtgagactctatttcaaaaaaaaaaaaaaatcttttagtctcagagcaaagctgatcgacctttttatatatacattgtggctcagctgagcaaagacttgagccgctgcatgcttcttaaggaatgttttttgagaagtacatggaagattcttcatagcacattctgctgcatactgagcaataggctcctccctcattgactccactcagggaataatcctgagctgggacactggggaagtggagtttactgcagttagactgcacagaaactatcatgtagaatgaggcattttactcttcttctacttatagtgactttagggtgatcatatactttatcatggcaactaggacaatgtggagactgaagaaaaggggatgtttctgctaagaattatgcccaaacaacagaggcttatagtgggtctcttctggtcagatcaggatgcatggtcaccctatctataggaaaacatggtggtctagaaaaactatcggtcagaacagctccagggtgatactgatttattcagctctaattaattgatgttcattctgaaatgatacccaccagtaatctccagactgtatttcagccatcatttacattgcctattctttcacagctttagcaaatagtgttacctgtttgctctctttccttctgcccttcccctggtagagggaagctgagaaggcacagactcacaaaaaggcaaaagggagcaggcctggcaacatgaaacacacgtgtgactcacctcgtgtgaccagcctccaaataatcaaggcttgatcttacttttacattttaacaaatagcaatttaaaggctaagtatggtggctcatgcctgtaacctcagcacttgggaggccaaggcaggaggatcagttgagcccaggagttccaggtgcaatgagctatgatcatgcctaggagacagaaaaaaacaccagaaaaatttaaattcttttttaaaagaaggaaagcttctggtccaattttcccattttcaagattagccaataaaaattatgaaagtttgaattatttgtcgaagtccttttctatacagacaaagctgtaactaagattcaggtcttttatgttcctctctttgctaacaggtttgacatgaaaagtttaggtatgtggttttagacagctgtcatccttgaacagaaattatttgtgtcactgtcatcttatgtgggactatatgttacagatggcagacagtttaaagatagaaaggactgtttcttgaccgtgaccttactattttatggaaattataggtacacatttcataatacacttaggaaatgcgcatacacatacaattctgattcagaaaacaacttgattcaagacttgtttttatataattagatgcaagcaaaagcagaccatgtcctcaacactgcaaattttatgtttccaaatatttgttgaaagctagcactttctaagtattttgcaagagacattgtgacaaatgtcctgccaaataatatattaaatgtatttctatcaagtaacactttgtttagttttaaaatatctccttgagcttcaggtaacatgttgcaatactggagaaagcaaaaggagctataaaacctagctgcctgtgataactataatgttcctaataatttagccaatgtgagtggcatttgaaggattattttcatagttactttggaaaattagcagaaaataacatgtttagcaaggagtcctgaattcctcacataagttgtgcttctaggtttaatatcaggtttagttattgagttgacctagtctcgttttagttcagtttcttgctataggcatgcactatatttgtttttattgttatcattttctcaagcccagtgagtaaagcctcacttgttgaggatgaaactgttctcagacatttaatgttgctggaatcaattccttgagaaaaagccattttattcccagggttgcttgtttactatagagtaaggcttggtgttattatttattttgactaatgttctgtgcacagctgcaatgtttgggtatactcctgtgaaaaaaaacattgggacagagtatagtgcaaagttttagtttaaagtacttttgagaacactttagccagcttctaatctgatatataaatctttgactttgtttttcagaaaccatctttcttctggaaaacttccagtgatagaaagctcggttcttattaaaacatcttctaatttgtttaaaaatctctaacagcttatctagcaggatgaaaccatctccctttaatttaattattttctcattcactcacctaacctatattaggcaccactactgagcctggtacttttctgtgtgatggggagataggccatgttctgtgccctctactgggatgagatggagggacagaaacaagaacaataggataactgctttatgaggtatttgcaaagagcattaagagggaaaagatctgtaggtaaggcgggagttgggagagaatctttacactggacttgatgttcaagctgggcttgaaggaaaagtagatgttgctcagcacatgagaacaggaaagctggggcaggatggtattccaggcagaaggcactgcaggagtgaagatgtataggcactgggaggtgtgcatggtgcattttggagatgtgcaagcagttttgttgttttccatatatagaatgtgtctaggaaagagctggcaggaagcacggtttaagaaaaagtttaaggggtagctgaagagggcctggtgtgccctgctcaagagtttaaactttgttctctcagaggcagttgagggaagacgaaataaatggtagttgaagaagaaccataaagggtagctataagcagaagaacttgatctatgttctataaaagtaaccgaagggtgaattggaggtgaaatctgtgagctgaagagttctattataaagtaattatagttggatagcaaaagaggatgaaggcctgaactagccagttgtggcagaaaagggggaggaattcacccgacgccttgccagaacaatttgaaggacttgagactaattagatatagagctgaggaaaagggagaggttcagcttccctgccaagtctctagtttacatgattgaaggattgattataccatttacaggaaaaacagtgggagggacatacaggttttggaggaatggaggtaagtttagtgttagagatgttgaaattgaccgtgatagtatgatagatagttatatcccagagtttcctttcttgtccatctggtagaccttcaaacagctgaagattccatttctgaattgatttaggaatagtctaatctttcagactgactgagaaagattaagagaaaacccttaagtctaaagtgacttgcagtaattataggttatgtatatgagagtctcactctggttttttgttttttttttttttgtcatatagctcttctatgaagtaggacttatttttatatcattttacaggtgagaaaactgaggcataggaaagttcaagctgaatgtcatatagctaaaaggcagtagagctggaattcctagctgaaattcaaaattcagtggcttctcattgtcatgatggtgaagctgatataccttgaaatggcttccaagactccatgcagtctcacccctgcctgctttttccttctcaccatgtgccaattttgcttaccatgtcatgttgccttccctcgtggggcctttgttctttctgaccagaaggttattttcaaccctccttttcctgagtaacttgataattatcctttagatcttagctctcttagagaagttcctttgaccccgtggaatgggtcaggccctcccaaaggaatttgtacagaaacttgtactatgtcttctcagcgcttgttacagttctgttacatatttatatccctgataagttgattaacctgtgtcctcttcacttagttaattgcaccacagaggcagtgtctgttactgttcatcagtgtatccctaacacatagcacagtgcctggcaaagagtgggtgaccaatatatgatttttgaatggaagaatgacttcaaagcccaggcttttaatcatcctgccatataagaaatgtcttggaatacaccacttaaaagatatacactttttttgttgttaaaaatggaagacctatatgtagtaactaaactgataatgaattgtacactatgaagaatgaaataatgttttgacacgactaaaagctgtgttactgaaaactggctaaacagcctataaagccagtatagaacagagaaaccaacagcagtcattactttgaagagtgataaagagaggagttttttataactgtaaaataattttagataatgaaataaaataccacatgatatggtttggatttgtgtccctgccaaatctcatgttgaatgttggctgagaggcctggtgtgaggtgactggatcatggggacggatttcccccttgctgttctcatggtagagagtgagttctcaagagatctggttatttaaaagtgtgtagcacctcccccttctctctcttactcctcctctggccaggtaagatgtgcctgcttccccttccaccatgtttgaaagtttcctgaggcctccccagccatgcttcctgtacatcctgtggaaccataagccaattaaacctctgctctttataaattacccagtttcaggtattactttatggcaatgctagaatgggctaatacagaaaattggtatcaggaatggagcattgctataaacatacctgaatatgtgaaagtggctttgtaactcagtaacaggcagaaatttgaacagtttgaaaggctcagaagacagaaagatgagggaaagtttggaactttctagagactagttaaattgttgtgataaaaatgctgatagtaatattgacaaatgaagtccagactgatgtggtctgagatgaagatgaggaacttactgagaactggaataaaggtcactcttgctatgctttagcaaagagacttgtggcattgttcccctgctttaggtatctgtggaactttgaacttgagagtgatgatttagggtaatctggcagaacaaatttctaagcaggaaagtgtttaagatttggcctggttgattctaaaatgtatggtcatatatgtaagtaaagagatgttctaaaactggaacttatatttagaaggaaagcagatcataaaagtttagaaaatttgcagcttgaccatgtggtagaaaagataaactaattttccggaaaggaattcaaactggctgcagaaatttgcataagcaaaggggagctgaatattaatattcaagacaatgaggaaaatgcctcaaaggcatttcagagaccttcatagcagaccctcccatcacaggcccgaaagcctaggaggaaagaatggtttcatggactgggcccagggccctgctgccctgcagaaccttgggacactactccctatgatccagctgcttcagctccagctgtggcttaaaggggcccaggtacatctcaggccacttttccagaagatgcaagccattagcctaggcagcttccatgtggtgttaagcctgtgggtgcacagagggcaacagttaagacttgggagcctctgactcaatttcagaggatgtatgcaaatgcctggatatccaggcaaaagtctgctgcagggacagagccctcatggagaatctctactagagcagtgccgaagggaaatgtggggtttgagcccccacaaagagtccccactaaggcactgcctagtggagcagtgtgaagagggccactctcctccagaccacagaatgatagacccactgacgacttgcatcatgtgcctggagaagcttcaggcactcaatggcagcctgtgaaagaaagcaaccacagggactgtaccctgcggaaccacagggatagagctgcccaaagccttgggggcccaccccttgcatcagttttgcctggatgtgagacatggcgttaaaggagattattttggagctttaagatttaatgactgccctgctgggtttgggacttgcatggggcctgtagcccctttgttttggccagtttcttccttttggaatggtactgtttagtgaatgcctgtacctccattgtatattggaagtaactaactggttttgattttacagtctcataggcagaagggacttgacttgtctcaagtgggactttggactgtggacttttgagttaatgctggaatcaaagtaagactttgggggactgttggaaaggcatgatggtattttggaatgtgaaaaggacatgagatttgggaggggccaggggttgaatgatatggtttggattagtgtccccaccgaaatctcatgtcgaattgtgatcctcagtgttgtggaagtgacctggtgggaggtgattggatcatggagacggactttccccttgctgttcttctggtagtgagtgagttctcaagaggtctggttgtttgaaaatgtgtagcaccttcctctgctctctctttctcctgctctggccatgtaagatgtgcctgcttcccctcccaccatgattgaaagtttcctgaggcctccccagccatgtttcctgtacagcctgaggaaccatgagccaactaaacctcttttcttcataaattacccagtttcaggtatttataacagtgtgagaatggactaatacaccacattaatagacttttctgtcccggagatacttacaaggttttaaggacccacatatagccaagtagagggagaacatgtgcccacagatttcatcaaagagccaacagtcttctgctagctctgtgtgttttaatatgttctgctgtcaattaggtatgccaaggccaacagaccaggagatggctgccattgagaagacagtttattatattcgtaaatcccaagacatggagtacacatctcattatggggggccaagaggggaaacactagggtcagtcacaaggcacaaagagagatgggaactgtgggcaagtgcttataccatggttcctatgggaaggtataggtgaggcaggtaagtgggtttaggattggccagtttgaacaattggccttggggtgattagggcaggtgtgtagtggcccctaagtgggagagccccataagggaggtacttaggagtttggattctggattgcatggtttgtatttgaaaagtgcacccctgggagaacatctcctcttgaggatggaacaagcaacgagggaggcagcaggccaaggcaaggtgactcaggcacatttttaggttctccagagcaggatgtgtctggcatatatatgcagaacagatgttaatgcatcaaaagaagctagaaacatggctaattcactgcgactgactcacttataacttttatgagttttacaatctgttcacttctaacagacatgagaataataataactggcctaattctactcttgaatgtggtcccagggttcttaacctaacttataggccattgactcctttgacagtcttataattttcagaatattaaactgtattctaatttgtggattaaaatacagattaatagtaatattaattaacagtgattaattactaatagtaattaattactataatctgaattttatttcagatccattatttcagaaagggtttttaaatggtgatgctctagaatgcgtcctacaaatattagcagaaattcttctataaaagattaatataattaatataatattactattaatctgtattttaatccacaaaacaaaatgtattggcttacaaaggaaattaattatatcgaaatacatttgtatttacaggtcaagaaccactgagctcccattcaccaaagaaaatagttcagacatttaaactgaacctgacttctgcaggagacccactgcccatctttctaaaaaggaattctacatgctgtgtagggtagtgtttttaccctctgtgaaacataccatgcctgtttctcaacttgggagacagtgactaaccctggcacgtcgaagcccaacagcttgaatttgaatcccagctcttacctctcaggatctgagagaccttcagcagggtatttcccttttctgtgcttcagggcacttttttttttttttttttaacagtttgtaattgtcttctttgtgtaattattgcctgtgttccccaagaggttccaagaaggcctggatcttatttctcttatttattgtcagtctctgaatcttgcccagtccaaggcacatagtaattgttgggtaaatatttgtaatgaatgatggaagtgtgaattcactagctgattttccaagcagatagccataatttactgttcaaagctgtagagctctacacagtctgtttaccttggagctttcatgcagaaagcacgtttcatggccaccagctgagttagcgcagactcatttctaccttctgtatattcattgtatcagcatttaaagctaaagctgtagcaagtaatggtaagtgatgttcattacaatgccagaaattattaaaaatcagggtaagtcgaatttccctacattgtacttaagaagataaatacacatttcaaaaagatttccatcaaaataggaaagacattcagaacttaggggttaataatatgcagcttttaggaaagcttcccaggaagacttcttcttaataatgaaaaaatttaaaacatgtaccaaagtagaaaaacacagtgtaattaatccccaattattcattacccagtttcaacaattatcaacatgcccttctctacttcccacctaacttctaccggtcatggttaattattaaaccatatcccagtcatcattatgtttcggtttttttcttacaaatatagatatcaatatatttcatttaaaattacttcagtatataagtctagaaaataaagaccttttaaaaaataatatattctcatacctaaaataatcaaagtagtttcttaatatttccaaacattcattcagggttaaactttcctcagttgtatcataaatgtttctatgtagttgatttgtttgaatcgggatccaaaccaggtcaatgtattgcactgggtcatgtcttaaatctattttaacctataagagtttctccttctctcctttttgttttaactttccaattttttttttcaattcaagaaagcaggtcatttgtcctgtaaaatttctcatatgcttgattttgctaattgcttcccgtggtggcatttaacatgtttaaatctatttcatgtatttttgtattgactgatagtgcaggaggattgatttgattcaagtttgaccttctggtgaaaatacttcataggaatttctgtgtgcttctgaccgtaccatgttgggagacacattatgtgtaattgtctctttttgtgacactaggagtgaccagtgtggtctggatcatctgcctactttctctattctgacttcccaccagcctttcatttaatgcagtggttctcagccctgtctgcctgttagaatctgtgaagttgctacacatttctgatgcccaagccctactccctagaattagtccaggataaacctgtgttcagtaatttttttgagccttaaatgattcaaatgtacagacaggattgagaaccaatgacctgataaaattgcagccattgaggatcttttttctagagatccattatttgagaaaaggttgttaaatggtgatgctctagaatgcttcctgcaaatattacagaaattcttccataaaaagtttaatcaagtcctttgttcttcctttagtttgtacaggaaaagtaggataaagagaaatgatagattcttgtcagttttctgaataatgagttgagtattcaactttctacaaagaccagagaattttgttcattatgagtttatatactttagcacatatatgtgtatgagtttatatactttagcgctttatgaatcaaaggattacatttaatgttattactattactatcattttaatgcttaaattatttgaattttagccaatagaagtcgttttaaattaacttgtgactttttttgacaatatttaattgttcagtaatagtatttaattgcttccttgcctttaagaatgacaatgtgttttagacacatcttatatgtttgataatttatttgttctgtggcctccttatcttgtgcagtttctgtcctgaacctgggatcagccacttaatagttttgttttctgtatcccatttgggtggtattccatttggtgcctaggacatgattacaaaatggaatggcagttatttatagtaatagtaaatttcaagatgcagcaaatggtaattgggaaagatattatgtaacaaaatccttaattttcctattattaatcctgcagtgaatgttacgtaaatctttggtaaccggtttgtacttttttctccccagttaatgtccatcagtgtgttggcagtttctgcttggatgagggactacctaaataatgttctcactttaactgcagaaacgaggtatactttataattattgattgaattctttcttgctgattttaagtaactttgccctcagctatttatatggtagtgctcttccttgatcttttggaaaagtttttcctgcccatagcaacctttgtcacagacacttgcatcctccagaattctccttaaggtgcgcctctggtcctagcaggggatcaggtggcagcatgtttatacagacatttctgggtatggtaatagcagttgcctgtcctcctgattgtgcatcagccatgtcataggtgcgtgtaaagaaccagcatagttacttttccctaagaaaattaccgtcagcttcctcttaccttcatattcttgggttaatgaaaaccatacaccacaatgatttttttttctcaaatttcaagggttaatctactaacatcacaggggacaaattactttttactccatcatctctgaatggagattgtattatatgacatctgaattgtggtaaggattaaatgaaaaccatttttttcaagtccttaacacagggaaagttagcttaataatggttaatttttatcattaatactggtttcggttaatgaatttttcatcgtgttctagcaaaaatcatttctacctattcctttctttaaatgtagattgattttcctttgcatagcagtcttttacattttgggggaggatcaattgtcagggagaagaaacgtagtgcacatgggatcaaaaattagagaagaggaaggagattcctcccagctgggaaatagcaaaggctcccatgtgatttacttaggctaaggcttcggagataataatagatggaccttttatcaaggtcctgtatattatatgttaaatgagttggggtaggaaagctaccacttgtattaaaaaaaacaaacactgcaaaaccaaaaataaagcaaccgagcaaataaacataaaaacaatagcacagtgattttgaaaataacaatgcagtcactagttttgaggcatcatgattgaaagaattattaacacaaatcacagttgtgtcttctgctatgtcttgggtgcattttgattatattttctttctaatacattatttttcttctttcagggtagaggaagcagtcattttgacttactttcctgtggttcatccggtcatgattgctgtttgctgtttccttatcattgtggggatgttaggatattgtggaacggtgaaaagaaatctgttgcttcttgcatgggtatgatgttatattttctctttattatagttaaaaagattaaccagtaatatattattttttaatcagttcacaagattagggagcagtgatagcagtaacaacatcctgtaagaagggacgctttcgtttcacaagagattatttgaatacacatatttgctgtaccggatgaggtatggaaatatatataagcaatttaattatttcactccagctacgtgttgacattttcatttgaaagtatgagttctttctagtgtccttgtagttattagcactcaaaaaggccccttgggactggaactgagaagccataaaggaactgtttctttctcttctatttttaaacaaatccaccctgtaagctcctatggaaattcaggttgtgaggtagcagacgtatgtaatggtcctgtcactgcctttatatagtttagagaacataagcgagtctcagtttctataatcttggttgttgtttttttaactctgagagttgcactaggtactttttaaattagtttcaccattcaaattctgtgactagtcttttaattcaaaagtaggcaaacatttttaacattaaaaaattgagttgattaaaatactgtttatatagatatttttagaagagcacttaatgtgcaaaatatatactagtggcaccaggtaatgagattactaacatatagttgcagacatataaggctgaaaaattaattcattgagtatacgctttttttatagtaggtctcagccctggctgtgtattaatttcatataaagaacttaaacaatttgagtggtgtgctggtaagctggatcactgggcagaaaaaaagctcagatttgtagcatttggggatttccgtggggtaaattctcccagcatggtcaattttaagttaccaacatgaaatcactgaatgtggaactggggacagatgagtacaaattggctcaaggagccagctcccacacactcgtgcttgactggctcccatgccaagtcaattaaaacagaatcttagtgtgaagttgaactaaagctttgaatttcacagtataacctgtgttaatgtattacttagcttcttggagggtaactgttcaggtcgaatattgaaaaacacaaaatgctatagaaaataaagcacactcaggccgggcaaggtggctcacgcctgtaatcccagcactttgggaggccgaggcaggcagatcacgaggtcaagaaatcaagaccatcctggctaacacggtgaaaccctgtctctactaaaaatacaaaaaaattagccgggcatgttggcgggcacctgtagtcccagctactcgggaggctgaggcaggagaatggtgtgaacccgggaggcggaggttgcagtgagccgagatcacgtcactgcactccagcctgggcgacagagcaagactccatctcaaaaaaaaaaaaaataaataaatgaataaaataaaccacactcagagatggggaaacatgcctactgctttatttctcttcatataggtatatagtgaaagggagaatggtggaaatttgggatcttattttgcaattttagatatttgggcaataatttaaacataaacaaaaggacttactttacatgaaccttctataatttgagtagagtataacatatttcaagttttaaataaagagtctcagaattcttttttaaaacgcagtcttacaatgatgtctctcttgcataaccaattaaggtctgactgccatttcctccctcctcccaacttttactctgcacagtccctatgcagtgggatgctggagggaggcagggcaagtagggtcaggtatttcatggaaccacaaaggctttggaaacacattttgaaaactctttatgcattcccttaggctgcttagatgctagtaatgcaaattgacaaacaacaaagtaatgtggcctgctacttgaagtagagcaaatcttaaacttgtgaatgagagtctagtttgtaatactggcaagagcattataatgcaaaagtggcagggatgactgaggttctaaaggccactaatttactcattcattcattctccaaatacttactgatcatgtataccaccaatttttgctatcagacctgtctttatgagataagacctctaatagggtttgcactgggtgctattgaggccagagaggaagaactctgagctcagcccgaagggttcagtgccaccctctgggaagatgatgagcatagattgattttgcttttttccatctctactttgctttttggatgtactcttttttacaaagcatctttttatgcattgctgttccatgtgtccctaggtgacatctacatcttggttcctccttcctgttgattgcctttggctgttcgttctccattccctttggggtgcctctcctctcatggcaggcttctagtccttactctgtctagacctaacacagcttccttcttgctaaagaatgatctgtggtctcaactaccatgtatctatcactcacaaccaatttgcatctggtctgtttctcaggctctcctctctggcttcctccccacatcccactcctctaaatagctgcctattcctctcagttcagattctacagtcatgggaagttgtcctctcttttctgtcctcctctgggatgcccaagttcaggctttcctaacttcctgctcagacaggtgcagagactccctattgggtaatgaagtatgtaccaacacctcaaatgtacaccaagcccttctacaatggagacttgatctgccattttttgcttttttatctacttcattattctctggttctgtattttctgacccctgaacaaactttcttgctccgttcttctctacatttattcttgctgtcttcttagccagaaatttcttctcagtactttcatttaaatattactagcccatgaagacttatctgaaatgctacctcttcaaatgataattatgacactgatgataattgaagtagttaacatttcttgagtacttacagtgccagacactgtagagttttacctgaattttttttaaatgaagagttcttgtacatgagttaatcaattttatcctctctgctgagtataaaattggactaaaactttgaattacccttattattcacttaatatagatgaggaaatgaggcatagagagattaagtgagttgcctaagtctacacagctagtaaagagaggatctaatattcaggccatggcagtctagttccaatatttgtaacaattttgccattttactctataatagctgatttttttcctaagtgtttacaaatgtgtcctgtaatgtataaaacattttcattttaaacctgacgacaattatctgagataggtaattattaaatgaggttcagagaggtcagtaatatgccacaagtcattcggcaataaggctgggagcttggattcagacctcggcgttcctgattgcaaagcccattctcactgggcctttactgatgtctctaatagacttttcccaacttttgaagcctagtgtatttctcttattataaacttccttttctttttaataatcagcccagactaccagactacaaacaacttcagtaatatgaaccattcaccttgctcattgctttaataagtgtttattaaatcattgaataacagacagtgaattagaatagtgaaagtaggaatgaccagcacatcagattaaagatgttgcctggaaggcagtgatgagagtgagattttaacagaggaatttgactgttagaaaaggttagattacaaggggaatggctcatggaggggtgggcggtaaaatagtgcagaatgcgacatgatgtaaggtcttgggcaaatatttgcaaagtaacttacagtattttttgtgtgccctttaaccttttatcctaattaaaaacaattttttaaggaagtttcttacttttattttggatgtaaatatttaaacaagcagaatacattcatccaacttgtccatttccctgtattcaaagtcttgttttacttttaagagctgtaaaacagattagtgtgagaaagctatttttcaaaagacaattggtatctcagagagctgccatatctcttgaatgattatatatatataaaaaagagctggcaactgggctgttttgctgttcaagcaaaagtaaaaatgccattattcaacagactgatcaagaaaaagtaaatgagccttcctcaaaacaggtctttataaccagcctccctgcagccctcatcaaaaagcaacagaaaacctctacaagctaagaggccacctattggaaaacatttctgagaaaccttggtcatgaatttcatccttcttttgaatgatagatttatagatgtaagttgttaaagcaccctaatttaaggttcccaaataaaatagaagatgcccaattaaatttgatttcagataaacaataaataatgttttagtatgagtatatcccatgcaatgtttagaatatacatatactaaaacattattcattgaaatttaaatttaaatggacataggtatttttatttgctttatctggcaaacgtactcattagatttgttcttagcaagtgtgaaactgtcatagaacagaaatttttatgtatttatatgaggggtttaagaataattaaattctaattataatgggaaaacaagccaaaaatgactaagaaaagaaactggaatatgccatgcctttcacggtaatttcagtagtagaaattccttctcccattaacagagaaagtgaagctaaattgaaattggttttaagccttagatggttacttcccaaggctttagctgtagacgaaatgaaattcatttgttattgcagttctaccttgctattaacataggcattaggaaagcagtgccagctcagggggaatgtaaacagattgaacagacatgtttatgatgttgacaacagctgaatgtcaccatcaggagatcatcatttgtcaggatgtgatgcaaatatatgctcaactgccagcaaaccacaagcagtcaagtgcttgtcagaaattaagttggatgtaccttacgtatttaatacaaatgaatcattttaaaaggagaagtgcttttttttccaattttatttttccagagactttgaatataactattgattgtgtgcttgcacttttaaaactttctttaaatatagagtgattgaaccagatctgaatgttttccttagtggaaatcaaatgaaattttaatggccttggagaaatttccccttgttttttttttgtttgtttgtttgtttgttgtttaaaatcataatgcaaatcagaatatatttaagtagtaattgattttctaaaaagtctctgtttaaggccttctcttacatagtcatgaattttatgattatatagctagtcataagtccttaagttaaaattaacctattaagttgtatgtctttattattttgtttatatttttggttgatagcctaaactttatttctaaatgaagattcatcatattatttaccgtatgttcagtatctgcccaatattttacctttgttttctcaaaatatactcacagcaactctattagactaattttacaaatgaggaaaagtagaatccccaaagatacacagctggtagttgttagcattcaaatgcagcctgtgctgaaagaccatgcaggtttcactacaccacagtactgttataaggcatttaactaattactggcattgtttctagaagactttaactatgcttcatttatcactccaaggcattcggtagtcatttaatttctaaaaatatggtcttttggtatgcttattataaaatgaactttaaaatttctactgtagttatcatttttgcttatcttgtcaaagaatcaagcagtttctcctttcctttttaccttcctcacctctcattcctctttcctttccttttgccctccttaattgtgtattgagtacccatccatgatagttacttgagagaacaaagatgaaaggggtgaatagaaagaaaattacaaagcaaaatataacattaaatttataaataattgctgtgggaacccagaatcaggagcaaatggagatttccagaatgtttcacaggggagtctttatttgaactggatgttgaaaaatacataagggtttgccggtggagacgaggaaggaagaagatttacagcaacatgaagagtgtgtataaacactgaggagtgaagggacagggtaagcttaggcaaaacttagaaagtcagagtggctgtggtgttggtgcacagtgagaagaaaatgaagttaagtccaattgtgaaggtctttatcaaaaagttagatgttattctttgggctgtaaagaaccaatgcgtgtttccagcttgtgatgaaatgataattcacatttaagcgggagacaatagaaagccctgttagtgattacattatcatccccagaagccatggataagggtatgaactaagtaagacttagggactggaggaaggtggctgaaatcagtaaaccttgctgaggtagaattatggataaagcattacatgatagtaatgtttgtattgcttgacatcaggaaatgaaaaattattcagcatttgtacttttttatataatagaaacatatctactcaatacatgtactttatttgacttgttagctagaattctttagaagttataatttaaaattttttatttgtaattatcaataataattgtatatatttatggggtacaatttgatgtttcaatgatgtatgtatacacggtgggattcttagatgaagctaattaacatatccactgcatccacttattttttgtggtgagaacatttaaagtttactattttagcaattttgaaatatacaacttatcattattaaatatacacttatacatcactctatagtcaccatgctatgcaataggtcactaaaagttatttctactatctaactgaaactttgtacccattaatcatcctttcaccctcctcctcttcaccctaccagcctctagtaaccaccattctactctctattcctctgagatcaacactttttaggttccacatataactgagatcatgtggtatctgtctttctgtgctggcttatttcacttaacataatgtcctccaggttcatccatgttaccacaagtaacagaatttccttgtttttttagggctgtatagtattctgttgtatatatggactacattttctttatccattcatctattgatggacacttaggttgcttttatgtcttgactattgtgaataatgctggaatgaacatgagaatacagatatctctgtggcattcctattcatttcgtttggatgtacactcagaagtgagattgctggatcatatggtaattcaatttataattttttgaaaacctccatactgctctccataatggctgtactaatttatatttactcaaacagtgtaccaggatttttttcccccacagccttgccaacatttgttatcttttgtctttttgatagtaaacattctaagagctacaagttgatatttcattgtggtttgaatttgtgttttcctaacagtgatgttgagcattttttttcatctctttgtcttctgttgggtatttgcatgtcatcttttaagaaatgtctgttcaggtcctttgcttattttttaattgggttatttactttcttgctattgagttgtttgagtccattttatgttttggatattagtcccttaacagatacatggtttgcaaatattttctcctaatcaatgggtttcactcttctaattgtttcttttgctatgcagaagcttggtagtttaatattttctcatgtgtctatttctgctttttttctgtctgtgactttggggtcatattaaaaaatcattgctcagatcggtgtcctggagttcttctcatgcattgtcttctactagttttacagtttcaggtcttacatttaaatctttaaaacatttttgttgtttttttgcttatgctgtgaaataagagtaattttattcttctgcatatggatatccagttgttcccctttattgaagatactttccatttcccattgtgtgttattggcatctttgtcaaaaaatcaattggctgtaaatgtgtcagtttacttctttctgggctttttgtccttttccattggttgatatctgtttttaggctactaccatgctgttttgattactataactttataatatattttgaaatcaggtagtgtgatacctgcagctttgttgtttttgctcagggttactttggctatttggggaatttgtagtaccataggaattttaggattttttttcctgtttctgtaaaaaaatgacattggagttttgattgggattgcattgaatttgtaggtcactttggatagtatggacattttaacaatattaattcttctaatccataaacatgggatatctttctatttgtttgtgtcatcttcaatttctttcatcagtattttataattttcagcatatcgatcttttaactcctcagttaaatttacttgtaagtattttatggcttctgatgccccatgaaagtatgtcagcagatgtcttcaaaagtaaatgttgtgtcagagacaggggccaggaaaactgtgtgatattcatggccttagtgttgggtctttatgagaggattttggctgttcattggaactttgtctttcttcagggtttgaaatatgaatgattcaagtttttgtatggtgtactatgtcaccgtaagcattttaaaccttattatagattgtttttagatatatacatttgagataattttagttaaatataagccaaatatttccatatccattgatttggtgactgtcctgagtttgtgcaaagttcaaagtcaggtatttttctggcagcacatgctattgaaatgttcattccacctgtgaatactggtcaccaattcagcgaatgcttccttgaggagagttcagcaattgtgctgtgttttcactttctcatttacttccacatgtctctctactaacttcctttggcaaacataaaccagaaaacattcatttaaaaggagatgactgaggaaacagtatcctaaatgtaaagagagttaaaacaagagggcggataacgtttgtaaaagttgagagaattaagtcatttaagccagtgaggaaagcagcttttagatggaatatttagaaaaaaaaaaaaatcatggttagtatttgctttatgtgcaatgtctaatgaagttgttggctaaataagattatgaattaaagaaagctttttcttgaaactatataaattttaaaaactcacatttttagaattgtaatccatgtgtcttttccttttttcagagaaaaggtaataggctcaggttacatgctcaggctaagataaattttctcagcttagatgacagaaacaataacttaaattgtatttaaaatgttttaacactgtagttgtatcactttgtatttctgttaagcagcgcatttgaattattctaaaataagtggttattcctgaattttctttatacagccgttattttagttataaaactttaaactttagaaacaacaaatttccttaaaataatgacattttagaaacataatctttaagaagaatatgaatacaattctaaagatttaatgaaataacagaattttattaaatgatagcaacttaaaaataatttctaattaagtagaatatgaatcattgctgtgtcttttccagtaaacaagcatttaaaatattttacagtttcacattctgtatagggcttgcacagttgagttgaagcacagactgagaacttctaatgagacaattagggttttttaccttttattatgaaagtactttcattccgaaagttctctctttgtgtttttaaaggtactgtaaaaaaaaaaaaaaaaaaaaaaggagaaagaaaaaaacactaaggaacaatcgttgtcttctattaagaacatttaacaaagggacctgaggaagtatttgagctgagatgtgatggagaagggcaaggggcagtgagtggttggtggacagtgggccagaggagaaaggcgctttggaggacccaaaggctggtggaaggaacaattgtgataacactggaaagctcacagtgggcttggagaagggcacatgtatgtcttagggtatatgtgtatcagatatgtctgagacttggctgagtgagctggtgccaaattgaatgtcatgcatactctgtgatctgaagttttgtgagcagaagcacgatctgttctatcttttgctatgtatccctggtaggagtgtctattccctaatcctggaccttctgctcattcacctgggagaaatggatacctggtcttgttactcttggctaagtaagggagaattacgttttgataaccttttttaatgatagaagagagaatggaggacatgctttaattctgacaatatgcctttattgatgagcgaataaaggtactcatgtggggaagtccatctaatgttttagattttttccagatgtcattataagtaaaattctattaatctagatgtctttagttcagatttgatactaaaaatatactgactaagctaaattaggcatctagacactgggtgctgggctaaggtgagtttagggaaacaagccagcacaaagaggaccttgctgagggttacaacattagttctttggaacgctgcagcgatttttcagcctcagggaaaagacttttcttaaacaactagtgtcagtggactgtggtagaactgcttagacaaacttggagaacaaatttttacgaataaacttttcaagaatgttaaaaacatttacttagagataatggatatgctttcctcacgtcatcattggtttgtttataaaagcaggtctttacttttcaacatcgttatattcaaatattcattgtaacaaaagtgcatttctttacaattattctgtaatttgtagttaattcaaacttccttctatcatttagactgaattactgatgttttggcaacttcgctgatttaataattttatcgttgtttatacatcatttttcttctctgaacattgagcatgactgtgaatcagagtgtaacattcacaaataattatgttcttatgctttttttctgtgggaataaaaatatttatggtttaggaacaaagtgtatgtgcatgaatatatttatcaatgaaaagaacaagctgtttacttgtaatacatatttatatatgtggatttgtaaaatttaaacgaaactatttcctttaatacccttttttaacaaatagggtttgtggtcattctggagaatatacaaaaataaagtatttatcttgtttgaaagcaaaaaaaaatgtgatttagaaggagatacttttgcagacatagagttatagataagctaaaaagttgttgacagctattatagtacgagttttctttcgcctaatctaacgtcttttaaaacttctcatttcctaacttgttgtcttatgaaagtgttttcataaagatgctgactattggtggggtgtaatggctcacgcctataatctcagcattttgggaggccgaggcaggtggatcacttgtggtcaagagttcgagaccagcctggccaacgtggtaaaacctcatctctactaaaaatacaaaaattagccgggcatggtggtgcatgtctgtagtcccagccacttgggaggctgaggcaggagaatcacttgaacctgggatggggaggttgcagtgagccgagatcatgccacagcactgcagcctgggtgaaagaatgagactctgtctccaaaaaaaatttaataaaaataaagatgctgactatagtgaactcattcccctcttttgtttgggaagtatctggacacatttggttaggtctgagggagaggcacgataagggtcagaatcgtgtgtggtattattttggctgtgttgcttgagatattgctaaggctccttcctgtttgcatgttcatgtatgggttttggtaatggggacccctgtctcacattcttaggaatggcccaataatctgtatagataccctcttcagaaaccagtaacagcctgtaaatcttttgagatagggctgagcttgcacactttagctgacttagcttaccaggcaatagacaccatgtacatggtgacttctctagtgtgctccgatgttttattgactgacccttaatgccttgatgtacatcattgaccctgggaacttgtagccttctgctagactggcacatcctggcataacacatttctctgtctagtagtttgaacatcacatgaagcaaacccttactaatttgaatttcaccaacatctttaataagaaattagctcagcaattattaatgtaaatgaaattgaaaaggggagtaaattaagatacaattttagaaaaaatattcaatatttattcaagtacaagcatgcacaaaggaccataaatttttaatctgagcttaaatttctgcatgtcctgagtagttattgatactggtgggcttgggacggtctctaagacaagactatttctttaaccattggtctatagttctaatttatttttcctaaatcaggctgacctgattctttgacttttttaaaaaaattgtagagagatattgacgtggtgaatgattgaccttcagaaattaccaagtgtgtgtctgctatagctaaaacagaggctctgtgtgtatatgtgttttcagcagcaagtactcttgaggttgttagtattttagtccccatggattcttaatagaaggatggctgttccattatcttgtacaaatatttggcaatggaattcccttatttactaactgtaagtaacataatatttttaaacctccaatcaccgggaaaggaaaaataaacaactgccataaagatacttagcacagaaagtttgcagagtttagtatttgacaggatagagactggagtttatcatttatcatttagtgaatgtaggcctttcatcaaactttttgtttattaaaagtattggctatgtagcatgtagataggagtcaaaaggcaccatgttttaaaaatattaaaatgtccagtaaagtgtgttatattttgaaataacttttagttggggggagatgaatcacaggttgtatcaattttacaagataagcaaatctgacttttgtggttttaaatcatgttgaatgttactcatgaaaaaaccgtctgagtttttagttataaattcagagaacagtaagttaaaataacttttatgttgtttatactttttacttttctttcagtgtagcagattcttattgagggggattctgtgatacttggtgaattatctgcttgcttgcacacaaaaaaaaccttatgtaaaagtgttcaaggaaaacattacaattcttttaatgtaaaaattcttttgcagtggcatttatatagaaaaacagtttggaaaacaattgccttttctatttgtggtgaggtagatacagagttttttgttttctttagataatgtatatcatagagtcctctctttgtaaagttgaaaggaatgagggtgttaagttttacatgtagagagtatattttctctaaacatgctcttagtaattgaaagtatcttttcctatgtttttcaactgcttttaccaagtttaatactttccaaaatataggcactcaataaattgattgactttgttagagaagattgcttttttgtcttcattagatgaataaaagttagaaatgaaaattttaaaaagtcaagtttccccaaagtgaaaatcattggaaatatttaatacaaaagcaaatattgtctttttagaaagtttgttaatacccattattaacagtaaagaagtaaagacgtaaaaagaaaaaatttactttttcattcattgagaggcaatagaatacaaacaaacaaaattcagactatcattgaatgaaattgacaataacagaattctaggttctatgattttgtgattgaactgaacgaacatggaaaatagttcaactcacactgatttgagcaaacagtatggataggtttttgttttttttttgaaatggagtctcgctctatcaccaggctagagtgcaatggtaccatcttggctcactgcaacctccgcctcccaggttcaatcgattctcctgcctcagcctctcgagttgctgggactataggggtgtgccatcatgcccagctaattttttttttttttttgcatttttagtagagatggggtttcaccatgttggccaggatggtcttgatctcttgaccttgtgatctgcccactttggcctcccaaatgtatagttttaatgggcaatattgcagaagaaattcatatttcaaagcagggtctagcctgggtatacattttttatatttttgttataccatttctattttgaattactgaggatacatttagggaaaggaagactgtacctgagcagttagaatatttccaatctccactcacctcctttacctcgcataaccctgaagtataattgcaccacttacaattttctatgtaaaacatatttaaagtccttcagctaccaagacttttctctttggtgtcaaggcctccagagggctattgtttgttttaattttgtttttacttttatcagtgtgctccaagcacataatttagagagctaatttagttccaaaaagcttatgatgaaacattgcagtcatttatcctggcattttccacacccatgaggcaattgctttcaattttgtttgagcagattcctttggaatttacttccgtatctctaaatcatatatttatgtaactcttcttttagtttttagttttgggcactatccattggcttccccttatggaagatgaagaactggcaccctttcctgctgtgcctcacccaccatacttcctatctcacctcaacccagacatttcataattttggttagattggtgtttacatgagtgtgaccatgtaaatgctgtttacagctgggtctgataaagtactaggtttacattttctttctggaatgatctgttgtttttcttgaaattcatcaatttctttgttttgttgttttgtgtatttatgtttaattcaactctgaattacttccttctggtgtaagttttttctttatatagtcaaatatattgggcatttcatcgaatatatatatatatatatcagaacattctagacctgctccagcctaggcctcctgaagctattgcttcaggtagtaaaaggatatcatgggatatccctttactaccgttctggaatttcctttgcctcccttttattttagaccctctgtttcctggattccaagtcattgtccttctctgtttagtctctcattttaggaagcatgtcttccagtaatttccggaaaaagcattcataggaaaatttttaaagcctatatgcctggaaatggctttataaaccctcatgcattaattctgatggctgtacaattccagattggaaataacttttttcctcagaattttgaagacactcgtttgctgtcctttagaagtccactgctaatttggtttgatttgagtcttgaacctttgtaggaaaggtatgtaaatttgaccttcaattctgtgtttctagtactgtactttgtcatctactatacctgctgtccccaatcctgactctctattttagtgtctccacttcctcaagcatctctattggtgaaggtagggtagtcaccctgctgcataggatgagagaggggcctgtgtttgggggaggtctaacttcttcctaagtggggttttcaacaagtccttctctctttatccccacctcagggctgccaatacctgagtattttggggactccgtgatgtgaatcaggttttcccactattgctttagcattcagcttttgggggactgctgaggaatttgccactctgctctctgctttgcacttttccaaaatatacttgctgttatctctttttccttttttcagttttccctgggattatgcagttttccctgggattatgccttttaaaatatccctttactattgttttagtgaagtttcaaggggaagaagggataagggcaagtgttgaatctgctttctttagggggaaatcctagggggtggtggtatcagggaagcagatcatttttataaataaatgtttctttaagaaaagggccttccttgagattttactattttgtctgtgtacatatagtgatgttaaataactttaaaagtggggggaattaatcctctttgtttctacgaggggatgcatttacccacacatccccaagggcttaaataggaaggtgggtgtcaagcccttcctttcctcctcagatacttccagtggacaaagggactagtaacatgtcattctggtcattctgtgaccaacctcagtttgtttaagataacagacaaattgatttcactacttttaaaaaagaagttgtgttccccaccctccacacccatcctgctttagttttgtaataaagatgttttggaaaataccaaaaacagtctcactggacagggattttactaaaagttcatgtcatagcctttgggattagacacccttttgtgggggtgacactgatagtctcaggaggatgagcaattttatacaccgtcattctcatcctctaatcctaattacctctactcaagaaacatatattaagtgtctgctatgtgccaggtagagtggtaagtatttaaaacacactgatacctcttgttcatgtggagtttgtgttctagtagaaattatgatatggttaataatggctactttttaggaagtgcttacaaggaagcagcactttaccttatggaatcttttgcacagcattgcaaggtaattttaacattctcactttacaaatgaagaaactgaggtgtagtggtttgcccaagactagccaatggatatgtcaagtagccaaaatctgaagccaggtctattttttatttcaaagcctatgttcttccatttttacagctttttttttttttaagtcaacaagacaatttcacgtacattgttttatttaatcttctattacctaaaatatgaaggcactcatctttgaaccgaaagttatttattctcagcttcagtgacttggtgaaaaaaatctctgattgattacatcatttagggggtgtatcctattatcagaatgctgtgttagatgcaattttttttcatgaatgtaggtttaggaataaaacttatttgtggaaaacaagttttagttggtctatagtaggggaaattagatattttcaggaactctgtattgaacaatttttcaaagcaagtaaaatactttataatggaaataatgacattctaatttcccatatagacacacatttattcattcttcattcatttaaaatgtttagatggtagtaacttgagatggggagagtctgcacgttattccctttctttcacttgtaaattgtgttaaatgtttaaaggcatactggattattatagcataatctacagaaaagacactggtaaaagagaggcaatatttaaaatagaaatgtgtaggcagaaatcaaggggagtcaaatgttaataagacactcaaggttcaaattagagaaacccaagggaatactgaaattggtcttagttggtaaactactcattatttccactgacattccacccaatacctgctgtgtgacaggtgctgcttgggcactggggataaaataatgtttaagaacaagatccttgccagccagaactgatgatctagcagtggagggagcactgtgacttatgagtaggacagccaagtggtttataagccaaagtctctgagacctgaaatacagcagacaaggaaaccccgacacacagagggagggagaaaagtgagaaaataaagaataggaggtaaaatactggaaaacagtgatgaggaagacactgtggcacactgcagagaatgaaggctatgtacggaaagagaggacaagtcattatggatggtgtttcacaaactagtacagaatagcattttttataacgctttccattttccaaagcattttcccatgtatcaaatctacgttgatggcaactgtaaaagggggttcttttttttatctttatcaggcagataagcaaactgacacaaggacagttaaatggtttgctaaaggtcacacaatatgtttcagagctggttttgaacttaaatctaactccaaattcagagcacttttcatcattccagaaagaaaacccactaggagaagagagggtgagttgctttgcaaactagactggtacagaccatctcatcaaaccatatgcattgggaaagcaagaaacatgaggaacacttgctgccaccatcaggggagatacatacctgttcccagtaatgttgaagacaataggtgtctgtgtagtgacattgatagggatgtacacttcatatcacaacacagctcagcaggaactgttgtttaattctgggctaattttgttttattgaaattaagattagcatcatgctttatagatgcttcaaatctagctcttaaactaaatagcagctgagtgattctcagtgcaataatcagtatgagaatgactttatcaaggactcagatctcactacaaaagaaaatttaggggtagatgcagatggtctctttatcctgtattaaggatgaatttgacatttaatgttttccttggaattagaagactagatgtttcaggctacagcaataacaacaaagaaaagacagctgaccgtgaagctgcaacatcattttaaaaatattttatttgaatcaaattttaaatttaatttattccaagaaagtgttataatgttggtgaaacttgtcttttcaacctcaaagtcaaacaaatcagtgttcctgagtgttagtggaataaagaaaaaaaattattttgtatgggataactggcatcatgtgaaaccattggaaatctgaaagatacagtcattttggagttttcccagagttaagggtgtctagctcataggaaacttagcccctccccaccaatcatgggctacatttgcaaactgattaatgacttcaggaggcagaaaatgagagaatattcaagtacgatttaaaaggttataaaaccggtcaagaaatttacatggttatcctcaaggcaaagtcagggcatttcctgttttctttataatcatcatccatgtccatgttttattgataaacatatcttgccttttcagggatgctttggttttcattgtagccagatatcaaatatgaaacaaatttaggttaagaatctgagagagcaaaaaatgtctcatagtttaatttttctctggagtctcactgtctctaagggtcttttcttatcaaagattagaaaagtgatccagtatgtagttactgaacatttggtctctttgtaacataagatacaaatataatattttttatgtctagaaatctcttaagtaaagcattaaagaaaggtcggataaaaattggcttgaagtactatgctcacgaaatttcttctaatcatacttttaaggctgaaatctttaaagtaaggcctagaaataacaatactttgaaatgatatctgagtatattaaagctgaccatgagtactgtgtatgccaaaaataaaagtagcttacaaaatgagagccccttaacaaaatactactttatcctttgaaccaacacttattttgaagctgtgttattgtctgagagattatgcagttatatattctttattttttatatgaaagaaatatgaaggaagcagattaaaactaatagtaatgatttatatttttaaatcataggaggtatgttatggtagtaaaaatcagccccattttctatatcttatactccactccccctttaattagcaaatattatgaacaaagaaactttaagtttgaatgctaatggctcacaatcctaattcagtccactttttccattttcttgccttcattctacttgtgcaatcttttattagattcatcacaccttgcttttctacaggtcattttttcacaaaattgccagaattatgtttttataatgtacattagatcacgccacctgctaatggatttgcattacccatagaataaaatccaaaatcctttccatggctcagtatgatctgtttcttggcacatcataacgtctacttgcataccctgtaccccatcccactctttctgtgtgccagttaccattgagtttttaactagctagctcaccatgtaaggccacatcacacttggtatttcctcttcctggattgcttttttctgaagtcttaacagcattgcttctttcttgtctgtgctgactcattttaaagatcacctttatcaaaagaccttccctgatcacccagtccaaggtagctcccagtcctactcactatcatacctttctgctttgtttgcatttattcttttacttaacaaatactcgttgaacacctattatgtgatgaggaatgcaagaatgtacctgcccttagtggagctttcagtccagtgaaggaggatattcacaaatcgtcactacctggtactcccaccctgacctcccactgtaaatagaatggaatattcataattgcaaagaagttttattcctgctaaaattagtaggatgattttcagagagctcgttctttctcatatttttgctgcttgcctctgtaaaattaccaccacaactgggcaaggtatgacacaggaacacagctacagtgatccagtcctctcaaattcattatgcacattcttgtggaagtcacattatctgctgtttgtgttaattttcttgtttgtaaaatgaggtagccttatctgtttcacaggattcttgagtgaattaattgtgaaagtacttgataaacagcactatccaaaagttgctgtttttttctaatcataataatggttttcaattccaccctcggctatgtgggcttcaaataatctacactttttttttgagacaggttctctctctgtccccgaggctgaagtgctgtgacatgatcattgctcactacagcctcaatctcctgggctcaagtgatcctcccacctcagcctcccaaagtgttaggattacaaacacataccaccatgcctggctaattttcttttcttcttctttttttctttttgtagatatggggtctcattatattttccaggctggtctcgaattcctggactcaagtgaccctcccacctcccaaaacccaaacgttgagattacaggcctgagccaccacgcttagccaaatctacatttctgatacttagataaacatttttatgttaatcaaataaaattagattttttatcttcccacagagctgtttacccctgacaatttatctgctttggtgaaatacatcattctcctccattctaaattcaatgagtctaatgccttgtcaattttcttttcctgtgccttttaaaatgattcttttctgcctattttcaaggctaccatctaagttcagctgctcgcttcatgcctcctcttgtgctgccttctaaggcatcttcaccatccccctcagccttcctttttccaaatcattgagaactttgcctttattttatcagtttataatgtcattcccctattcagaacctttgaaagatgctaccttaatgcctacatgatggatttaaaattcactagtgtattatttaaagttcaccataatctggcttcagtgcatctttcacctttgatctcttctcattcctctttctgaccaccccactccagctagatggatctgtttcctgttccccgattctttgcttgactttgcagctgactctgcacacttgttcatggcttttatttgcctggtattctctcttctcttctttgttccaatcctcttcaccttttggaacactgcatatttctctatttcataggaatcttgaatttttatctccatttctgtttttgacaccatattcaactttgtgtttttttttgcctgcgcatgccttatcagaattttgatattcttttatatatcccaagtgccttccccataatagaaacttactatagaaagtgtcaacagtagttgagattttgttctatgttgtgctttttccaagaatgcaaaggaaaccccccaacccccattgcctagaagaatgagttaaaatctgctcatggtgcagagcattgaacttgttgacttcacctcgtccactttgaaaggaattaggtcccctttcttggagaacttgattaaagtttatcaaactagaacatgtaaattcttatttatcctaatgaaactagtggcatttataaaagatttttctcaggagacggctaataaattagggctcactgagatgaatattaaatgttatctgcagatatttctaaatttgctgataatttccccatctgcttctgaggggcttcatgaaaacttgcctctgttttcttggtcactaggtaaacataataccaagtctgtctttgaggagcctattttattctgatactataacagcatacttttctgtttttctacagtactttggaagtttgcttgtcattttctgtgtagaactggcttgtggcgtttggacatatgaacaggaacttatggtgagttcaaaatagatataatcacaatctaaaacaacagttcagccttttaaattagatacttgtgttagttcattttcactccgctatgaaagaactgcccaagactgggtaatttgtaaattaactcacagttcagcatggctggggaggcctcaggaaacttacaatcatggcagaaggtgaagaggaagcaagacaccttcttcacatggtgggaggaaggagaagtgttgatcgaagggggaagagccccttataaaaccatcagatctcttgggaactcacccactatcaaaagaacagcgtgagggaaactgccccatgattcaattacctccacctagtctgtcccttgatatgtggggatagggggattacgactcaagatgagatttgggtggggacacaaagcctaaccatatcaatactttagagtaatttaggtacatgattattaatttgaatgtttatgctacatgataacagttaataatcccaatacttctgaaaactagcattttcttttctgtgtctaaagcacatttccaaaccataatttgtaaaattttatttggtatactctgtatatgtctttaattccacaggctgcttaaacatgggtatcatagactaaatatagtatatgttctaaaataattttaccaattttgaagttaataatagaaaagattcacattcacaaatgattggtttgaaaattcttgaacacctacataaagtcttataaaatgctgactgcaatagtgaacagatgactaggaagcctacatctcctgtttgcgacaggcagaatcattttccaccttaagtaagaggtgtatttgaagagttgctgtgtgtttggcacgatctagaaacactctcacagttccacacttggctacttgaaaatagctattcatcatttttttatcttttatttcagcagttgaaatggttgggacaacttttatagctagcataaacgagcataacatttctcagtcttaagatttttactagtcatgtttggcttaccacttgcacttcacccttgcactcactgggtattattacttattaacatttgcttacttcattgagggaaattagtgcatttactgctagtgatgtgatgtcgaacacttttgcatgtctgtgaatgctggttgttttcatggagggaggccagactttttccccacaaactttgtagagtaattctgttttagtaaaatggtgattttccatatgtagttcttgggccatctgcagtaggagccacccaggatgattcttaaaaatatgcgttattgggctccagcccagatgtgctcaatcagaatggaggggaaggcagggaggaacgggcaaggactgggcatttgcatctgtgacaagttccctggtgcatcttcaacattttaaagtgtagtaagtctccagaagagagaaagattatattgtctttgtttcagagcgaagagagtcatttggcaattgaacagtaaaatagaagtcatttctggtgctgatgtagtcttcaaagattctttggtgaatctactattgtgcttcgagactgttttgaatactaagtagtaaccacagactagtggctactctgcacactccaatttacatgtcagtggtgctttggcacactcacacatatgtatctctgtgaagacactcatgcttccaatgtacaacggcactaagtaagtagagagagttcctgaaaaggtgaaaagttagctcagattctaactagtttaatacaaagttaagagcttttaacaacatgaaatctcccattaatataggaatttgtttgctgtctttgaaaatcatattttctccctgtctctggtaactttattaggggagtgataaagtacttgactccagggaatcggtttctgtggtttactggtcaagagattgtctctcttatttttttctgttttcaaatgataaatgtgtctccttgacatttaagccatagagagtacatcttatcattagttctggatcctgttacctcagctttttattgtctgctgtttggtaattaaaagggttttagcaatttgtttactttcttgtggattttaaacatgggcattagagtatatatgccataccaatatttggtaaatcttctaagatacagcaagttcaaaatgaattaacttaacatgtttgaaatgaaatgttttgattttaaagtaattctaagaaatatgaggaaattgaaatgaatgtattcttgtttagacactttcttctattctgttaagaggccatctgcaaatagctcctgagtcctgcagtgctaaataggtgcccactgccattccagttgagggcacacatcactgttttgctttcataaatctttcccattacatcaccaggatggagcaagggctgtttaaaagtgaagtgtaaaagcagttctttaaaaaaagtttgtcaggttttttattgcttttgcactaatagcagtgtgaatgaaaagtaccattaaagtttattatctgccaaattttgcagaacccagcctttacatagaatgggctttgtgcttttagctgttccatgcaaggaaccaatcaacctgtgtgttactttatgaccagacctcagtatttgtgccagaacctcaatggtctcctctgttttcttccacatttggtctcagattgatagtggtcacaataaggaaacaacctgtatttattttagaaggtaaagtttaaaaaaattgatatattaactaaatcaagtaacttgacatcagataatgtgttttctcattatttctggttttttttgtactgctcatcttctattcattattccttctctagataaaatctgtcagtgataagagtttcagattgtacatttctagataatttatttcacttccatttattttatgcccaaaaggttatgagataatattaatttatggtgagtagcttgaactttgactagttccctgaaccttgttgaaggcatatgaacacaaagtacacccgtttagcccattatttgggggaaaaaaatgtgtgcccaagtgtttggatgttttattgtgtatttccaagtaatcaaaaaaaaagttaacaaagaaaaaaacgaagattttctgtggtcaggaattttgaaactgcttctatcgatatgactatcttaaaaaataagatttcataataatcctaatctctagttctgttggagccttatttgctcatgtctcccttttttcctttttggttctctatctttgtgttatttgttgaatgtcaagcttgctttactaagcccagtctatattacttcatagatcagatgggaatgtccatccagtttcccagagttgccttaatactgtgtgtgtaatgagatttgcatttgtatacctcaatttctcatggccctgcagtaaaatcatagcttgatatactgaccagatttctggccagtaatgactgttgtattgtattgtattacaacaatgactgtggtactgtatacctaaagctctgtcatgattaaatactctgtaatagacatggtgctaggtgattggagaatagaagcacaaaaatgctttactttaaaaactgttctttctttttaaattatttttaatttttttatttcaataggtttttggggaacaggtggtagttgattacattaataagttctttagtggtgatttctgagattttcgtgcatccatcacctgagcagtgtacactgtacccaatgtgtagtcttttatccctcgtccccctcccatccttcctcccgagtccccaaagtccattgtattattcttatggctttgtgtcttatagcttagctcccacatacgagtgagaaaatacgatgcttagttttccattcctgagttacttcacttagaatattggtctgcaattccatccaggttgctgtgaatgccattattttttcctttttatggctgaatagtattccatggtatatatattttcttttcttttttttttttttgagaccgagtctcgctctgtcacccaggctggagtgcagtggcgtgatctcggctcactgcaaccttcgccctccgggttcacaccattctcctgcctcagcctcccaagtagctgggactacaggcacccgccactacaccggctaatttttttttgtatttttagtagagacggggtttcactgtgttagccaggatggtctcgatctcctgacctcgtgatccgcccgtcttggcctcccaaagtgctgggattacaggtgtgagccaccatgcccagctgatatatacattttctttatccactcattgattgatgggcttgggctggttccacatttttacaattgcgaaatgtgctgctataaacatgagtgtgcaagtatctttttcatataatgacttcttttcctctgggtagataactagtagtgggattgctggatcaaatggtagatccacttttagttctttaaggaatctccacactgttttccatagtggttgtgctagtttacattcccaccaacagtgtaaaagtggagaactgttctttctaaaattctaacatacctcttaattacaacttttgaaaaagtgttgataaaattatcccagagtgaggcttgagttgagccaaattctttcccttcttaattctttcctctttgttttagtactattatctgcagttgcttcaaagagcaacaacttcatagcattttgaaatcaaatgaaggacatttctctgcagaggttatttgttatgtgaaagtcttcagtatgtctgtgggatgtacagttaattacttgttggtgatttccttgagcattaaagtgatttctcatttttttccttagtacaaaatacctcttcatttatcacaaaaatctatacattgagattgtccaataactacattgaatactctgagctaaatttaggccatgagcaaatataaatttaaaatagtatttgtcaattagaagacattccgagtatgcgtgtgtacgtgtgtgtgtgtgtgtgtgtgtgtgtgtgtgaatctgtgtctgtgtgtgagctacagctgttgatattttgctttttatcaccaggttccagtacaatggtcagatatggtcactttgaaagccaggatgacaaattatggattacctagatatcggtggcttactcatgcttggaatttttttcagagagaggtaagtgctacaatttctgaggtagagagagtgaagtaagtggtgcaccttcaaaccagatgtttaaagctttagctttggtaatttcctctgtgctgaaaaattaagcctgtgattcagtaacctctggtgcaattatttcttgaaaaatatcttaggtaacttcatggcctgcttttcttcccatgtataccatttcccctttatttcacatggttcacatatatttaagaacatctgaaaagccattttgctaaattattgtgaagttttctttttatgagagttaacttgataaatatccaagttccagacaaatagattttttcatgacttttagagctctcaatattttaaacataattttagttttaaaaaaaatgattgttctcatttgggactttgaagtcagtatatcattaatggcatgatctgttcagaaagaccttggttaaaatcatagctgtgctgcttgctattaagtgagcttctataatttacataactcccttaagtcctggttttctcacctttaaaatagtgataataaaaatacctctctcttcaggttgttaagaagattaaatgatgcgatttcatttagcctatggttattaacaataacattacaaagtataggtgcgtttagcatttcttacctaaccgccatgtagcactgcacccaaccatcttctcaagtggggactgtattcagatgtttaaaatttggtgacttggagttaaccattgatcttgcttcaaaccaagctcttcttccaagcagtttccttgtgattgaagtgacattcccagatggataagtatttcagtttcctttaatttatcttagtgctaggccgcaaagcatttgagaattagtgtcttacgtgatagatagcaagatctctgctcacttactttgtcctggatatgggcagaggttcaagtccaggacaatctccaaatctggctgtgtacaactgttgagatggtaaaaattatcattgtaacacagatttcctgtttatttaagtgcttcctaactttgtttatttattgtatatttgtgctaaaaacaacacaaagagaaaataagcattaggaaatttatagtaagttatgtcagctactgtcctgagtagatgctgcccagagctcgttattttctggaatttgtgatgtagacagtgataatccaggttaaaaaacaaagtgagtttttttctgatggaagctgcacctagatggacaatgtacaagtactgcaaatgatagcacacttatttttagatttgttacatggtaagtttcctcctccattatcataagactattttatgtaaatggagatggtgaagacttctgagaacctgaggtttttaaaatcccttatatcccttatattagtttgcaatgactgcttgcggatggccatcttctccctgtgtcttcactatgtcttccatatatatattaaatatatatatatatttaaataccctctcctaataagtacatcagtcatactggattagggcccaccctaatgaccttattttaactcaacaatctctataaactctatctccaaatacagtcacattctaaggtactgggaggtagaatttcaacatatgcatttgggtgggggacccaattctagaataacctgtattgcagaaagcaactttatcaggtgccagtctcctttgctcctcattcagtgcaattctatgcacataccgcaacttagcggactctcacttaagccccagtgacgtttgtttaatacgtttttagaatactaactttaaaaaatgtgtttatttatttattttaacatagtagttggagcataggctttggaatagactgtgccacactctggcctgtaactttagcaagctacttgactgtcaaaggcctcagtttactcatatgtaaaatggatggtattttctagagcttgacacattagcaagagtagtactatctcacaatatgatattaaagtagacaggaaaatgacaaggagatgtagaccacagtaatatgttggtatgatgttgggcttacttaaaggagttttcagaaaaagtttcagaataaattcattatcttctgttgaagaaggacaattatatacaaatgctttctaaaataaaagtaagttcagcactgagcatcgtatacttataatgagaaagaacattatatacttatatttgagaaagtcatttatgtagaatatcttatttcctgacaaagccatataaataggctgttccttgctggatggagctagagagttccaagaactgttctgtcatcaacacagaaaggactcatgtcattagcaaaggagacaaatggattttctttgagtgcaagaatttaaaaagatggacttggaaagttaacctttccttgtttatgatttttatgaagtgaagtctttatactacatatattatttaaggatatttaatgtcttatgtaaaatatgtgacatcaaattattgactaaatttgtgatgtttatagtatactcatgactttgagagcaagtttaaaaaggaaaaatatatataaagtattttttaagtttctcaaaatttcagtattacccatagctttcagtaattcgtcatttataatactcttaagatgatttttttttctgtttaaaaatcagacatttaggccagtgtaacaacgcaaaatactttgtggtattttcattgtttccttttgcatgagaagttcggaattcttcaaagttaattttagttaaattttgaaatggtgggggattgtgatattttatgatgcaatgtcaaacctggacatagattgatctgttggactgcataatttgcatagccagtcactcttggcaaagttctcagtgactgcccatagtccttgtttctggctagaggggaaagagcaacctccttctccactcaaggacagaaaattattcatcatagttaattgttctgaatctaatctatagaggtccttaagcagtgtttccaaaccttgatcagagacagtttttgctaatctttggagaaataagataaaaaagtaaaaatgtcagtatagtttttcttaaatccaattttattcaagctaaaggcacacacaccatttcttctgagattatggtaatagaatatgaacatttatttcaagaatcttactcagttgaataaacaccagttggccagacctatgtttatttcttaaagtttttggatattttactagctaaggaatcgatgtctgctaactttttgtgatgtgggctttggtcaacacatgtttttacaaagattacagaaacttttaatataatatttgaatatgttgggcaatagaaaaatttgattaactggcctttggtggttagaggtttaatgattaaagtgtcacctacttgggtttgttagtgtgtatgttcaatctgttgctatgtatagtcacttgtagatgagcttacagttagggagtgagtctcagtcatgcctgatttgtttttatgtgttatgggcattattactcagaatacttccattatgcaatcgttagccatggtgttcctttactacatttctatcatcaacatagactgtacatatatcattaggtgatgacagatatagctctgggtacaaaaattttaaaaaactgatgtttaatctcctataagttaagaaaatatttttgtggtttctgaggctgactagtgattttttttgcagtttaagtgctgtggagtagtatatttcactgactggttggaaatgacagagatggactggcccccagattcctgctgtgttagagaattcccaggatgttccaaacaggcccaccaggaagatctcagtgacctttatcaagaggtgaggccatatatggttaatttattatggataaatgttttcttaggaataactttaaagaatcaacaatatgccaatgaaattttccttctctgtctaaatgtaaaaggccttaaaatttttctctaatatggggagaagcagaagaaagctaaaaaacaatataaaaatctaaacattaatcacattttaataaagggaagtgggaaagaccaggttttgtaattaattggattttgaactgttttgttttgaatcaagttcctactgcttggggatcctttgaaacagacacaggcagagtatgtagctaacactggatgtgcaagaagcagagggtttggagttcctggacagaatacgtattttaagagcctccacatagaccaccaacacatagaaggggaaaaaaaagaacctctccaaagaaaatgctaccatgctactctccagctccccctgctggctaatgattagtgatgtcagttttagttcactgattaagttttatgctcagtggcggtaaagtcaatcctcatgtggccaggaaatttacatacttgtgttttctgggagaattgatcagaataatcaattactccattttagcagaagttttcctattcattcatttttactgattattttcagactttgttagcagtaaaattctattttcagattaaaatctaagactgcactgtcctctacagcagccaaatagctacgtgtggccatttgaattaaaattaattaaaattaaaatatctgttcctctgttgcactagctacatctcaagtgctcaactgccacttgtgactagtggcccctgtcctggacaatgcagatgtaagacatttctatcatcacataaagttttgttaggcagtctttatctagaatggaaatgtaaaatgtgaatcagatagaaaggaaactgcttaggctaaggggttgggatcattccccacatacacctcttgtcaagtacctggtatcacaaggcactgctcacactattcataatataactcatgtatatatagtagggctataaagaatgaaaatttaaaacaaagcaacaggatttataacacctgcattttgatatatttcaaggtggttatcttaggaggttatgctttttattcctaagaatactaccattcaaaacatcttttagactctctgccaaaggcagttgttgagatgggcagtcaatttatattgtaaattaattaatttggatgttgtaattaattaaaagaatgctgtactacctatacaagtgatccattatattcatagatatgagtaactctgggctgttactcatatctcagaagacaagaatatgtcaccatttaaggatatccaaaataaagtgctttgggctctgaaggcatgccccaaaggagagtgccaagtattttttaggagtttaaaaattgttataatttcctagagctgccataacaaagtcccacaaactgagtggctctgacaacgtaaatttattgtcacagtgttctggaggctaactccaagattaaggtgtcagcagggttgattccttctgagggccatgaggagaaatctatttcatgcttctcccctagcttctggtggtgtgctgacaattttcctggttcctcgtcttttagaaaaatcaccctgatctgtttcatcttcacatggtgttttccttgtctgtgtgtctccaaattttcccattttataagaacaacagtcatattggacaaggggcccactgtcctccagtcggacctcatcttagttacatctgcaacaatcctatgttccaataagatcacattctgaggtactaagctctttaacatacgaattttgggaggacataatccaaccaatcacaagaattattcaaacagttgaataattcaggctttttattttaaaagatgatcagaatactttttgtcatgctcacactgctgagaagcattatgtttggatgttattgttttatacatactttgtttagaaacatttggctttgaatgaaaaggaatatacaaaatatagtttattgaacagaaagttgttgtaggttagtgtctgtaggttcttcagtgattatggcactgaacctagttcttttgttttgggtgaaagctgaatattggctagtgtctgtagtaggaatcatcaactaataaatgcggcaaactcctgcttattccataaaacggaaaacagtactaatatttctgaggtagtattacatataaacatattatggatattcaaatatactataacttactattagacattaaaagaacagatggctacagtatagttagaagtatagatgtgtaaattgaaacctaccaaatttcctagtgtgaattgtccatttgttagtttttactggtagcgagtcaatatggacaattattgggccacaacattatggtataatttgtatctgctttagtgattaatactgatgatatgattataactactattgatcatgagatcaacttaccggatcttcccataaagtctgaatatggactaattctcttcagttttgctttatttagctgaagactgttccacattaaacatttaatataattttattgttgtaaaactgcaattcatcctcactgcttttcttagattgttttcactaataatactactttataaagggatgctttacttttaggatatctataattgcttgctccatgaattttgaaattgaaacaagccatactattgtgcatgtgcaagttgatagcccagattattttgaaatttgttcatatttttatctgaagaattttaatagcaagctggcattgtcagccatgagatgttctttagacacagacttccagctaagatgggggcttattatatcagagtaacctgcttttgcattttacaactaataacatatgctgatattggtaattatacagtatgcaattatatgtatagttgatttacaaaagaggatcatttagtagttttatggcataagtacaattaaatccataattaaaaataagacataattctactttgccctggagaacatatgtttcctaattacggtgtgtccagagatcattcagtaggaagatgagggttccaaaaggagaaataagtgaggaacagctggaggtatttgggatgtttattcagaagttgagagcactgaagggagatagttgagatgtgttcaaatatttcaaagttcataattcagaacaggaactagacttacacgttgttgctccaagggccagaagttacaggaaggaaattttgaatcaatagaaggaagaccttgctcatcaaaatccatccaattgtgagacaggttatcttgtaaaataatgagtgtctcatcactaaaaatattgaagtcaaggtcagataaccatgtcattggtagtgtagaatgggtttttaaattaagaatgaatccagactagatgaaccgcaaggtctctcttatctttcatattctgtaagctcagagataaaaactggcttttttcctgcaatcattcttcagtagtctgaagtcaaggaaataaatcattctcaaccatctggtagcctgcatggtccctgacccaataatattttatgacgcatttggaaacctgtgaaaaatgacagcagaaatatagcgacaattgcacatttagaaacattcaggagccttgttaggtttggcacacagctcttcaaatatccataataagctacaaacttgtattaaagtataggtttaaaaatctataatgaaaatacctctgaccctcagtttggatctatcacattcactcattcaaaatgatgatacgataaccaatattcattcagaatattttgtgattgcctactgggttccatttgctcttctaaatgctagggatatagtagagagtgttgcagacaaaaatctcttctcctatgtaatttatattctagttacggatacatacgtttaacaagaaaaaaaaacagcaatagaaaataatttcaggtggtggtaagcactttgaagactctgaacagggtaatgtgctggagctttgttggtgagggagttacttaagatagattgttaggaataggccctcttaggaggtgatatgtgaactgagaccagttgacaaaaagtaagcacccatgctggggaacagtgttttgggccgaggaaactgcaagtataaaggcccacccttgggtggtctgggcccgtgattactgacagcccactcccctgttctttggaatcacctgtgtaaccacactctaaatgcgaggtgtaagacttggccttggcaaaatatcagactcagagtttaagttggcaaagcacaagcctatggtatctcttgtcttctctcacctgctgagtttttcatcatatcagttactgaagtgcagtgtcttgacttgatctggagaagagaagcataaataaaagacataaaagacagcagttagaaaataagtctttatagagctgggacactcaacctcttgcccatggaccagggctcttcttggatggacttcaaggaaaaaatgatactgcaaaaattgttttcaatattttatatccattttttttccaggaaataagagccatagctttcctcaactcttcttggggttccatatgtaagagaataagaaaacacagttgtaaagaatagttgcagcacttactgtctcagataggaaacttagcataagtagcccctcaaaaaggctgaaatgccattttactcctctgtgtgctacctcaagaaaaataaatggaagtaaacaggctcacaataggccctgcttcaaatggactgactcaaaatgtaaaacaaagagggacagaacgtcaactaaaatatacctccagagacacatttctttgtctagtagttagaagaaagactactgttcaaatatattggctgcttcttcagaaaagtagtattcccacagatttatgtaagggctggacacagacatgtcctccacacttgtgtgcctttgggacacttttcctttagaccctcagactttctgtgttccatgtgttgggttacagttttaaatattcttaataatttccactttgacaaacccatttatgcctctttagaagtttatttatttcttctcccaatgctagaaaacattgacaaatagaggaaattgggaacaacagggggtgtgattttgaagggatgtgacgtttttctccgagtcttggcttacaggaaaaagaaccccatgatgacaaatgtgtatgggttaccagtgctcacagaaggtaaacagacttgtagaggtgctcctacaggttaaaagtgagggtagctcatgttgctaaagaaaaaaaaaatcatttaatgacacttgttaaagacaagataaggagccggttacagtgattcacgcctgtattcccaacactttgggaggctggggcgggtggatcacttgtggtcaggagttctagaccagcccaacatgatgaagccctaactctactaaaaatacaaaaattagctggacgctgtggtgcatgtgtgtagtcccagctacttgggaggctgaggcaggagaatcacttaaacctgggaggtgaaggagaatcacttaaacctgggaggtgaacctaggcggtgaaggttgcagtgagcctagattgtgccactgcactccagcctgggcaacagagtgagactctgtctcaaaaaaaaaaaacaaaaaaaaacgataaggaaaactttatttcagcagggattattgggataggaataaggccactgcagtgtggtcttgcagtgggggagacagattaggctcaattcagaatacaacacgggcaagtgggaatttatagtcaaggaacaggttgggggtcagaggatggaaaatcattaagaggaaacatagtggtgagggatgggattctatcaaaccttacctaacaagattcgtactgaaggcaggccagggtgatcagacgtcagctggacgatgggtggataaggaagaagccagttagatatcaaggatgatcaagtatgaagaatggggaatctcaccattcttaccagcttaccaagattcttgctaaaattggacaatgcagagacaaacaccaagtccaaacgtcaaggttcggttgaaaaagaactcagtggagcctgaacagagtttggtcatggagagaaactgtatcagtggtaaaccatgtgggatgggctgtttgagggttttattctctccgttgagtgttgtatgatgtttgagttcatgaattcacactctgagccctcatcctgattagaaatactgctctcacctgtctcctctatactctgctgtccttggcaaatgatatttgttttataaccaatattattttttctgggcaatattttagttctcaacactttttgttaacactcctttcctgctaacatctttgaccaattagaaagatgagccaatacagtatgtctgtttgttttgactgatagaaataacttttgctttgtaattttcatatacaacattctattataataaatatttaatataataaatatattaaatatttattaatatttaattaatagtaatatatcatattaattattaaattattaaatattaatataattaatatattaaaataaatataataaatatttaatatatttattatatataatttaattaaattatatgtataaattaaattatatatataaataaatgaaatataataaatatttaatataatataataattatataattaaattatatatatttaattatatatttttatatatttaattatatataagtatatataataattatatttaattatatatataattatatataattatattattacatataattatataaataattatatttaattatatatataattatatataattatatataattaattatatataattaattaattaaaaataattatatataattataaaaataattatgtaattaaattatatataaattaaattatatataaataaattaaatattataataaatatttaatataataaatatattaaaaataaatgtttcctcatcactcctgagccgtaagtggagatctgacagagtgttgtgggaataaaaggccatggttgggagtggacttggccttctggcaagctccacctagttataaggtcaactattttttttcccagacaacccagctctctggttattagtaggattctacttcagaccaagtaaattgccacacttgaaacaaaaaattaggggcaagtattaaaagagaaggctaaggcagggagtgagaagtcatagcttagacctccagctaggtactggctagttacaccaacatagaagttggtcaagtctgcatagaacagattccccacatcagtggctaaaagaaaaggtaggaattagaaaatatttaagtggggcaccaaaaaaaggaggttgatacagagcaggcaatccttaattgctattgtctttatgattgagataaccaatgggaacacatagtagtggtagtaactctttgggcttctaatcttaaagaataagtagctgtaagccacgtgcagaaaatattagggtggcacagggtcgaaaaagggcattcccagccaagaaataatggggcaaagttagagctggaagcaagagagcacagctggagcacagggtgtgagaagggccacatttacagggataccgaaggcagggattggattctgaagactcctgtatgtcctgataatatgtgggcattttttactgaagtctgcgaatagttgccaaataaaaagggaaacatattcacaaatttgaggcattactataaaaagacggtttaggacaatgtagtcataggattctgattttttaataatgaaactttgttctcagataaacatccgtaaaccctcctgctcagatagtcaacggtaggcagtttgcagtttgcaggttcagtggttatttagatggaatatccccaagaatttccattctcagggttcttttatataaagtcaaagatgctccctcctgtctctctactgacttcattatctcctctgcaagtagctgctgatgagatctggttgactgtgacttgcggtggtatctgttttatcattcaaagccctgcaggatcaatttgggcttggtaggggggaagatccctttttatcttcaggctttgcttgatcgaatcaggacttgaactattttgccagttttgtttcaggtatacaaatgcattcttcttttctttcactctgtttctcgacatcattcaattgtgagtttcctgttctctattctgtctattcaatcaaacaatgtttccttttggactctattagtagagacttgcaaattttgcccttaaaatttatggatgtgaaagccatgataatattttgacctgaaaaagtaccttacgaaataacaattttagatttaagcttaaacatcatgctattggcattgtagagaatgagttgaggtggggaaattaagctgaagattgggtcttaaggcagggaaattaaggtaggaaactaacagataaatcatgtgatggtaggggctggaattcaggttgtggcatttaatatggagaggaaggaatgaatgtgaaagatatgtcagaggcagaatgaacaggactgggttataaattggctgtggggagtgaacgacagggaagttgcaagcattcttgactctgatttggactctgacagtgaggaagccatttactgaagggagtggttagagttgagtagttccattttggaaatactggatttaaggttcttgtcaggtattccatgtgcagaaacccaggaggcaatatgagcttcggaggcagaactcagctagagatatggattttgtgtgtgtactaattaaagaaagtgctaactcaaaatacaatggcttggataagctgggagtttatctctctttcatagaccaatgacctagtctatgctgccaggcagctctgctgcacaagttcatccaggggccagaatgatgagacaactttgccttttaaatatcttgtcttccaaagttggtcctgtttttctccagttccagtcatggagagaaagagaatgagaaagagaactcccaatgcatgaaggcctacacttaacaccactgttcagattttattggcaggaactcacatggctttgcttagctgcaagggaggctgggaaatgtggtcaggctaggaagctatattcttttttttgagatgaaatctggctctgtcgcccaggctggagtgcaggggcgccatctcggctcactgcaagctccgcctctcaggttcacgccattctcctgcctcagcctcctgagcagctgggactacaggcgcctgccaccacacctggctaattttttttgtatttttagtagagacggggtttcaccatgttagccaggatggtctctgtctcctgacctcgtgatccgcctgcctcggcctcccaaagtgctgggattacaggcgtgagctaccgtgcccagccagaagctatgttcttatataaacactaattactgtggatcaagtggaggacagactgggtgggtgagtgggtggatggactaagtttacacgggtgtcatcagtgtacatgaggcaatgaaggtatggagggaaataagaccacacaaggaaatgatgcaatgtatgcagccagggacagaactctgtgacctgccaacacttaagggcagagatactaaaattttgagatggtgactacatggtaaagagcaagctgagtgtagagatttttttcttctacatcccaattcccttatctctactaagatattaatagtacccacatcactgtaatatacaaagataaattgagatacgacatgagaaactgttagtataccacttaccacagtggtagccgatgacaacaataacaacaattttttaaggtatttactgaagtaagtagaaaatttattgatctatgattagatttttgactaactaaattgtccttagttttgcttgaaatgacagtgaagtgtgtattttctggttatgtgcgtttgtgctgctgaaggtagattttcaggtcaaagtttttgggacttggtccagtttttcactttgcttgttttaacaccctctaacttcttatagatgcaaatttaaggtgcccaaatgggcccccaagagagaaaatatttgcaggaggggtttgtgaataaactctgctccttcaggctgctggaactggcctcactagtgagcaagaagccttccaggttttctgactctagcctctttgtaaatacattttttttggtaaaaatgaaaaatgatcagtaaatgcagtcttttacatttcgttattctacctatgtaatagggatattgcgagggttaaatgagatatgaggacctttcgtatatcaagaaataataagatgacttttttctactgcattttctatgcacagatttagttatctttctgttctcctaagagagagctaaagaacagaaagtcttgtagtgaattttattgcttgctgctttttttaaaggaagcattatttccctgcagagcttaagattatcagtggagaacttttggtctaacctgtttaaatcttgtgagctcattaactgctgtcatttacttcaattctagaagaaagagggttgaagactgtatattttcatctgataatcaatatagctatttcaaatgagagttatgtttatttacaaaaatattaatattggcatgtattggcacctagattttatttacactttatcttcataagcacattaaaaggctgcccgactttttgatgtggcctgtgaatattgagtactgaaaagccatgggtgttcttccaattttagaaactcattttggagatagatcagagaataatttcaagtgtataatttcctcaagtgaaatgaggcatcctgacatggcttcaaatagattccaggaaatgtaggggatttgtgatttttctctgataaaggtagtgttattatttacagctaatagttgaccagaattttaatattgtagcaagtaaagtaggttagccaacatgtcttattcatacctttgcattatctgaagttattaacatggggctaacctagctttatttaggaagaaaacattttcaagtaaaattaattcagtgttttattttgagaaaagcaaataagtacacttcagttctttcctattctgaataaaatactctttatgaaatgaaatgcagttttgaattttatcatttgcctcctctttttactctacagaaatgtttgtttatgcagctagatatctataaatagtataataaatacatataaacacatctatgttttttatctagacttaatgtcttacttttcaagacaagtttacactgaaaaatgtaaaccttatgcataattatttgactggctcaaaatatgctcagggttatgttcaggttgaattacttcaataagagtgattcagaacagacagaaaaccctggagctatttcaatgaagaatttacagagtgactgaggaggtcaatcatcttatacagacaaatctggaaaaatactgtcctctcaagaagagagctattctttggaaagttggttcttaaatttaagtacttgtgaaaatgattcactgatattcagcatgacacctgtgttaggcaattcttccattgctagaaataaatacttgagactgggtaatttataagaaaataagttctgcaggctgtacaggaaaggcaagtgataatggtatctgcccctgggaaggcctcaaggagctttgacacatggcaaaaagcaaagcggcagcaggcacatcacatggccaaagcaggaaccggagagagagatggggggtggtgctacacacttttaaagaaacagatcttgggagaactccgttatcaccaagaggatggccattcatgaggaaactacccccatgatctaaacacctcccaccaggccttacttccaacactgtggattacatttcaacatgagacttgggtggggacaaatgtactaattatatcaacgcctgtctgctgcaagtttctacatgcctaatgagtcagcaaagaaacatttaattgcatgtactatagagaaatttgtgcttttacttatataattacactctgtatcttttaaaattgaatttattaaaggatatagggcagcatacaacaaaaatacagtaaattaataataaaatataaacagaattggaaagtcaaagttaaaggaaagagtaagcagaggtgcttaacatgaagacagacagttactgtggttgagtgtcctgtttgcctctcagctttctgacagctcaggtgaaaaggaggtacaatcatcaccataattctaatgttaggagagcaaacattctaacctcaaagggagcaaaattctaaatattttatcaagtgggattttatatctactactttatcgagaaaaaatatcttcaatatcatttttcacaaattttatagagcagtttcttatggtgttttccaatacatgtcattaaatacaccttggtggaaaataatatgcaagggcataagttaatatattgcaagttggcatattttggtgacctggtttgacggatggacatacagtactgagatgtcaactgatttcatttcttttagacaacttgtagttgacacctcttttggagatactcttgatagagaagcataaaatatatagtttaatgaattctgatgacaaatttgaggactgaagttctgccttgtttgaggagttacctgtatgctttttaaacaaaatgaggaaatgatcacctgatattttgctatataaatggaggagtctaactaggtaggacctttgcttggaacaaagcatacttgcctacctgagtgtgaagataatcttaagggaccagtgatctggaaggacaccaagtcccaactatgtgatgtgtcaatacaattgcatgtctacatttctgggcaaccgaaaaagctgttttgtcattggaatccaaagtcattttcaataaccttgattgtcttaatatgtcattgcattttatagttttttaaagttacaaatcaatgtcattttcaaagaaacattgacagaatcaacacagtctagaaaaggatcagcagaatgattaagtgtacatatttggaaaacttgaaaactaggactatttagcctagagaggagaataattaaagagaaagggataattgattcttcagctatgactgtctaccttatggaaaagggaagggttgagagcagagttagaaccagtgcatccttacaaagaaggcaggttccaacaagggagtgcttgttaaaaattagtgttgttccggtgtggacagggctgtctagtgaggcgaggagtccctctcattagaactgcaatttcattcattgtttttttattcccctgtgagtcatactttgtttctttgcatgtcttataactgtttttctttaagagaacaggacattttaaataatataatgtgacagctctgaaaatcagacttttccacctctccagcgtttgctgtgtttatttgtcggttcgatggcattttctaaactaattctgtaaaggctgtattctttgtcacatgtggtcattgaagtttctactcagttagcttagtggtcagttaatgaatgaacagagatttccttagatgcctagaaccagtgagtctcccggcctttaccaagggtgcacagagcttcaaggtcagccagaggagagatctcaggattttgcaggtctttcctgggactatgcacagcccctgaacctaagcacagccctattcatgtgtgtaactttcgagatctccacgaatatgtcagagcttgtcaagcccccatgtgcacaactgttaccaactgcctcaggcagcctcagagatcaatagttacctctaactgtcgttggtaacctcctggggagggagggaccggaggctgttccctagtcgagcttcaagttcaggtcaaataaagacatcctcctgagtggggtcttccaggccagaccagccatacagtagcaatcctccgggagaggcgccttgaaggagctgcaaccccattctgcgccctctggtggcggctaggctgccagttctcaccaggattgcaggctcttggctttctagtcagctgaggggagcagggatgggaatagggcaaatgataattccatagcacttgctgttcctaagagattcagcagcttttcgtgaataaacgctcctcagattgccgcaagactttggttaatttccagaattctagaaaaattgaggttaacaggttttttaccagtgttttcattgattatatgagtagagattctttggaggtccttcccatgccagttttgctatgtcactctacaagtgcttttttgccatgtttttaaaagataataagttgaattcatgacttccaaggacccctcccattctagagtgttcagtattaataggtctcattccccagccatcctaggtgatagaatttactgtaccattttaaaaataaatgtgattgtttaagataaactgaaatagactttaaacagtgccaagatatgaaacatgataaactgtacttaattatcaacctctgccttgttttattcacagatttgaaaaggaaacattacttttctggcacagtttcttagcttaaaatgaattagtctaaagaggtaggagatcttaagccaatatagatacaatttaagccccagagactattgaaagggtaaaaatcaagtaattgactgacagcatttcacagagttgaatcatcggcatatatatttattgaatggcttacttttttgaataactaatacattgttattaactatagtcaccacgttgtattgtaaacctcttgaacttattcctcctaactgaaattttgtatccttgaatggtttacctctaaatcttttttttttttgagacaaggtctccctctgttgcccaggctggagtccagtggggcgatctcagctcactgcaacctctgcctcccgggttcaagcaattctcatgtctcagcctcccgagtagctgggatttcaggcatgcaccaccatgcccagctaatttttgtatttttagtagagacagtgtttcaccatgatggccagactggtctcaaactctaaacctcaagtgatctgcccgccttggcctcccaacgtgctgggattacaggcatgagcccccacacccagccagtttgcctctaattctgaaatctattataattattattactaaaatattaatatattcatgctaattattcactaaaagtccatttttgtactaagtaccgagcacataggtaaggaatcagctaaacatgatccaaggctgttttatatcaatttcttcaaagatagatgtgagaaaatagtgccacattatttggtaatgatgttaaatgaagttgccatgcaaattaattttccagatgtctgaagccaaacctttttaacttaacaaattttgaggtgactcttcccgaactatgtaaaatatttctctgcttcatcaggaagctaatgatctaatgtctcaggagcaagtaatcattttggacagttatctcattgtcctgtaaaacagtagcagccaccttgctctgtgcagaagtactcactggtgacataatgctgtgcttctggtgttttcatactctttcatgaagtgttgtgcctcgtacttttccattaatatctgctaatcatagattttccatctatttttaatttgatctttctactttctaatctgtgaactgacacatcagacaagagattgtacctactgggttcttaacatgtatgaggcactattctaagtgttaaaatgtgtctgtgcatttaatcctcccaacatctcagacaggtaagcactattatcatctatgtttttagacaagaaaactgaagcacagagagattaagtaacttgccccaaatgacatagcagttcatgatcttaaccattatactataccgttgaagtggcatcgttcctctggggtaatacccaaggttagttgtcttaggccaaggaaatcaaggatgcgaacacacaaggagtgaggttaagagtggaggtttaataggcacaagaaagagaagaactctctcctgcagagagggttcccgagtgggttttccggtccacagcaaaatgcaataggttttaaagatgagcttgaggaggcggagtctgatttacacagggcacgaaagattggtcagatcaggtgtaccattcgcatagtgcatgaaaatctggccaccccccaccctaatcttttattgtgcagatggtcctctacttggctggcaccatattacctgtttctttactgtatacacaaagacaagggacgatggaccctccatgttgaacatacgtggcccccaggtagcccttttctgttggcacagctgctggcattcacctgtgcaagcttccagcttgcttgtctatgtctacagctcaatttttcaggcagttctattaatgattttggagctgctttttgttaaaagggaaattccaccgaggactcttttaccctcactatctgcctaaataatttctatctcctgtatcactgtgtcatataaagatgcttattaaaacaacacataaacctaagagtgaatgagctcttatagaatacttgagtggaactctttgtaaaatacttaaattttggtgagttgtctttgtgatgtctatgttagtttcccacagaatgtatgtctatgtctgtgtttgtgcaaatttcttgtgtttgtatcaaataggttaaggcggccagagaagcgactttaccaaaccggtgttaagtattattaaatcgtaaacattgtgtgccagatctggcctaatgcctttttatgtgtttgaagtttcactgaaacccagccacattcattcattcacttaccatctatggctgctttcttgtgacagtggcagggatgagtagttgccatagagaccatatggcccacagagcccaaaatatttactatctgtctctctaaaaaaagaaaacaagtttgtcaacccctgctttagatgttgggttttatgtcagtgggcctcaatttcaggttttgagaaagacaaaagaaggggttggctcattggaatcagctggacaggcttttcaaaagctacacacctccctctctccttcttctcatcagctttccctgagaaccactgtcttaaactttatgatcccagttagtctgatttcattaactgatacagattgtttgctttcattaactatttttggccttctgtaacatatctaaagtaatgttgaccatgtatttcttttacagggttgtgggaagaaaatgtattcctttttgagaggaaccaaacaactgcaggtgctgaggtttctgggaatctccattggggtgacacaaatcctggccatgattctcaccattactctgctctgggctctgtattatgatagaagggagccggggacagaccaaatgatgtccttgaagaatgacaactctcagcacctgtcatgtccctcagtagaactgttgaaaccaagcctgtcaagaatctttgaacacacatccatggcaaacagctttaatacacactttgagatggaggagttataaaaagaaatgtcacagaagaaaaccacaaacttgttttactggacttgtgaatttttgagtacatactatgtgtttcagaaatatgtagaaataaaaatgttgccataaaataacacctaagcatatactattctatgctttaaaatgaggatggaaaagtttcatgtcataagtcaccacctggacaataattgatgcccttaaaatgctgaagacagatgtcatacccactgtgtagcctgtgtatgacttttactgaacacagttatgttttgaggcagcatggtttgattagcatttccgcatccatgcaaacgagtcacatatggtgggactggagccatagtaaaggttgatttacttctaccaactagtatataaagtactaattaaatgctaacataggaagttagaaaatactaataacttttattactcagcgatctattcttctgatgctaaataaattatatatcagaaaactttcaatattggtgactacctaaatgtgatttttgctggttactaaaatattcttaccacttaaaagagcaagctaacacattgtcttaagctgatcagggattttttgtatataagtctgtgttaaatctgtataattcagtcgatttcagttctgataatgttaagaataaccattatgaaaaggaaaatttgtcctgtatagcatcattatttttagcctttcctgttaataaagctttactattctgtcctgggcttatattacacatataactgttatttaaatacttaaccactaattttgaaaattaccagtgtgatacataggaatcattattcagaatgtagtctggtctttaggaagtattaataagaaaatttgcacataacttagttgattcagaaaggacttgtatgctgtttttctcccaaatgaagactctttttgacactaaacactttttaaaaagcttatctttgccttctccaaacaagaagcaatagtctccaagtcaatataaattctacagaaaatagtgttctttttctccagaaaaatgcttgtgagaatcattaaaacatgtgacaatttagagattctttgttttatttcactgattaatatactgtggcaaattacacagattattaaatttttttacaagagtatagtatatttatttgaaatgggaaaagtgcattttactgtattttgtgtattttgtttatttctcagaatatggaaagaaaattaaaatgtgtcaataaatattttctagagagt

SEQ ID NO: 684 - DNA, 6458 bp, Homo sapiens
ccagcgctggaggccgctgctcgctgcgccaccgcctcccgccacccctgcccgcccgacagcgccgccgcctgccccgccatgggtcgacagaaggagctggtgtcccgctgcggggagatgctccacatccgctaccggctgctccgacaggcgctggccgagtgcctggggaccctcatcctggtggtgagtggagggagccggggaagcccttctctctccagcccttgcactccccaaactctcacttccccgaaggggctgtgttttccaaggtagcctggacccacctccccagctgtgacccccacgcttaaccgcggaggatcaagctgacttccaaagtcctcttccccacggttctaaccccctctctgacagctccgactcttgccagaatgacagctgttactccccagtgatagtgccgatcgtttaccctcccacaagtgactcagccaacaggctgggggcagcggtcacgcttgcagtctgggacagccagccacttcccctgcctcccacacccctccagattcccagaatcccagcccccagatgtaggggagggggcggaggcaaatgagccattattaggttatttgggtcctgggtgtctggcctctaatgaataattaagcctcaaaaagtccaaaggttgaagtgagtgaggacagtttgcacgagtgggggcagagggtgcaggccacatgggctgcgaacagcgaagtgggaagggaggcagattctgacggtagaagggtgggaggaagctaggcccaggcacagaggacgcgtgtctaaagttgctcacctggtgctcagcgactcccaggccctgtctgttatccagacagatgctgtcagcgtctgtgcagaagacgacaagcattctggttactccctggcctcttggttactctgtgggttctctgagtgagcatttccctgcctgagttactcctcagtcctagttactccttggtcacaccagtttcaccctggttttgttctgagtgactctgtttgcacttcttaggtctggcagacccaccagttatgttctatttcctgtcccagttactctgatttttcagccgctcatgtggttacacctgttttcctctgtgttcagttgctacattgcagtgagtgggttactccgttcctgccccagccctgggtagtacagaccagctggcccactgtggactaggaagcctaactaagggcaagtagggatccccaaatggttgaggatcaggatctatgggcagaggagggctgaaacccacttctggcttccaagaataggaagtggggaagccacagggggcattttatccacagcctcccataagattagtcgtcctatcagccagccctagcccctctctcctgtgccaagaaggcaataggaggtggcctttatcactctcctgcctcggagccctcactcctatcggagtcctgagtccagccacctgttttagagcagccaggctaggggaggatgatgtcttctattttcctagaggggcctcctcattccctcccaagtctcagttcactctctcacaaaggagccgttagtcctcccactgagccccaggatcatcaggcttatcccagaccacaaaagaagagtgttaaattttaggggaagggttgcagactcagatggatgtgaggtattggatatcagtgagaagcagaacttcaaggactgcatgaactggaggggcaggcctggggatccctttgtagtgggtgagtgcctgcctgcctacctgcgtgttgggagcctaggcctgcagtggcagaatcagggttggctttggggtgaggaaagcccctttctctgagatacctggtgtgagggcagggggcggtgctggccgagaactcagggcaggggttgggggaggaagaggaagattagccccaaggtggtggaactggctctgacagctcctccctccaaggcgtcctgggatggagccaggtctgagcctttggcaggcaaggagctgctgccagggcctcccaagcagggcagggcgcctcagaccctcacgtgcctgtctcccaccacccctcctcacacatacacctgcaatctctgatctttgctctcacctgcctgcacacctttgccccatgtcattgccgctggcttctccgttatctcttggtctttctgggatgataatcaaaatgcttaactatccagtacaacaggcactgacccgtcagaataaacaaggtctgtagcacaggtcctggaaactgcctgctctgtgggcataaaacctttagttatgggcaggtgggagaggagaccagggcaaggcattggagcagctttgagggacactcagggggctcagggcaacaatgctttacagctgctgcagaagtattttcaggcttgaacaaggggaacagacatagtacgttctttttcttttttaaatagagacaaagtctcactatgttgcccaggctgttctcaaactcctgggttcaagatcctcccatctcagcctccaaagtgctgggattacaggtgtgagccaccacagctggctccagtatgttctatatttgtagaacaccagggctcttagtctcttttagttcccccatttttggcagaaagtttagaaccgatctccccatttctacagccctgggtcccgggctggggatagtgagaggagccacacagatccctgtctgtaggacctccaaatctgagtggggaatctggacccctgagagcagagaggtcatgggtggagagaggagacgctgggacagggacaggtaaaggaaggggaggttgttgagggggacatggtgaaggctggggctctggcatcctggactcaggagaagtggattcaacctcacttctggtctcctccctatttatttatgccgcccattgccaccactaccaccaccacatgagcttttcttttcaactcttttttttttttttttgagatggagtcccgctctgtcgcccaggctgaagtgcagtggcgcaatcttggctcactgcaacatctgcctcccattttcaagtgattctcctgcctcagcctcccgagtagctgggattacaggcacctgccaccacgcctggctaatttttgtacttttagtagagatggggtttcactatgttggccaggctggtctcaaactcctgacctcaggtgatccacccacctcggcctaccaaagtgctgggattacagtgtgagccactgcaccgggcctacatgagcttttctttggggcagctgggggatgagtgagaggcttcccacctttatggtccaggcctgaagggctgtggagaaacttgtgctaaggtgaaagctgttcccctacacctacgcctgctgaaattcaaggaaaatcagtgaagatggttcagtcatcttctaggatcccagtcgcagaccctgcttccagccctttccatagggccctctcatattagagttgggacagtggggtgggaaggcatgtgtcctttttctggaaagtgcaattacagcagaaggggtttgggctgggttccaggaagcgcctctagtcctcccagtggtggcgagtgggcatgttgctggcttcaccccttccttctggagtgagagttgctggtcctcaccctccctgcctgttcttcttcctgacagatgtttggctgtggctccgtggcccaggttgtgctcagccggggcacccacggtggtttcctcaccatcaacctggcctttggctttgctgtcactctgggcatcctcatcgctggccaggtctctggtaaggccttaaccctgcccccagcccttggccctcaatagcattcccactaggtgtcctggcattcctaagggcaggtcacagctgtggcctctgctttggccccttgggaaaggagggtggagaagaaacttgacacttagaactttcgactctcaccttggaatcagagattatcagctgacctgttacatagaccaaccgccatcctgtgcaagaaacccctctctgcaccccttctcaggggaccctagcctgccgactgtggcaggctgcagctaataggtcccttgtcccctctgcccaggggcccacctgaaccctgccgtgacctttgccatgtgcttcctggctcgtgagccctggatcaagctgcccatctacaccctggcacagacgctgggagccttcttgggtgctggaatagtttttgggctgtattatggtaagcattccccaccctgtcctcctccactacccccgtccctctgttcaggacctgctggcaccaggccttttgatgacagacggctaggacctgcccaggccccgggctcatgactcactcattcacgcacagggtcaaggtagggggcacgaagggaaagaaacaagttgggcaataacagagtctcaggccctccaccccaccccacgccaccccctctgcctgctgcaatacagcagtattgctacttacccataactcatgggagggtggggagggcacacctgagagggaagtctgggctcaggcctctcccccgactcactgtgtgtctaatctgtcaccagatgcaatctggcacttcgccgacaaccagctttttgtttcgggccccaatggcacagccggcatctttgctacctacccctctggacacttggatatgatcaatggcttctttgaccaggtatgggctggggacgtgtgaggggaacgcagggaggggaccgagttgccttggtagctcatgggctggttgggggacaggactcctcgactgtagcagggtttctccaatctgtggggtaacccgcatcagaacatggtggcaagtacttacaaaacatgcggctctccagcgggttcttgtcacgcagacattctagcaccattgctttcaggagaagagcatgggcgggcgctgacaagagtttaagagctagagggaagacgggggatggaaggaggggtcagagaaagggagggagctgcagctcaccctgttctccccactccccagttcataggcacagcctcccttatcgtgtgtgtgctggccattgttgacccctacaacaaccccgtcccccgaggcctggaggccttcaccgtgggcctggtggtcctggtcattggcacctccatgggcttcaactccggctatgccgtcaaccctgcccgggactttggcccccgcctttttacagcccttgcgggctggggctctgcagtcttcacgtgagtacagcccccacccagctcaccccagcctgcctctcctctgccctgccccccatgtccctgactatgagtgtctgtccccccaggaccggccagcattggtggtgggtgcccatcgtgtccccactcctgggctccattgcgggtgtcttcgtgtaccagctgatgatcggctgccacctggagcagcccccaccctccaacgaggaagagaatgtgaagctggcccatgtgaagcacaaggagcagatctgagtgggcaggggccatctccccactccgctgccctggccttgagcatccactgactgtccaagggccactcccaagaagcccccttcacgatccaccctttcaggctaaggagctccctatctaccctcaccccacgagacagccccttcaggatttccactggaccttgcccaaatagcaccttaggccactgcccctaagctggggtggaaccggaatttgggtcaatacatccttttgtctcccaagggaagagaatgggcagcaggtatgtgtgtgtgtgcatgtgtgtgcatgtgtgtgcatgtgtgtgcaggggtgtgtgtgtgtggggggggttcccagatattcagggcaagggaccagtcggaagggattctggctattgggggagcccagagacaggggaaggcagcctgtccatctgtgcataaggagaggaaagttccagggtgtgtatgtttcaggggcttcacatggaggagctgcagatagatatgtgtttctgtgtatgtgtatgtctgcctttttttctaagtgggggcttctacaggcttttgggaagtagggtggatgtgggtagggctgggaggagggggccacagcttaggtttggagctctggatgtacatacataagtaggagcagtgggacgtgtttctgtcataatgcaggcatgaagggtggagtgaagtcaggtcataagtttcatgtttgcttttgttttgttttgtttttaatgtatgtagcagatgttacagtcttagggatccgggatgggagaccccactttagaaagggtcgtcactcctttaatcctctactcaacaatgtactcttttacttttatattaaaaaaaataaaataaatatgtgcctaaaacctcca
